United States Patent Application Publication US 2013/0096032 A1 - sequence listing, part 7

SEQ ID NO: 191 - DNA, 82532 bp, Arabidopsis thaliana
aagcttcagatgaagttgaatcttgccaagtagacattctgagtcccatccggagagtttctcggttacttagcaacaaagagagaaaccgaagcaaacccaagacagattaacgctcttttcgaacatgctagccccaaggaacatcaaagatgtctaaagactctttggtaggattactgcgttaaaccggttaacatctcagtcagccgataaatgcctttctttctatcaaatactaaaagggaacaaagagttgagttggatgaaagatgtgaagatgctttcggtcaactaaagacatacttaagtgttgctctaattctctgaagcctgaagccgatgaaaaattgtacttatacatctcattttcaaatcatgccgttaatggagtaataatttctgaagacagaagagagtgaaagccgatttgttacatgagcaagtcatcaaccagtccaaaattaagttacactataatggagaaacttgcgattgatgtagtcacttcaacttggaagctgcgactttatctatgtctcaccagatcatagttgaaactcttgggaatattggttaatttcggcggggttcaagtgtccaattcgctcttcacgaaactagatctcatcccaagaaggtttttccaagtttcaactcttggaaaaataagattattttggtggactataagtgttgagttcgctcttcactgaactatctcgtgaagggtttttccaagttccaactcttggaaaaataaatctctgtgaaatctaagtgttgagatcgctcttcacaaatttagataccacctcacatcaacaagcatttatgacgaagtctttgagtacaagctcggaagaagatcttcagtttctctctagattgctgctcaataacctgcctttgtattctataagcagaatacactttctaaactcaagcttatagcttcgattcgaaagtcgagttcacttcgcaacaacttaactcgaggtcagctcccatgcataactcgagtttaattctgataccaaaactccatggttgaactgacgagtttgagtcaataaaatggatttaatcctcttggacaaggggtcaactagcaaaacaaagatctttacggtgtttagtcgatctacctaatacttcttaggcggagcacaattctcgcaatcaaagaaagtccaaagattgagtttgggggtttgatcaacctatttctctcttagccacatggcccaaatttctcttagccacatggcccaaatttttgaaaaagtacggactttgcaaatccggcaacttcgaagcaaatactttaagcaagtgtcattccaaaacccctatggacaacgaaaaggaaaaaagttttaaaaacccctcttgggcacacaaccaacaaattttaaaaccccttgggcaaataaaaattccctttcgggaaagtcgtattcataaaataaattgggacaatccccagattttatggtaatagccataaaagagttaagatgagctgaagcctcatcaacactcggtgtaatctcgtcttggttcaaagcaggagtggccgtcccttgatcgtgagtttcagtttcataattaggagctgcacatgagctggatgaagcatgagcattagttaggatacacattttggcgagttgtcattcaagtgtatgaattgattgtgaaagttattttatgaattagttctataattaatggcacattggaagaaggaaagaggctataaaagagaggtgatgactccaagataaggggggctagagattctatattctgaccacaaatcttaaacttaaacattgttattttctcataaatacacaaaagattatttcttctctttttatgtaagatctttacataaggaatactataccattttctatgtacaattcttcatacatttctatatactctcttatacttttcttatgcatatatgtcgtgtacttttgtatttgagagctttagcccacaaataatataaatacttgagtgtgtgaatccgacatccataaaagtctgtatgagtatctggctatgtatcttctagcatggaaacacaactttagcttttaggatctggttgtgcttctacttcttatagtcaatcatagacatgacatctagtcatatttgactccaaaacactaaacaagcttcttcttgcttctcaaagctttgatagtgacgtcgaagtccgtatgagtctttggctttgtatcttctaacaaggaaacaataattaaggtttcaagatccggttgcggttctagttcttatactcaatcatacacatgacatatagtcatatttaactccaaaacactaactaagcttctttttgcttctcaaatctttgatggtgaagacaaagtccgtatgagtctttggctttctatcttcaaacaaggaaacactacttaggctttcaagatccggttgcgattctagttcttatactcaatcatacacatgacgtctagtcatatctgacccctaaacactaaccaagcttcttcgtgcttctcacagctttgatggtgtcgtcgaagtccgtatgagtctttggatttgtatcttctaacaaggaaacattacataggattttaagattagtttgcggttctagttcttatactggatcataaccatgacatctaaacaaatttgagtccaaaacactaaccaagcttcttcttacttcccaaagctttgatggtgtagcccaagtccgtatgagtctttggctttgtatctctactaataaggagactctacttaggcttctaagatctcgttgaggttctagttcttatactcaatcatacacatgacatctagtcatatttgactccaaaacactaatcaagcttcttcttgcttttcaaagatttgatactgaagctgaagtctatatgagtttttggctttgtatcttttaacaaggaaacagtacttaggctttcaagatccagttattgttctagttcttttgctcacccatacacatgaaatctagtcatatttgactccataacactaaccaaacttattcttgcttctcaaagctttgatggtgtagccaaagtccagataagtctttggctttgtatcttctaacaaggaaacaatacttaggctttcaagatctggttgcggttatagttcttatacttaatcatacacatgacatattgtcatatttcagtccgaaacactaactaagcttttttttgcttctcaacactttgatggtgaaaccgaagtccgtatgagtctttgggtttctatcttgtaataaggaaacattatttaggctttcaagatccggttgcgattctagttctgatactcaatcatacacatgacatctattcatacttgactccaaaacactaaccaagcttctttttacttctcaaagctttgatggtgtagctgaagtccgtatgattctttggctttgtatcttttaacaacgaaacattacttaggcttttaagatcctgttacggttctagttattatactgaatcatacacatgacctcttgtcatatttcactccaaatcactaagtaatcttcttattgcttctcaaagctttgatggtgtagccgaagtctttatgagtctttggatttgtatcttctaacaaggaaacactacttaggcttttaagatccagttgtggtgctagttcttatacacaatcatacacatgacatctagtcatatttcattccaaaacactaaacaagcttcttcttgcttctcaaagctttgatggtatagtcgaaatccgtatgagtctttggatttgtatcttctaacaaggaaacagctcttaggcttttaagattcggttgcggttctagttcttatactcaatcatacacatgatatctaatcatatttgactccaaaacactaaccaagcttcctcttgcttctgaaagttttgatggtgtaggtgaagtccgtatgagtgtttggttttgtatcttctaacaaggaaacacaacttaggcttttaagatctgattgcggttctagttcttatactcaatcatagacatgacatctagtcatatttgactgcaaaacaataaccaagctacttcttgcttctcatagttttgatggtgtagccatagtccgtatgagtgtttggttttgtatcttctagcatggaaacaaaaccttagcttttaggatctagttgtggttctagttcttataatcaatcatacacatgacatctagtcatatttgactctaaaagactaacaagcttcttcttgcttttcaaagctttgatggtgaagccaaagtccgtatgagtctttggctttgtatcttctaacaaggaaacaatatttaggctttcaagatccggttgcggttctagttcttagacttaatcatagacatgacatatagtcatatttatctccaaaacactaactaagctttattttgcttctcaaaactttgatggtgaagccgaagtccgtatgagtcttttgctttctatcttctaacaagaaaacactacttaggcttttaagatcgggttgtggtttaagttgttatactcaatcatacacatgacatcaagtcatatatgactccaaaacactaaccaagcttctttgtgcttctcaaacctttgatggggtagtcgaagtccttatgactctttggatttttatcttctaacatggaaacatcacataggattttaagattactttgtagttctagttcttatactcaatcatacacatgacatctagtcatatttgactccaaaacactaacccagcttcttcttatttctcaaagctttgatagtggagttgaagtccgtatgagtctttggctttgtatctttgacaaggaaacactacataggcttttaagatcctgttgcggttctagttcttatactcaatcatacacatgacctcttgtcatatttgactccaaaacactacccaagcttcttcttgcttctcaaagctttgatagtgtagctgaagtccgtatgagtatttggctttgtatattctaacaaggaaacattacttaggcttttaagatccagttattgttctagttcttttacttaatcatacacatgaaacctagtcatatttgactccaaaacactaacaaaagttcttcttgcttctcaaagctttgatggtgtaggcaaagtccgtatgagtctttggctttgtatcttctaacaaggaaacactacttaggctttcaagatcgggttgcggttctagttctcatactcattcatacacatgacatctactcatatttaactctaaaacactaaccaagcttcttcttgcttcccaaagcttcgatgatgtagccgaagtccgtatgagtctttggctttataccttctagcatggaaacacaactttagcttttgggatccagttgttgttctagttcttatacgcaatcaaatacatgatatctagtcatatttgactccaaaactctaaccaatattcttcttgcttctcaaatctttgatggtgtatccgaaatccgtatgagtctttggctttgtatcttctaacaaggaaacactacttagcttttaagatctggttgcggttctagttccgatactcaatcatacacatgatatcaagtcatattcaactccaaaacactaaccaagcttcttcttgcttctcaaagctttgatggtgtagccaaagtccgtatgagtctttggctttgtatcttctaacaaggtaacactacttaggcttttaagatcaggttgcagtttaagttcttatactcaatcatacacatgacatcatgacatcaagtcatattcgactccaaaacactaaccaagcctcttcttgcttctcaaagctttgatggtgaagccaaagttcgtataaatatttggctttgtatcttcgaacaaggaaacactctttaggctattaagatcagttgcggttctagttcttatactcaatcatacacatgacatctagtcatatttgactccaaatcactaaccaagcttcttcttgcttctcaaagctttgatggtgtagccgaaatccgtatgagtctttggctttgtatcttctaacaagaaaacactacttaggctttcaagatccggttgtggttctagttcttatactcaatcatacacatgacatctagtcatatttgactccaaatcactaaccaagcttcttcttgcttctcgaggctttgatggtgaagctgaagtccgtatgagtctttgcctttgtatctttgatgtaggtcaaattgccttaagcccactctttcaaataagagaacgattgtagcactgaagggtcgaattccacaaagctctcggatcacacaatagaccaaggttttgaatctacatatacatttttggtagggtttttggccaaaaatctttcacctatttactatttgcaatatgagtccttacaaatttaatctcaatcaaatactttataactaaaaacttacaattagtttaattgcattaattagttgaattaactctttcctaaatttttattctcaattaaatcatttttattgaactatattcgattaaggctaatttcctaaaatatatatatcgacattaaatttaaatatctaatttttttgtcactatatttgtttatatatatatataattttgcttttagtttatatataaaacacatatagttaataaaatattagattttttttgcatctgatgaaattcaaattttttcaaacaaacatataatactccatcgatgaaaaaaaaagttttaaagcgactaatagtgagttatgaataaaaagcgactaaatccggtaatcgtaaatcgatgctaaaataaatagtcgtaaaaatagtcgccaaatagcgaatattgtacgactaatattcatagtcgtaagagtagtcataaaatagtcgtcaaatttagtgactaattgactaatctgcgattaaatttcacgaacataaattgtttgtagtgttatagtagtagagtagtcattaaaaattcgttaaaatttagtgactaatttacaactatattgcgactatggtcgtatttatgtacaagaataccatattacaaaataaaattacaaacattataaaaaataagaatacatcatcctcctaaaaacataactaaaacaaagtagataacaatctttaagaaagaacttggttaaattaattcttttgatctcaatttttcctccttgtcttacatctttcatgttttcttcttctccaaaaactgcctcatggttatttctaccagaagaaaatgctgatatgctatcataggtctggtcaagatcatctccttgcaaacagaacacaccatgagaaggcaaggacataacatcttaagacgaacctatcaacatgattctggccaagcattaaatcatgatttgccattgcagaaacaatagcacactgcttaaaaaacaaacaccgttaaaaagacaagtagttctcacactatagcaataaaagaacagtacatgtaacaagagaacatatcaacaagttctatttatccaactatagaacacaaacccacataagaccaaagcatgagagactatatcaatgtgagcttaaattaaaaaaaaaagtaaagaacttggcgagataagccaaacagttcttaaggcacaatcatcattttcgcaacttaatatcttcggacctcacagttaagaacttgaatagctacactatcataagaaacatatgtaaatttcttggtcagacaatataggcaacttggtttttaaaagatcagttcaattgatctcagctgttaaatagtttatcactctatagctaatacattaagaatgtttagagaaagataaacacagatttgactttgtagtgatcactaacctgaattggtcccttttttttatgttttctctatgaaacaaggtttgacaaaaattaacaccccattacttttttagaaaaacaaacttcgacaatatccaatcacaatgatagctttgaaaccagaaattatagacatatcaagctaaaatgatcagctcttctaattatattcaaagagaagtggatcaacatgagaaaaagccattatcaaagttcagaaatcaaaactcgtaaaagacaagacaccattgattatcagatctttaaatttaaaagcaaaaaccatgacccgttactttgtccaaagtctaagtacattcaaactatgagagaaagtaaactcgtaccttaaacccaactgaaactgttgggacttttttaaaacatctcttaggctgcgctggaagaggtccatccctagtctacaagagaaatcgagacaaagtaagcaaatatcaaaacttaccaatccaagcagtagcaacagatgctaaagaagttccaactgcatacacgaccatgtgcctctcgaacaagtcctaagtgattaaatatattagcgagatatgcgggcagtttggaacaagaagttgttaagattgttccacaagtttttgatagttgtagatttgattttttcggatcctcttagagattcttttgtaatctatttaaagcattgtaaacacttctcttgaatatatcagaaaactgaacatattttcccagtcacaatctctgaattcgcatagtaacagagcctttctcttaaaatttttgattggaaaatagagaagtgattctctacgacgatggcagcgatgaacccatcaacgaacccgacgaccactgaagtccgacgaaccatatccccctacgacaaccccggtgctgtgatttcccacccgttgctgcaagcaacaaactacgatgagtgggtctgtagcatgaaaactgcattgtgctctcgaaagaaatttggatttctcgacggctcaattgcacgacctgcagaaaactctcccgatttggaggattggtggaccattcaagcgttacttgtctcttggataaagatgtctattgatccaagtctccgatctaacgtctcacaccgtgatgttgcgaaggatctgtgggaccatctaaagaaacgattctctgtcactaatggactgagaattcaacagatcaaagccgagctagcatgctgcaaacaaaggggtctagccattgagacctactttggaaagctaactcgcatttgggacagtatggcgaactatcgtcctttgagagtttgcaagtgtcgtaagtgtgagtgtgatcttggcacacttcaagagaaggacattgaagaagacaaggtacatcaattcctttttgggctggacgatacacatttccgaacagtgaggtcaagcttggttttgagagttccgatccaatctatggaggaagaatataatatggtacgacaagaggaagatatggtaagaaatggaatcaaaggcgttgaatagagctcagaagtaaacgcatttgctgtccacaccactacaccatttcaaagagatgagagagataagtcagtgttttgcaaactctgcaacagagcgggtcattctagcgacagctgctatggcgtgataggctatccagagtggtggggagatagaccgagatctcgctctacgtctagctgtggtcgtggacgtggaggctcaaacagaggggctggaaagagtcgtggcagcacctcgtacgtcaacgccgtcggagttaatgaaccaacaggttatgcagccgctaactacgtcatcaccgacaatgacagagatggagtgaccggtttctccgattcacagtggaaggtgattaagaatctgctcaatgctaacactagcaaagtctatgaatccgaaaaactgacgggtacgtactcttttccctcttggataatggatacaggggctacacatcacttgacgggtcagttagaaatcttaacggatgttaaagatattcaaccagttggaattgtgttagctgatgggagacaacgagtgtcagttaaagaaggatcagtgaggcttgggccgaattggacactaaaatcagtttattatgttgatgggtttcaatcaaatttgatttctctttgtcaattgatggatgaaaatcgttgcgtagtgcagttagctgatcatttccttgttgttcaggaccgcactacgaggacggtgattggagttagtaagcaaaagggagggaccttccttttttggagtttggagtctgtaacatctgttgaagttagagatgagaagtcattcgagttgtggcatcaacggatgggacatccttcagctaaagtagttggtcttcttcctttaatctcaaatgttatttcttctgaaattttgaataaagcatgcgatatatgtctccgcgctaagcaaacccggttgtcttttccaataagtgagaataaaacgaaaaggatttttgatcttattcactgtgatttatggggtccatatcgaactccaacacactctggtgctcgttatttcttaactatcgttgatgattactctcgaggagtgtggttatatttgcttaacgaaaaatctgaggcaccaaatgttttgaagaacttcatagccatgactgaacgacaattcgaaacccaagtttaagtcataagaagtgataacggctctgaatttgttagtttgaatgagttcttcaagaaacaagagattgttcatgagacatcatgcgtcggcactcctcagcagaatggacgggttgaaagaaagcacagacatattctaaacgtggccagagctctacagtttcaagctaacttgcccattgagttttgggggaatgtgttctcagagcggcatatttaatcaatcgaacaccgagtatggtctggaaaggaatgactccttatgaacggatatacaatgctaaaccggtgtatgatcacattcgaattcttgggaacacgtgctatgctcacgaccaatcacatggaggcgataagttcgcatcgcgaagccgtcgatgtgtattcatgggatatccgtacgggaaaaaggggtggcagttatatgatctagagaagtgtcaattctttgtctcaagagatgtggtgttctttgaacatgaatttccatttaaatcggatgttgcagaagaatttgtggaagaagctgaaaattttaacatagcttctttgtacgtcgaggaagaagaaacagagagaagattgggccagttgggccaacttaatgctgaaagcccacttgttacaactaattcagatgggctgcccataagcccaattcgaaataatgaagaagctattattagtgaaaatcaaaacgacgttgcagttgaaacttcacgtcacgttcctcttcgtaacttgccatcatcttcttcctcagagattccacgatcgacgacgtcacgacctccaccattaacatcaccgcaagtacaaacaaagaaatcgtttcctactgaacaattgggtcgaggaaagaggcagagaacacattcagtaaaattgaaggaattcgtgattgagactggaaatccaaaaacaaagaagaacaagtccacatctgagtatctgattgccaattacgttgactgtgagcgtttctctgagtcacataaagcatacatggttgcaattactcagggcgtagaggcaaaatcgtttaaaaaggcaatggaagacgatagattgaaaggggcaatgggttcataaattgattctcaggaaagaaatcattcgttgaccatagaggatttgcctaaagggaaaaaggcaataggatgtaaatgggtttacaagatcaaatacaagtctgatggcaccttggagagacataaagccaaactggttgctcttggaaacaaacaagttgaaggagtagactatggataaacttttgcgccggtagctaaaatgggaaccgtgagattgttcttagatacggcagttaagaacaagtgggatgttcaccagaaggacgtctacaatgtgtttcttcacggcgaccttgaagaagaaatttatatgaagctaccatcagggtttaaagcaaccgatccgaacaaggtatgcagacttcgaaagtctatttatggattgaagcagagtccgaggtcctggtttgccaaattgtctacggcgttaaaaaatttgaatttgagcaaaatctctctgattattcattgttcaccaaggatgcaaatggagagtcacttcacgttttagtgtatgtcgacgatctcacttaaggtcatgaatgattttaaagattacttgttgtcgtgctttcacatgaaggacttaggccaattaaaatacttcctgggaattgaagtagcaagaaactctaccggtatgtatctttgttaaagaaagtacgcattggacattatctcagatgttggactacttggtgcgaaacctgtagcgtttcctttggaaacaaacaatgacttgtcattgtcgaagtccgcgtttttaaacaaccctgaaccttatagaagattggtgggtagattgatatacttggctgtgactcgacccgatttagcgttctcttttcactttcttgctctgtttatgcaaaagccgagagaagatcattggggagcagccttgcgggtggttcgatatttgaaaaacaatcctggtcaggggatattgttacgagcagacacaccttttcaattgtccggatggtgtgatagtgactacgcaagctgcaggctatcaagaaaatccgtaactggatacttcatatagctgggagggtcacctatctcatggaagacgaaaaagcaaaagacagtgagtagatcctcggaagaagcagaataccgagcattggcatatttgactcaagaattgatttggttaaaaacaattctttcagcgctcggagtcaaacacaatcaaccgatgaatgttcgctgcgatagcaaagccgccattcatatcgcaacaaacccagtgtttcatgagcgcacaaaacatgtggaggtcgattgccactttgtccgagaagaggtgataactaaaaacatttgtctcctacatgtcaagagtgagtctcagcttgctgatatttttactaaaccattgggaagacaagagttttatcgtttttgtttcaagttgggcattacagacctccatgctccaacttgagggagggtattagcgagatatgcaggcagtttggaacaagaagttgttaaggttgttccacaagttttttatagttgtagatttgattttatcggatcctcttaaagattcttttgtaatctatttaaagcattgtaaacacttctcttgaatatatcagaaaactgaacatattttcccagtcacgatctctgaattcacaaaataaaactccatttaagcaactatacccaaaatttataacataactcctgattcgcaaaacattcccaatcccaattcttcaaaatacgatataaattggaaaatttgaagtaaaagacgcattcaatacatactcgtctccataccaaccaacacatgcgattcaaaactcccatttaaacccaatcactgagagaaaagttttaaaatttagagattacaaaagggtggccacttaagagaaaaaagttaagatttagagagcgtacccaatcaaacatccctcctctgatgttggtgatggccaaatcctttacattcccttttcaaaacggaagagggcgctaacaagaggattgacgaacaagcttgagatcgagaatctccttgacttgaaccaataagattgcaactccgcaggacgaatcgaacatcaacaacagagaaaaccgatctctgtccttaagaggctagatctgggaacacgaatcaagtgagataaactcagatcgacccaaaggggatcaataaattggagcgccatcatccttaaacatgagctaaggagatgtcttgagctgctgctaatcgagatctcaaatcaggaactctatatccctgctaatcaccgctaaaacaacagatgatggattaaataactccaaagacacaaacgaagaagctgctaggttcaaatccccaacaaagaacataacattgtttagaagtgaaagattgagaagagaagaagcgatagaaatagagagagatttgatagtgtatttcattgataagcaaccctaaatttgagaatccgcttaagtctctgagttgcaatagtaaacgacaacgtattcaatgtaaaagagaaaggacaaaccctctttctcaattagaggtttactaatacttcaaacgaattttcataagttcgttttcagtacaagaagaatctttttcattgcacaaaaaaaagaagaatcttcttcttgcttcatgtatatattctaaagtagccacaaagatttagaacattttattgtctattattgtttcgcccaaattttagttctgacaatttaatagggagatgaaaaaaaattagatgccaattaaaatttttatgatttaatttttaagttgagcacaaagttaaaactttagaatttataatatagggttttggatttaaaatcagaaatttggaattagaattctaattttaaatataataattgaattttttttagggatttcaatttataagtataaaacgaattaaaaaaacaatggtaaagtaaatatgtaaataaatataaatgtttcttttatgtatatataatgattatgttttggtttatgaattaatttctgtgattcagtgcttaatcaaacccgagccatgtttgtagtaggtgacggtcgttgccgtcttcttcgttccaaaatgttggacacactctttcgccggttgagtcgccattgttaggattttatgatttccgtgctttttctgcagccaaggagattatatgagtagagaaaaaaaacataatgcgttaagcttttataggtcaacgtgatgatggactgactttgaaggcccataaattagggtaactatgacctgttacaatgtttatgggtacataacttagattaaccgactacatcttctaataaaccaacgggtttcgtcaatttcgaagattcgcaaaaaacggatgtatgtggtcaaccactagatttagatttcaaagatgtgttttttttgtaccattttcgctaggaacttgtaagtatgcgagctaaacgacaacttatggttaaaatgatcggttatatctttcatgttttttgatcaaatgagtttctaattttgttaccaaaaattttggtttttgattgatattcggtttatatgcggttaaatcggattgattgctgacaaccaaaaataaatcagatcggttagatttaatataattaacaaacaaacaaaaaaacaaaataggccatttgtgaaacaaaacccaaataaaaattgggcattttttaatacaactcaaacaaagttgggcctttttgcttagagaaacaaaatcaaggcctcttaatttttatttatttatttatttcagatctacatatatgtgtgtaccttcttctttgcgagacatgttaataaagtgaggcttacagttccagggtaaaaagttttagaaatgttccgggcagcttcagcgattcgatttacatttgttgtggtatttaaaattgattttggtttggtttacattggtttagagaatgaaaacagaaaaacaaaaaacttgtgcgatgtgtttttgagagagaagtgcgtcgattgaaaaaggcatgatttcgaaaggggtacacccatagaattgctctaactcgctcaacgcgcacttggtgagagggggtgtgaaatagagccttctgattgggtgaaaaaatctaagaaattgaaatagtagacatgttgctagctcctcttctatgttatttaaaaagtcaattttaaagtttgcattcaaatggttctcataatataaatacatatatatatttatatatatgtatatgttttaaagagtttatctacactattaaaataagaaacatttaaagagttaatgatatttttcgttgcaaaattgataatataattttattaaaaacattattatttttattatgaatttagtttagttgctaataattttatatttacataatatataaaggaaaaaacaaataagatcttgtatctctaaacatatttcgatttgaaaaaaaaaaaatattggatagaatgtatgtcgcatatttgttttggctatgtacttaatctgttatagtttgtaaatgagaaaatatcggaatatatttataacataattattattacttagtttttattattaaaatattttgtatttttcaattaatggcatttgatttatgttgattgttttttgttttatctataataaattgaaaaatacaaaatagttcgatttatattcgaaataaatatattgatgctgaatatttagttatttaatatttgatgttttgtttagtagacaaatcatagtaaaaatagtgacgaagcaaatctcggaatatattggatcatttaatcaggttatttgtttttgcaaaaaattaataaaggatccaaatcaaaaatatttatttagttgtattagttgttaatttatcaggttatttatttatttgtcaaagatatcctcacagttgtagttcacaaaatgtttttcagttaatagtatagattttgtgataaagaatcattagagagataagcatggccctatcttcaatgatttttgttcatacatgtcttttcaatatgataaatatcttaagaatctcccttttaattatctaactaggtcacccgtgggcatctgttacatctcaattctgtgtatttcacaaagaatctactatattttctttatctgtaaacatgttgtatatttagtcttgtcaaaccatattttgtttagtaaatatagttttcttggtttgcagtataaaaaatatatgtctacagttggtatgtacgttttggaacgtaattgtatatttagtatatgtaggtgtacacatagtatttgtacagtttcgtgtatgtcattaacatgtaagctaattataaaatttgataatttaatacttggaaaatgtctttcttcaaacttcaaactcataattaaaaaaaaaaaagaatattaataaacttctccactagtattaaaaaaagcttgcattaagaaaatgggaaaacgaaaagctttttaataattattccaacctgcaaatttaaaaacgactaaattagcatgttatataattttgcaaaatgatatttattttataataatcaaactaaataaatcctgtagaaataatctactaaaggttttgaaatatttctttgaaaacaacatttgctgtttctttcttctgtattccttaccttctgtaataagaaccttcagccctgcctttgatttcactctagacatagcgacatacaactgtccatgtgagaaaacaggcttcgacaaatatatgccaacattggctaatgactggccttggctcttattgatcgtcactgcaaatgtaacagataaaggaaactgccttcgtcgcattttaatgggcaatctacgatccaaaggaattaggggcatcctgggaataaggaccggtttaccaactctagtaccttctaatatacgtccttgcaccggtttatctccaagtctgatgacatagctcaaattgccttaagcttactccctcaaataagagatcgtcgttagcacttaagggtcgaattccactgatctctcgatgttcaaacaatagacttatggtgttattaaataagctagacaaagtaattgaatgtaaaagacaaataagcaagtaaacgaagtgtagatttaagtgattaaagcgtcaggtctaaggaattatctcgggagatagataaagtgtagatctagctaatataaggattgttatcgcactgttctcgaactcaaactatgattctaaagtaaccggtggtgttccgcaaaactctctatacttagagctaagataactgaagaagccgagaaatcctatactcaaaacatacgaaaaagattagaaagactctaaaaaccattctgaaactatgttagaaatcaataaaaaaaccaggacatatcaacttccccagagtaagcctttgcttgccctcaagtgataacactgtattttactcatttttggtgtgtgtttatcatcatttagctttgcatttgctcattgtatcatatcattttgcaccattttagcttattttgcacacttaggcatttaggatcatcttgcatacatattgcatgttttggtgtgttttaaggtgcagaaggagcttaaaagcattctactcaatccattcactcgatccaggcagccatagaggaggcagcaattcactcgaccctcttactcgatcaaggcaacctcagaagaagcagcagatcaatctactcgccccttctactcgatcctctattcgactcatttactcgaccaagggttaccaactctacaagacttgttgatctatcaaagcgtcttcttatcatcctcattccctactcaaccagacatttgagcatacggataggagaggaagaagcatctactcgaccaattgatcactcggagcatagactcaaaggcgcaaactttgcagcaccctctttactcgatccccaagatcgagcactcgcccaaaccgcctcaagtctcttgtcttctagtgaatatagggttttcaacatttcactataaatagatcactttgggatttgtccaaaggatctagcttttatcctttagtttttctttgtgttcttgaatcttcaaaacttaattactcttaatctattttgtttttgcacttagttcttttagtaatgttgtgtagcttgtttagatcttccttttttatatgattttagtaatttctgggtttatgttcttagttatgttgcttgagtagtgattagggttcttgaggatggactagattagggcaatctctaggttagtcaggtggttaagattaggttagatcctttctggattcgcttggcccctatgcggtattcgctggctagtgtggagattcgatcatagacgtccaacgtccaaaagacgttcaaatggatatctgatttatgaattccagagatttgtaaacttgaccaagacattggcttgtcttcttattggctttggtagattgttgcttaaactctgctctattatgtttcataaacgatagttgagattaggaagtggtagagttatgggggtctctgtcacgacagtggattgacccggtttttgaatctattcgtctagggtatctacctttcacctgttagccacctgatgaatcctagagttgcccttatcaattaatccatccttaggacttctattcttcttagatttatttgtattcaccacctgattgcacttttatttacctgttatttgtatcccatgttgtttgcattttagttcttaatattgtcacctgttggttctactcgacccaatgattgagtagggctcttaagttctcatttttacctgtttgaaccctgacctaggattgttactagaaacccaccatcattataatctggcttgacttaattgcttctgtatacatcttgattgttaacaataatagtggactggattgacaccccctatagctgcatcgacatgtcagtgtttaagggaaattgaactgaacctcacattcaacacataagtaggcgtaaaaacctacttatcaacaagcaaaacaaaagattgaatctatgaaagaggtttgaaaaacatacaaaactcccaatctctctagcttatttccttgattatacaaaccaaacacatgcactaaacagttctaatcagatcctgaccaccatgtaattctttgctagcccacacaacatcctagattccataccaaagcactcaactatatccactaggctatcatcgctgggtctcatcaatcaagttaatgtttaagaaccttctagactcattcctgtattataccatgacaaatcgaccattcattttcttcttctttttttggtattctttctctcccctacacttattcttttaagagaggaaacaaagggtaactcgcatactggattgacaccctcggcatttttccaacctttgtaattgatcattccaaataatgtataataatggggtcataaaaaacattcctaaccttatacactattcgaaaattctatcaatctctcatatttttattatatatttttttataaggggagaggaatactttcttttatcacattagccgacttatcaggtatgaacaagcagtcaagtcctatgaacactaaccgttttgatgaggtaaaaggaagagcagtgagattagctccagcctctatggattatgttgggaatggatgtccttaagtttgttgattggctttctggattttccattagtcgaattgatttgaatctacagtacttaaacaatccaggcaataaactcgagagatagatcataatttcagacaaaagttttaactcaataaacgactatctaagttagaatgacacaactgactcataagaagagaaaagatgaagttagtaactgactcccctagacatagataacactgtccccaaagttattaagctagaggaatcgaaagaaaaataatcaaaagttaaaagttagagaaacgtgagttgccacctgagagtggtgtcgatcgattctaggttggtgtcgatcgacactcaggtcatttttgcatcgctttgcgaattcagctaatcgttgtagagctttggttagtgttttcacatggatcctccagttagactgttaaatcactaaaacacacatcaatagttccaatacaaataacaaatagtctgaaaataaagcaaaaacaaaatcagaaaacaaagcaagatagggaggatggctagtcctcatgctccgagccggaggtgggtgcgggagagcgacgacagtgacgagtggaagcaacacaaccgcgacgagagagtgtagctatggcgttccagacgctcttgaagctgtcgacgatgtactgatgaaagacctattgctctatcgggataggaggaggagaaggcagctcatatggtagacctaaagaagaagatccaactctcggacccctagtagggtcaatgaactcatcctcagtctgagtcggtgcggatcttgaagctgaacctctctgtctcctggagcatggcgcggaatgcagacgggaaggatcatgatgaaaaccaatctcctcatgctctcctgtaatctctgtaagtgcagggcaaggtaactgaatcatatggtgttgtgtctcgtctctgaaacaccaaaggaagttgcctttcagccagtgaaagttcttaagattactctcatccattgtgaatctcgtggtgttgacctcttctccttcaaagctgatgcaaaaatgctcaaatataggagtgagaagactgccaactctcttagatttcttccctttacgtgtaaagggcttggtcttgagtgagaccaagtgatgagcaaacacagcgccaaagttgacatcgtggtcaacctcctcaactccaaagctgtcatgaaagaaatcatgaacagcatcgtttctttgttattgtttttaagcatgttgtgtgagtagtgattaggatttctgaggatgggatagagtagttgtggaacccctagtcgaatatgttggttaagtgtagatatcttgaatcccttctcgattagttgtgtttactgcttattcgtttctgatcaactggaatccgatcccaaacgttccagcgcccagaaggcgtttaatgaaacgttggatctactaattccagtgataatcgtctctatcccaagggattggccgtttagagcggttattagctttaacagtcggttcttattgcctgtttagttagagattgctaatgggaattaggtcagtgtctagctatgcttgaggatttctatcacgagagtaaattaatctgttgttgaacctcttgtctagggatagcttaattgagatttgttaaccaactgagttgattagggagaccacactattcgattaccccatccttaggagtttctcatccatttgatttctctgtttacttacctgcttcattcacttgctattgaattttagtatttttctggtttcaaccattctactcgatcacactagtctactaacagtgagactgcgtgatagagtaaaatggtcaatttctgaattttcactctctgtcatcctgttgtacacaatcacagggtcccttctggcagttgaccctgcgatcgagtatatcggtcatttctgtgactttttactgttttctgcaacaacactaggactgttagaaaaccaaccaaattctgcttggcttgacttagcaacttctgatcatatctcatctgtttgcatcacacccatttggattgacacctaaaatactacaacgacaggatagtgttttaggattaattgatctgaaaaaacctactatcagttgttgtggaggatacaccttatcctcaggattggcaacgttggtgctgcggtaggagaggttggagttgttggttttgaagttgttgtatcctttgtagccaccttgattgttgatgtagctgacttcgtctaactggttcccctccccatcttggaattgagactgctcgtcatcaacaaggaagtgcacatgcttcttctaactaaggagaattctgtccagattgtcattcagtgctttgatctccttcctgtgtttgtcatcggagtcagctgtgcctctaacggtcctgtcgcagtcctcattgtaattaccatctgattgagccaggttctcaaccaattcctagccttcttcaacatccttgttctggaaattcccattgctggcggtatccagaagcatcctaatgcgtggtagaactcctctataaagagtgctgagcagagaggctttcgcgaagccatgatgagggcatcgattggtgtaacccttgaaaccttcccatgcttcacagaagctttcgccagtcttctgtgaaaaaccagaaatctgatttctgagtcttgcagttctggcgttggagaagaactttgatagaaaagccttcttgcaatcatcccaagtggtgattgattcatggggtagatgcttctcccagatgtgtgttttgtcgcccaaggagaatggaaacaaacagagcttcaatccgtcttcacagacaccattgatttttgttaggttgcagagcctatcgaattcatcaaggtggtcgagtggatcctccattggcagaccatggaatttggtccccttaatcatcgagatgagaccactcttaatctcgaagttgttgttctggatagcaggaggtgcaattcctttcctttgacgatggttccgtggtgcatctctaataccaatgttggcagggccattttgttgattctgttcgtcggccatttcgaatggttgttgaggtaaaaggttgactgtgtttctcctttctttgatttcgctagctatgcggtcgatgttgtcgttgaaaaggaggttctaattgcctgttgatcgagtttgcatacagcaaaggtgtacctggataaagaaaacaacaagaaaaacacacagttagtaatcgaaaagaaaatggaaaaagaactagatctaagcaagtctgaaatctcaaatgtaacaaacaaacacccaattggcaacggcaccaaattgataataggttttttagtcaattatcctaaaacactaatcatgtcgttgtagtattttaggttgtcaatccaaatgggtgtgatgctaacaatcaagatgtgatcagaagtcactaaatcaagccaagcaataacaggttttggtgtgttctagcagtcctaagtgaacatgcagaaaacagaaaatcaagtagaaacagtaaaacactcgaccaacacagctcgttgcagagcactgggtaaggtcgagtgacaggtcgagtaacaggcagtaaacgaaacaaagacactcgactacacagtctgttgccagacaactgggtggtcgagtatcaggtcgagtaacaggaaagaattgtagaaactaagcaacatatgacaagatgcagtaaacaacagtagagtaaacaataaaatcaatcagataaagaattcccaagatggggtaattgagtagtttcgtttcctcagtttacaagtgattgacatgctcagtaaattatccctagacaataagtttattaagtaaatctaagtgccaccgcaaaagagacccttaagttaccctagtcccagactcaatcaccattgacgagagctaacctgacaagtattacgaatcaacaagttaaagccaaaacgctccctgcaaccaataccttggtacagggccacgaatctctggaattagtggttcagacatttcatcgaacaccttttgggcgcagaaatgtctgggctcaaattcctgttgattagaaagcaataggcattaagaacaactaatccagaagggatctatcaatcaaactcaaccacttagcatactgagaattctaaactactctaacccatcctcagaaacctattcactactcagacaacattatagagaacataaacgttgaattgaatgaaaacatgataaacaacagtgtaatagcaaaatgataacaggattaacaacaataaacgaaatcaagaacaaatattgaatactaaatagattagagaaatccagattacaaaacatcaagaacacagtgtctccggaataaaacttaggttaacgaaaatgtaaagtacatgctccttatagcgaaatatttctgaaaccccaatactcaaaacgacgcagtattgggagggattaagaacggtactcgacccaggtggtcgagtgagtagtggagtgataagctggagtcttcttttcttccttgtgctcgagtgtctagttgagtgtggaatggagaagactctgaagctggccatcgagtatgtagtcgagtgatggtgatggtgatactcgacttcctggtagagtggtgtgatcgagtgatggtcaggtgtggaggtgatgatactcgaccaggtggtcgagtgaagtgatcgagtgactctcatggtggtactcggccaggaggtcgagtggtgaggtgaattgatgaagtcttctactcgaccaaggggtcgagtggtctgttgaggtcgtgaagcttctactcgaccagggggtcgagtggtttgacatgatcatgtccgcttcttccaattagctcgccaacagctccaaatcacctgaaaaacacaaatatgcaacatgcatgcaaaactatcctaaacatgcaaagtgatgagaaatgatatataacagtgatgatatgatgctaaagtgatgacaaatggatgctcaaaacatgcaaaatacacacttatcaggtcggcccaggaggcaggcgtatcctttggtgggtatcctttggtggcttatcttatagcggaatccagcatccatgttgaaccgtctacaaaatccactaggaaatcatactcctccttttcttctattaaagctatctccaggggatcctccagaatgatttcccctacacattctaccagacgcctcttctatctcatcgagatagataatctgatcatgagatgaagcttgcttgaaagtctcattcatatcaaacttcattatgaaatcgccaaggtgaaggtcgatttttcagttcgggacatcgataatggcgctggcggtagacaggaatggtcggccaaggatcagtggtccttatgctctttgtgaacttccaggataacaaaattaatagggatttgagatcccccaatcattatcggaatatcagccaaaatcccaacaggatggcggatagaacgatctgccagtattagggagattttagtttgtttgaaggtgtagtatccaagacggttagtaactgtgagcggcatcatgttgatgcttgatcctcaatcacataggcatcactcaaaaagttcatcatcaatagcacaagacaacacaaaactctcaggatcacctttctttcatgtcgtctggtcttgcaggatggcgctacactcttgggtcatcatcattacctcgtcttctaggctgatgttgttggttaagatactcttcatttatttcctaagagtggggatcatggcacaagcctcaacaaaaggtagccttaccgttaactacccgataagctctcgttgcttagctttctccttcttggtgctcttcccagcattcgggtatggtaccttaggtcagtagatacggtccgagggagagataagattggtcgcagtagtgctttcgcggcttggcggtacttcttcctcggcttcttggctaggaatgtgtatgggaggttctgggtctcttccactattcggatcgtgacaggtctcacaggcttgcttggattggtttttcttcctcctcctgatctttcggatactctggtgtctgtaagccatcccactcctcagtgttatggcttgcaatggtgcaccgatcagtgggtgcccttcttctgttctgaaggatttctcgtatgactcaatcaggcaggtagtctcattttcctattaagacaagtattcgaacttcctctaaagggaattaattttgctttttaagtcctcatgcatgatctggattgaggcgtcgacacttttttggcattcttgaaaactagcttcgagtctcttgatcaaaacctctagggtcgagttctcatttgccggtgttggaataggcaattctcactgaggttcctgaaactcgctaagaatagacctttgttgaatattaccttggtttgagattttccctcggttcctaaagctccggttttgggagactctcgggtggctcctcattggccccatgtaatttgcggtttcttctcgtccgtagaaatcatcaagttcctcggaggaagagctgaaaatcccttgagagttccgtacggcgatactcacaagactagatttcatccttggaggatttttccaagttccacatattttaaaaatatattcatttcgttaaaatctaagtgttgagttcgctcttcacaagactagatttcatccctcaaagattttttcaagtttcatctcttggaaaaatatattcattttggtgaaatctaagtgttgagtttgctattcacaagacaagatttcatccctcaaaaagttttccaagttccacctcttggaaaaatatattcatttcagtcaaatctaagtgttgagcttgctattcacaagacaagatttcatccttcaaggatttttccgagttccacctctttgaaaaatatattcatttcggtgaactctattttttgagctcgctcttcacaagactagatttcatccctcaaggatttttccaagttccacctcttggaaaaatatattcatttcggtgaaatctaagtgttgagttcgctcttcacaagactagatttcatccctcgaagatttttccaagttccagctcttggaaaaatatattcatttcgatgaaatttaagtgttgagttcgctcttcacaagactagatttcatgcctcaaggatttttccaagttccacctctcggaaaaatatatattatttcggtgaaatctatgtgttgaactcgctcatcacaagactagatttcaccccttaaggatttttccaagttccacctcttggaaaaatataatcatttcggtgaaatccaagtgttgagttcgctcttcacaagattagatttcatccctcaagtagttttccaagttccttctcttagaaaaatgtattcattttggtgaaatctaagtgttcagttcgctcttcacaagactagatttcatccctcaaggatttttccaagttccacctcttggaaaaatatatttactgtggtgaaatctaagtgttgagctcgctcttcacatgactagatttcatccttcaaggatttttccaagttatccttcaaggatttttcgaagttacactttttggaaaaatatattcatttctgtgaaatctaagtgttgagttcgcttttcacaagagtagatttcatccctcaaggattttttcaagttccacttcttggaaaaatattttcattacgatgaaatctaagtgttgagttcgctcttcacaagactagatttcatccctcaaagattttttcaagttccacctcttggaaaatatattcatttcggtgaaatctaagtgttgagctcgctctccacaatactagatttcatccctcaaaatgttttccaacttccaccttttggaaaattatatttaattcggtgaaatctaagtgttgagctcgctcttcacaagtgtacgattcaagatgaatcgtcttcaagtttagctcactaaacactctagactctcgtgtgtttgtttaagaatgaagaaacgacaccaagctttaactagttcaactaactgatgtggttagtttacgtctcgccggagattctccggaatccactagatcgctgataacgttctctctctacaaaggatctctctctctctcttatcttgttacaacaactcaatgaacgatgaaacagaatgagctaaagatataacgctaatactccttcgttgacttctcacctgttaaccacacgtgtgataattaaccccaagacttgaaccttcagtttctttgagagactctctgatacttagagaataaaggcatttgggtcacaactctcagttctccaccttgaccccaatgcagcgacctagcagccgaacttggactccaactccgtatacctgactaaactcactcagccttctaagcctttttgattaaacccactaagcttcagatcacgtgagtaaacccactcagcttgttgaggagccttatggctccattatgcttctgtaatcctgagtcgctctaacgcttcttgaagcttacccactggtactgtcttagtaaagatatctgcaggattacactctgttgcaatcttaaccagatttataaccccatcacttaccaaatctcttatgaaatgatacttggtatctatgtgtttagtcctttcatggaacactgtgttccttgccaaagcaatcgcactcttagagtcacagtgaatatttactgaatcctgcttaaacccaagttcattcatcagtcctagtaaccaaactgtttccttagctgcctctgttagagccatgtattcagcctcagtagacgataatgccacatccttttgcagacttgatttccagctgataacgttgcctcctaagtaaaaactatacctgatgtagatcttctcctgtcatgcagtatagtctgaatcacaaaacccttcaatcacaaaatctcctttgtttttatagcaaagcttcttcttgatagacccactgatataccttagaatccacttaactgcttgccaatgttgcttgagtggtttactcatgtacctgcataccaatcccacaggatatgcgagatctggtctggtacctatcattgcatacattaagcttccaactgcactttgatatggcacacccctcatagattcagactgaatccttaattcttcatctgtggcagcacgcaacttgaagtgtattcccattggtgttcctattggtttggattggtccatcccataagttccaaggacctttaggagatatccatcttgagatacagtgagagtacctttctgtctatctcttgatatttccattccaaggatcttcttagcttctcctagatctttcatttcaaattctgagttgagaagtgtttttaactcatctatatgattcttatcctttgaagctattaaaatatcgtcgacatatagcagcatatagacatagtctccactctgtaatctcttagagtaaacgcaactatcatattgactcctttcatatccatgtgactacacaaactcgttgaatcgattattccattgccttggtgactgcttgagaccatatagcgacctttgtagcagacacaccttcattggatatttttcatctacataaccttctggctgatccatgtaaatggtctcttataagtatccatgcaagttagcagtcttgacatccatctgttggagttccatatccaaatgagcaataatactgagcagaaaacgaattgacacatgtttcaccacaggtgaaaaaatctcctgatagtcaaccccttctttctgtgagtaacctttagctactactcttgctttaaatcgaggaccttccacacccactattccaggttttctcttgaagacccacttgcagcctataggcttctgtttttcatctctgtctactagtgaccaagttttgttcttcatgagagactctatctcttcatctgcagctgtgaaccacttgtcactattagcatctcttaatgcttcctgaaaactggagggctcagacttgccaccgtcttctgttacgaagtatgcgtatccggctatctcatctaattctgcttcttcagtgtattagtcttctagtctggttggtctcatgatctgtcttcttggcctgtgtttagctatctgatagctccctgacatttgattctcaactcttgttgacatttccactgaactttgtcctgaatttatcacagtatcttgctttaaagctccaccttaagaaatatcctcttcagacctgttatttcctgcaatatcacaagtagctttatcagataacattggtaaagggttagagatcatacatgactgtttctgagccatgatatccttgtacaacacatcctctttgaacaccacatttctgctaatggtgcacttcctgtcttctaacaaccaaaccctgaagcccttaactccttctggatatccggtaaagattcttttcttagccctcaaatttagcttaccatcatttgagtgaatgtaagcgagacatctaaatcttcgcaaacctgataagtctggcacagttgaagtccacatctcttctggaatgtgaaaatcaatagcagatgatggtgttctatttattaggtacactaatgtggaagctgcctcaacccaaaactgttgtcctaatccgctctcactgagcatgcttctgactttgttcataatcgttctatttaatctctctacaattccattttgttgaggtgtataggcacaggttctgtgtctcaccattccttccttcttgcagaaagtatcaaatctattattgcagaactcaagaccattatccgtacgaagcttctttactttcctttcactttgtgtttcaaccatcttcttccattgaacaaacatgtcaaatgcttcatcctttgtcctcaagaaatagatccagaccttcctggaccaatcatcagtgaaggagatgaagtattgacaccttccaagactcaatgggacgtttggagagccccataaatttgaatgaacatagtctagtttctctttagtgacgtgttgtgctgagctgaagctaactttgtgtgtttttccaaacacacaatcctcacagaacttaatacttgatactttgtcttttccaaaacaccctttctctgctaggccatccatccctttctgtcccacatgcctaagacgattgtgccaaagttttgttagatcttcttctgcaggtttctcttcaagtgccagacactctgacttcttagctcctgcttgtaaaatgtattaagactctcttcttgtgcctttcatgtacgtgatatcccctttcataacctttaacacaccgtttttgccttcgaactcacatcctttagagtccagagttcccatggagatcagattccttgacatccctggcatatatctgacatcgtgaagcataaaggtggtaccatccgagttcacaaacctcactttgccaataccattgacctctgtgaataagttgtttgccattctaaccatccctgttccaatttcctgaaactcaatgagcacatctcttcttggagtcatgtgaaacgagcaattgtgtccattatccactcatcttgatctgcattctcagtgagattcacttcagatgcgactagtccaatcagatcttgtgcatcatctttaaccagagctgattctccttgttgagaattagccttgttcctctcaatccacttatagcactgtcttttaaaatgtccctctttaccgcagatccaacagattttcttgccctctttcccaaacatttgatcattaccctttgcatgtggtcttcctcacacatacaagccttcaccaaccggtcttgaatcacctaagctatccctcagctccagctcctttgacttagcaacacttattacatcatccagccttataccttctctaccatatttcgatgtttttttcaacatatcatacttctctggaagagcactcaggatcaagattgcttgaacttcatttgggacttgaatctgaagattattcagatctaaaatcatctttaagaactcatcaaagttttcctcaagagtcttcgattcttgcatcatgtagttgtaaacctttagttgaagatatacacgatttggtaaaatctttaccaaatacaatctctcaagcgttccccaagcttccgctgcagattttgaatgttttcttgatcttagaaccttatctgcgacattgatgaatataatgtccatcgccttctcatctcgctctattctagcctcttcctcctcgatccacttcttcttctttgcaggatctccttcttcttcttccgtgagaggtttatgtggtggttgctccaccagagcagtctttagccccaacactctgaggtgagcgaacatccgagttctccagagggagaagtcaccctatccatcgaattgagcaatctttactttcgaatccgtcattcttataaccgatcttcagattattgatgaaccagagctctgataccaatttgtatgattcaagatgaatcgtcttcaagtttagctcactaaacactctcgactctcgtgtttttgtttaagaatgaagaaacgacaccaagctttaacgagttcaactaaccgatgtggttagtctacgtctcgtcggagattctccggaatccattagatcgccgataacgttctctctctacaaaggatctctctctctctctctctctcttatcttattacaacaactctatgaacgatgaaacagaatgagctaaagatataacgctaatactcctgtgttgacttctcacgtgttaaccacacatgtgacaattaacacgaagacttgaaccttctgtttcttcgagagactctctgatacttagagaataaaggcatttgggtcacaacactcaacaagactagatttcatcattcaaggatttttccaaattctaaatcttttaaaaatatattcatttcggtgaaatctaagtgttgagtttgctcttcacaagactagatttcatacctcaagatttttttcaagttccacctcttggaaaaatatatccattttggtgaaatctaactgttgagtttgctattcagaagacaagaattcttccccaaaaagttttccaagttccacctcttggaaaaatatattcacttcatttcggtgaaatctaagcgttgagcttgctattcacaagacaagatttcatccttcaaggatttttccgagttccacctctttgaaaaatatattcatttcggtgaactctaagcgttgagctcgctcttcacaagactaaatttcatcacttaaggatttttccaagttccacctctcgaaaaatatatttatttcggtgaaatctaagtgttgagttcgctgttcacaagactatatttcatccctcaaggatttttccaagttccacctcttggaaaaatataatcatttcggtgaaatccaattattgagttcgctcttcacaagattagatttcatccctcaaagatttttccaagttccacctttttgaaaaatgtattattttggtgaaatctaagtgttgagcttgcacttcacaagactagatttcatccctcaaagatttttccaagttccacctctcgaaaaaatatattcattacggtgaaatataagtgttgagctcactcttcacaagacaagatttcatccctcaagaatttttccgagtcccacctcttggaaaaatatattcattttggtaaaatctaagtgttgagttcgctattcacaaaattatatttcatccctcaaggattttttcaagttccatctcttagaaaaatgtattcatttcggtgaaatctaagtgttgagctcgctcatcaaaagactagatttcacccctcaaggatttttccaagttccacctgttggaaaaatatatttatttcggtaaaatccaagtgttgagttccgtcttcacaagattagatttcatacctcaaggatgtttccaagttccacctcttggaaaaatgtattcattttggtgaaatctaagtgttgagctcgctcttcacaagactagatttcatccctcaaggattttttcaagttacaccttttggaaaaatatattcatttcggtgaaatctaagtattgagttggcttttcacaagactagattgcatccctcaaggattttttcaagttccatttcttggaaaaatatattaatttcggagaaatctaaatgttgagttcgcgcagtcacaagactagatttcttccgacaaggatttttccaagttccacctcttggaaaagtatattcattttggtgaaatctaagcgttgagttccttcttcaccacaccatatttcatccctcaaggattttccaagttccacctcttggaaaaatatattcattttgttgaaatctaagtgttgtgtttgctcttcacaaaactagatttcatccctcaaggatttttccaagttccacctctgggaaaaatatatccatttcagtaaaatctaagtgttgagttccctctttacaagactatatttcatccctcaaagatttttccaagttccacctcttggaaaaatatattcatttcggtgaaatctaagggttgagctcgctcttcacaagactagatttcatccctgaaagatttttccaagttccaccttttgagaaaatatattcatttcggtgaaatctaattgttgagttagctcttcacaaaactagatttcatccctcaaggtttttccaagttccacctcttggagaaatatattcatgtcggtgaaaaataagtgttgagctcgctcttaacaagactagatttcatccttcaaggattttttcaagttccacatcttttaaaagtatattcatttcagtgaaatctaagtgttgagctcggtcttcacaagactagattttttccctcaaggatttttttaagttccacctcttgaaaaaatatattcattttggtgaaatctaagtgttgagttccctcttcacaagattagatttcatacatcaaggatttttccaagttctacctcttggaaaaatatatttattttggtgaaatctaagttttgagtttgctcttcacaagaatatatttcatccctcaaagattttttcaagttccacctcttggaaaaatttattcagttcggtgaaatctaagtgttgagttcgctcttcacaagattagatttcatccctcaaggatttttcaaagttccagctctcggaaaaatatattgtttttgatcaaatctaagtgttgaactcgcttataacaagactagatttcacccctcaatgatttttcctagttccacctcttagaaaaatataatcgtttcggtgaaatccaagtattgagtgcgcacttcacaagattagatttcatccctcaaggatttttccaagttccacctttttgaaaaatgtatttattttggtgaaatctaagttttgagcttgctcttcaccagactagatttcatccctcaaggatttttccaagttccacctctcgaaaaaatatattcattacggtgaaatataagtgttgagctcgctcttcacaagacaagatttcatccctcaagaatttttccgagtcccacctcttggaaaaatatattcattttggtaaaatctaagtgttgagttcgctattcacaaaattatatttcatccctcaaggatttttccaaattctatctctcagaaaaatgtattcatttcggtgaaatctaagtgttgagctcgctcatcacaagactacatttcacccctcaaggatttttccaagttccacctcttggaaaaatctattcatttcggtgaaatccaagtgttgagttccctcttcacaagattagatttcatacctcaaggatttttccaagttccacctcttggaaaaatatattcattttggtgaaatctaagtgttcagctcgcacttcacaagactagatttcatccttcaaggatttttccaagttccacatcttttaaaaatatattcattttggtgaaatctaagtgttgagttggcttttcacaagactagatttcatcctttaaggattttttcaagttccacctcttggaaaaatatattcatttttgtgaaatctaagtgttgagtttgctattcacaagacaagatttcatccctcaaaaagtttttcaagttccacctctcggaaaaatatattcatttcggtgaaatctaagcgttgagttcgctcttcacaagactacatttcatccctcaacgatttttccaatttcacctcttaaaaaaatatattcatttcagcgaaatctaagtgttgagttcgctcttcacaagactatatttcatccctcaaagatttttccaagttccacctcttggaaaaatatattcatttcggtgaaatctaactgttaagttcgcttttcagaagactagatttcatccctcaagaatttttccaagttccacctcttggaaaatatatttatttcggtgaaatctaagtgttgaactcgcttatcacaagactagattttaccgcttcaggatttttccaagttccacctcttggaaaaatataatcatttcggtgaaatccaagtattgagtgcgcacttcacaagattagatttcatccctcaaagatttttccaagttccacctttttgaaaaatgtatttattttggtgaaatctaagtgttgagcttgctcttcacaagactagatttcatccctcaaggatttttccaacttccacctctcgaaaaaatatattcattacggtgaaatataagtgttgagctcgctcttcacaagacaagatttcatccctcaagaattttttcgagtcccacctcttggaaaaatatattcattttggtaaaatctaagtgttgagttcgctattcacaaaattatatttcatccctcaaggatttttccaaattctatctctcagaaaaatgtattcatttcggtgaaatctaagtgttgagctcgctcatcacaagactacatttcacccctcaaggatttttccaagttccacctcttggaaaaatctattcatttcggtgaaatccaagtgttgagttccctcttcacaagattagatttcatacctcaaggatttttccaagttccacctcttggaaaaatatattcattttggtgaaatctaagtgttcagctcgcacttcacaagactagatttcatccttcaaggattttccaagttccacatctttttaaaatatattcattttggtgaaatctaagtgttgagttggcttttcacaagactagatttcatcctttaaggattttttcaagttccacctcttggaaaaatatattcatttttgtgaaatctaagtgttgagtttgctattcacaagacaagatttcatccctcaaaaagtttttcaagttccacctctcggaaaaatatattcatttcggtgaaatctaagcgttgagttcgctcttcacaagactacatttcatccctcaacgatttttccaatttcacctcttaaaaaaatatattcatttcagcgaaatctaagtgttgagttcgctcttcacaagactatatttcatccctcaaagatttttccaagttccacctcttggaaaaatatattcatttcggtgaaatctaactgttaagttcgcttttcagaagactagatttcatccctcaagaatttttccaagttccacctcttggaaaatatatttatttcggtgaaatctaaatgttgaactcgcttatcacaagactagattttaccgcttcaggatttttccaagttccacctcttggaaaaatataatcatttcggtgaaatccaagtattgagtgcgcacttcacaagattagatttcatccctcaaagatttttccaagttccacctttttgaaaaatgtatttattttggtgaaatctaagtgttgagcttgctcttcacatgactagatttcatccctcaaagatttttccaagttccacctctcgaaaaaatatattcattatggtgaaatataagtgttgagctcgctcttcacaagacaagatttcatacctcaagaatttttccgagtcccacctcttggaaaaatatattcattttggtgaaatctaagtgttgagttcgctattcacaaaattatatttcatccctcaaggatttttccaagttccatctgtcagaaaaatgtattcatttaggtgaaatctaagtgttgagctcgctcatcaaaagactagatttcacccctcaaggatttttccaagttccacctcttggaaaaatatattcatttcggtgaaatccaagtgttgagttccctcttcacaagattagatttcatacctcaaggattttttcaagttccacctcttggaaaaatgtattcgttttggtgaaatctaagtgttgagctcgctcttcacaagactagatttcatccctcaaggatttttccaagttacaccttttggaaaaatatattcatttaggtgaaatctaagtgttgagttggcttttcacaagactagattgcatccctcaaggatttttccaagtttcatttcttggaaaaatatattaatttcggagaaatctaaatgttgagttcgcgcttcacaagactagatttcatccgtcaaggatttttccaagttccacttcttggaaacattttggtgaaatctaagcgttgagttccttcttcaccagaccatatttcatccctcaaggattttccaagttccatctattggaaaaatatattcattttgttgaaatctaagtgttgtgtttgctcttcacaaaactagattccatccctcaaggatttttccaagttccacctctcggaaaaatatatccatttcggtaaaatctaagtgttgagttcgctcttcacaagactatatttcatccctcaaagatttttccaagttcaacctcttggaaaaatatattcatttcggtgaaatttaagtgttgagctcgctcttcacaagactagatttcatccctcaaagatttttccaagttccaccttttggaaaaatatattcatttcggtgaaatctaattgttgagttagctcttcacaaaactagattttatccctcaaggatatttccaagttccacctcttggagaaatatattcatgtcggtgaaatctaagtgttgagctcgctcttaacaagagtagatttcatccttcaaggattttttcaatttccacatctttttaaagtatattcatttcggtgaaatctaagtgttgagttcggtcttcacaagactagatttcatccctcaaggatttttttaagttccacctcttgaaaaaatatattcattttggtgaaatctaagtgttgagtttgctattcacaagacaagatttgatccctcgaaaagttttccaagttccacctttcggaaatatatattcatttcggtgaaatctaagtgttgagttcgctcttcacaagactagatttcatccctcaagaatttttccaagtttcacctcttgaaaaaatatattcatttcagcgatatctaagtgttgagtttgctcttcacaagaatatatttcgtccctcaaagattttttcaagttccacctcttggaaatgttttttcatttcggtgaaatctaagtgttgagttcgctattcacaagattagatttcatgcctcaaggatttttccaagttccagctctcggaaaaaatatattcatttcgatcaaatctaagtgttgaactcgcttatcacaagactagatttcacccctcaatgatttatcctagttccacctcttagaaaaatataatcatttcggtgaaatccaagtattgagttcgctcttcacaagattagatttcatccctcaaagatttttccaagttccacctttttgaaaaatgtattattttggtgaaatctaagtgttgagcttgctcttcacaagactagatttcatccctcaaggatttttccaagttccacctcttgaaaaattatattcattatggtgaaatatatgtgttgagctcgctcttcacaagacaagatttctatccctcaagaatttttccgagtcccacctcttggaaaaatatattcattttggtgaaatctaagtgttgagtttgttattcacaaaattatatttcatccctcaagaatttttccaagttccatctctcagaaaaatgaattcatttcggtgaaatctaagtgttgagctcgctcatcaaaagactagatttcacccctcaaggatttttccaagttccacctcttggaaaaatatattaatttcggtgaaatccaagtgttgagttccctcttcacaagattagatttcatacctcaaggatttttccaagttccacctcttggaaaagtgtattcattttggtgaaatctaagtgttgagctcgctcttcacaagactagatttcatccctcaaggatttttccaagttacaccttttggaaaaatatatttatttcggtgaaatctaagtgttgagttggcttttcacaagactagattgcatcccttaaggatttttccaagttccattgcttggaaaaatatattaatttcggagaaatctaaatgttgagttcgcgcttcacaaaactagatttcatccctcaaggatttttccaagttccacctcttgaaaaagtatattcattttggtgaaatctaagcgttgagttccttcttcaccagaccatatttcatccctcaaggattttccaagttccacctcttagaaaaatatattcattttattaaaatctaagtgttgtgtttgctcttcacaaaactagatttcatccctcaaggatttttccaagttccacctctcggaaaaatatatctatttcggtaaaatctaagtgttgagttcgctcttcacaagactatatttcatccctcaaagattttcccaagttccagctcttggaaaaatatattcatttcggtgaaatctaagtgttgagctcgctcttcacaagactagatttcatccctcaaagatttttccaagttccacctcttggaaaaacatattcatttcggtgaaatctaattgttgagttacctcttcacaaaaatagatttcatccctcaaggatttttccaagttccacctcttgaaaaatatattcattttggtgaaatctaattgttgagtttgctattcacaagataagatttcatccctcaaaaggttttccaagttccacctcttggaaaaatagattcatttcggtgatatttaagtgttgagcttgctcttcacaagacaagatttcaaccttcaaggatttttccgagttccacctttttgaaaaatatattcatttcggtgaactctaagtgttgagctcactcttcacaagactaaatttcatctctcaaggatttttccaagttccacctcttagaaaaatataatcatttcggtgaaatccaagttttgagttcgcttttcacaagattagatttcatccctcaaggatttttccaagttccacctcttgaaaaaatgtattcattttggtgaaatgtaagtgttgagttcgctcttcacaagactagattttatccctcaaggatttttccaagttccacctcttgcaaaaatatattgatttcggtaaaatctaagtgttgagctcgctcttcacaagactagatttcatctttcaagtatttttccaagttacacctttttggaaaaatatattcatttcggtgaaatcgaagtgttgagttcgctcttcacaagactagatttcatccctcaaggatttttccaagttgcacttcttggaaaaatatattcatttcggtgaaatctaagtgttgagttcgcgcttcacaagactagatttcatccgtcaaggatttttccaagttccacctcttgaaaattatattcattttggtgaaatctaagtgttgagtttgctcttcacatggctagatttcatccctcaaagatgcttttgatgtccgaccatcggaaaaatgtgctcatgtcgatgaaatttatgtatcgatttaactcgtcatggactcaaattccaggtaaagcggtggcgattcacttttttcggaagcaagaaactcgtaaaagcaaaaaaaaaaaaaaaaaaaagaggacatcaacgtctcatgatgttctgagatttcccattagctacacaaacttcaccaaagaactcctggacctcaacaagactacagctcgtggtggcgaaacaacaaccttatcacctccaaagtaggagcacaagtctaggtagaagcaaggttgagtctactaaggtcaactcaatcgatcaagccatgacacaatgatacagagaagttttcttggcgtttcttcagaaatcattagctgatgacttcaacaattacagccatgacaagacaagatcatattggctcgaaacatttggatcacatcatgtatgaagcatcaaagataagttcaactatggtgtacacgtttactccttaacaggaatgtctccatcttaagttatgcaaaatgttatgacgaaaagcatagatgtctaagaccaaacaggtgggggcgtgttccaaataatataaagcaaagtcaagcctcttcggaggagaattatacagtattatcacttaacgtgattgacgaatcattgctacaagtttggagtccatatttatatcatcactcaaaattcaaggagtcaaaatgcgagatttgtcaacaagaagagattcaagtttgaaaaagacaacttcgatgctataccacaaccttccaatgctattcaccttcatggagatgtgaattccaattggtggaatctaagtgttgagtttgctcttcacaaaattagattccatcgagaagagatttctccaagttctagctcttggaaaaatgtgttcattcgatggaatttaaaagtttttccatagtttacctgctttattccgagcaatcaatcggatagaagtggaagacgagaagattagcttcacttcgcaaaaaaaagaaagccggctatgccaattgttattgtcccttccaggaaaccaaagttaaagggcaacaaagagatcaaaccacttggattaaacccgtttaacaataatatggagacatcatctgtaacacccctatcccgctataaaaacataaacgaaataggagtgtcacgttgaacgcccgtagtcggccaacccaggtttccgaaacgaattcgttcgcccgagtcgtccaaccgcaagagtccagcctcccgcccgtggcctaaggcttttcaacccgtaccgcggacgcgagtggtgatagtccggaaaagacaaatatcagtcagtatacccatataaattttagaaatccgagtcttatatatatatatatatatatatatcatacgagaaatggttagcaaaacgtatatagttttcagatcctctttgaaaaccatatataatatacttagtaagaatttacaaaaagccgtaaaacctacattggttcgtcctaagtcacgagcaccctctacaaggttggtcaactaagttttcctgaaaaagataagtagcgtcataagtaatctagcattacttagtgaaccccggatctatatagtgttatcgtaatacccttccttaccccctaagcagcaacaacacgtaacaataatactacctaacaagcaagacataaacaaagataacacgcaacatacaacacaagcaaaatataatgcaccatgcagaatgcatgcagactcgaatttcctaatatgcagcggacaactaatgcaagcatgcttctatcaacctaggtaaggccttctacgaatccatgatctcccaaggacatgcctccatactcttagacacaaagtctataagagacataacattcctttagactatatggtccaaggttggtgattaggtcggccaaggcaagcacgaggtggcccagaccaatcaaaacgttaaaattgtcgaccaacagccgctccgggacactaatcggcctccgattggttccttccctttttcgaataaacatcatccaaaaatggataagcacgaccctaaaagaataaggatgaccggaatatggataaggtttagccttaacggataaacatgagccaccgttaaatcctggccatccgtttcctcattctaaccaaacatacgatctgtcactggaccgcaagaacattaatacggcacactctgttccaatgtctcatgagggtccatgatgcaaatcaaggcttccttaggactataacacgttccatgccagaattaaccgagtaagccagctatcgtcacttatccgcattctccaatcaaccctcgaccattcacgacccatacatatcctattgtccaaatggattcccctcgactttctaatgtttcctagaccgaaactaggtttccttaagctatcctagttcttagggctaacctaatggtttcggggtttaccggtagtcgcatcgtaactaagcttggttcgtctgatggagagtgatccctttaccatggacttgatcctattcaatgctccttacccatgacttgccacactaaatggccgaactgatcttgccttttttttgcttgatctcgcattctactcgacagactgtacgtccggccgcatagtcaaggttatgggcattacatccttcccccccttaaaagaatttgtcctccaattctaaggactaaggaagtaactagccttcaaggcaaaccgattcctttgttggttccatgaagctttgtgtagaaaggataggtttggtctcctccatttttttattgcaatattttcctccattcctaggaagttgatgcatgcctaacggactccgccactttcttttcttgtatgtgatttttgtcgtcaccacatacggtttagctaacgatttaatttatcggcttcctagtactactaggcttggtccacaaatcctaaggttccatcctaatttttatggttctctcctaactcttttgaatgggcttcagacttcctatactttctagttcctatggtttggtacttggttaagtacgaaaccaaacacacacataaatacattaataacttgaaagtaaatcaagcaatcacacaaaaggatattagtataaacataatgtaacataacattagttaacagccctaaggggaaaggaggtgattttgactatcgtacacacctgcttattcaagcctatagatatcatcaaaaagatatcacaatgtaaccgaaggttactattggctcccttgtagtcgtcgctatacatcaaaaaatggggttagtttcctaatatttactaaggtttatgactcctaagggaatcagagtaaccctaagctacacctcgaacatgtacagcctagaaaaagatcctcctccgtgtcgggaatcggtggggatgatggtcctgctacgtgagatggggaagtactagtcggtgcaggaatctgaccgtcatctctcattatcatacaagttgccgtgtaatgcccatactctccactgtaaagacaagcaatggccatgggcatatactgcgtgtataactaacagtcctcgggtaataaacatcctcaccaaagatgaagcagaacggtatctggatacccgatgtggagcccccgtcaaatgtcagaatagcgtcagccctcatttcagccgtgaaacaaagtatgggggacatgccctcccataacagtgcaaaagggctatcgggagagtgatcgatagcctccggaacgtatggagaaaccggtggatcctcatcctcatccggatctgactcataggatatcgatgaatacgggttaagtgcaaaggatggtgtggcagaactgctcgtgggaacactcacatagacatggaccatcacgatctcatgtcccttcagagccagctcctgctccaccgtcctcactcccgtgatcacacattcatcctcacaatccgaatcgatcatcatcccatcccctatatgcacatcctcctgctctgacagagcaactatccctgcaagaccaaaatcagcaaccgtatcactcgatctagtctccgatataacccgggaacactcggccacatcccttctcacacacctacccatgactctctcacgaaggtcatatcgcctggacgacagacccaaggaccgtccctcctcctccacagactcccaccacgtgatctctttagcgggatactataatacaaacaaagaggttaagacacgaaaatacaagcaaaagggtaagccacctataatactaacaacaagggtaagccaacctaaacaaaaagggtttgttctataggtcaatctacctaaactctagcaagtgactgaacaaatttcctaatagctttttacgacacatttactcgataaaacattgaaaaccatggtttctcgtagcgtcacaaaccatgctctgataccaccttgtaacacctctatcccgctataaaaatataaataaaataggagtgtcacgttgaacgcccgcagtcagccaacccaggttttcgaaacgaattcgttcgcccgagtcgtccaaccgcatgagtccagcctcccgcccgtggcctaaggcttttcaacccgtaccacggacgcgagtggtgatagtccggaaaagacaaatatcagtcactataaccatataaattttagaaatccgagtcttatatatatatatataacaaaacgtatatatatatatatatatatcatacgagaaatggttagcaaaacgtatatagttttcagatcctctttgaaaaccatacataatacacttagtaagaatttacaaaaagccgttagacctacattggttcgtcctaagtcacgagcaccctctacaaggttggtcaactaagttttcctgaaaaagataagtagcgtcataagtaatctagcattacttagtgaaccccggatctatatagtgttatcgtaatacccttccttaccccctaagcagcaacaacacgtaacaataatactacctaacaagcaagacataaacaaagataacacgcaacatacaacacaagcaaaatataatgcaccatgcagaatgcatgcagactcgaatttcctaatatgcagcggacaactaatgcaagcatgcttctatcaacctaggtaaggccttctaggaatccatgatctcccaaggacatgcctccatacttttagacacaaagtctataagagacataacattcctttagactacatcgtcatgtagcgcccagtcggtagcgatccagccctaaggccttcgtatgccataacggaacggagttacacgtgatgcacaacatacagacgggattctcatgattcgactaatgctagacatctaattaaagactaactaacatgaaaacagactcacatactatcatgcattcatcatatatatatgcaaaactctactaatcaaacaactaatcacacttaattattactaatcacggttagtccccctaatcatggtttaactaaccctaatcatgcttaagaaatacttaccctaattaatgaacactaatcctaattaacaattactaaacctaattaactatcctaatcaaggattaagcgaataattaagctaagtaatcataattaacctcctaagctatattaaggaaataaatgaataaactatcctattcacgtgctacttcacgtaactcaagactcacttggatttccgagtggtttggcttctgaatgttttctcccgcgaactaagctgttctaagcgatttttgggtctgaggaatcaaatgggcggagggggtatttatatggtccaaggtcggtgattaggtcggccaaggcaagcacgaggtgtttggaccaatcaaaatgtgaaaaatgtcgaccaacggccgctccaagacactaatcggcctccgattggttccttccattttttcggataaacatcatccaaaaatggataagcacgaccctaaaaggataaggatgaccggaatatgtataagcttgagccttaaaggataaacatgaggcacgattcaatcttggccgtccatttcctcattccggcgaaacctacgatctgtcaccagaccgcaagaacattaatacggcacactccgttccaatgtctcctgagggtccatgacgcaaatcaaggcttccttaggactataacacgttccatgccagaattaaccgagtaagccagctatcgtcacttatccgcactctccgatcaatcccgtgaccattcacgacccatacacatatctcactgtccaaatggatttccctcgaccttctaaggtttcctagaccgaaactaaggtttcttgaagctatcctagttcttagggctagcctaatggttttggggtttaccgatagtcgcatcgtagctaaacttggtccgtctcatggtgtgtcattcctttacccatggacttgatccaattcaatgctccttacccatgacttgccacactaaaaggccgaactgatcttgcctttttttggctagatctcgcattctactcgacagactgtacgtccggccacatagtcaaggtcaggggcattacaccatctcttgggaaagagaagatcgagacaaccatctctaacaacatggttgcgatgaaaaggcatacgacaacatccatagagtaaattattatactacaaaagactgtaccgatttcaagaggcatcttcctgagctacggacaattggtgacctcgcaaaaccttgacatcggagagttcgtgaaaacttaccacgaagaaaaggcggaagtcaaaaattcatcactagctaagaaaatacctaaaacatcaaatcccggagtttcttttggttctaagaagaagattgaagtaatcatgaataggtctaagttttgtagagattcgaccactacaatcaaaaagtttaagggaatgttctattaaaggcgagcacaagcgacaaactcgaactcgctagagcaatcacaatgttcaaggaagaagaaattcgtcaccttgcagaacctgatgacgttgattttgtcctcaccttagacgtggctgacgtcggggtttcaaggattgtgattgatgttggaagtttgatagatctactattcttgaatacgcttagagagaatggaaagtagcgaggctgacatagttggagccccatgaatttatcggatcaaggttatcccatcaatctatcgtcaatacgttaaatatttaatcccgaatggtgtgaaaattttacaaggagatcaagaatcttcaaaatcttgttatttaacgactcatcggatggttatccaattaacaaatctcgtgaagaaagaagtgattttaggaatatcaagtgggcaagtagtggatgacgtcataatcaaagtgaccatcgattagaaagatcatgaacgaacaatttggaagaaagtagcatctagttacaaccaaataacgatgaatgatataattcaaattaatcctaagaccactctctctaataaagagttcagttgcagcacttagggaacgaattcacaaagttctcggatcacgtagtagactaatggctaatcgaattaagctaagtaaaacagtaaagaaaataaaagaaagaaaaagtaagcaataccaatcaattgggagttgtgaaaacaagataataaaggcgtcaggcttagagtattctcacgaaatagatgatactagatctagaaatagctaggttattatcgaaccgttctcgaattcaaactatgattttagagtaaccggtggtgttccgtaaaactctctatactcagagctaagattaccagagaagccgagaaatcctatactaaagcatgcattattatcaagtttgattagttcacctagtatctaaaccagagcccttctatgagcctacctgttctttcttaaatgcttaggctcatctatgataggtcaaataacaagtacctatggtggcatacctattatctaatatcaagttctagttagctactctagaactagcattaagaacaatgaagatgaagaatcctacaaataacgtagcaagggggctatctactaaatcatctaaatccctaatgagaaaccctaaacctaacaagaagattactcaaaaatgatcatagaagaacaaaacatgattgaataagaaatcaatgaataaaacaagaggagaataaggtttagaaggatcttctctacagggagcctccacagggttttgctcccaaagtacagaattgaaaaagggaatagcctcccaaagcttagggtctaaacattgaccttaaagctatataaatatgtcttaagaacgtgctgggccttcattaaatataggagaaagttttgggccgaattcaaaaatcttcaaaacaacaataagttgcgtctttcaattgtcgtcaggtattggtgtcgctcgacaccaagggtggtgtcgttcgacacctacgtgcattttcgtctctggattgcttctgcagcttaagttgtatgttttgctccagaaagctccataatcttcaaatgcatctcaaaaatgtaaagacctgaaaaagactagaaaaacctctagaaataacaattagactctaaagcctatacctaaaacatagttaaaaacggtaaaaatagggatatatcaatgaatcctaacgattaagaaaaatacttcgttcagcaccaaccgaggtatatactattttacgatcatgccgtttgaactaaaaatgtacgtgtgacataccaacgatttgcaaacaagacgatcaagaatcatctcgaaaaacagtggaagtctatatagatgacatgctcgtgaaatcgtcaaaagagagcggtcacatttaagacttgggagaatgctttaatatcttgaacaagcttcagatgaaattgaatcttgccaagtagacattctgaatcccatccggagagtttctcggttacttagtaacaaagagaggaaccgaagcaaacccaagacagattaacgctcttttcgaacatgctagccccgaggaacatcaaagatttctaaagactctttggtaggattaccgcgttaaaccagttaacatctcaatcagtcgataaatgcctttctttctatcaaatactaaaagggaacaaagagttgagttggatgaaagatgtgaagatgctttcggtcaactaaagacatatttaaatgttgctctaattctctgaagcctgaagccgatgaaaagttgtacttatacatctcatttttgaatcatgccgttaatggagtaataatttctgaagacagaagagagtgaaagccgatttgttacatgagcaagtcatcaaccagtccaaaattaagttacactataatggagaaacttgcgcttgatgtagtcacttcaacatggaagctgcgactttatctatgtctcatccgatcatagttgaaactcttgggaaaattggttaatttctgcggagttcaagtgtccaattcgctcttcacgaaactagatctcatcccaagaaggtttttccaagtttcaactattggaaaaataagattaatttggtggactataagtgttgagttcgctcttcactgaactatctcgtgaagggtttttccaagttccaactcttggaaaaataaaattatctctatgaaatcgaagtgttgaaatcgctcttcagaacttaagataccacctcacatcaacaagcatttatgacgaagtctttgagtacaagctcggaagaagatcttcagtttctctctagattgctgctcaataacctgcctttgtattctataagcagaatacactttgtaaactcaagcttatagctccgattcgaaagtcgaggtcacttcgcaacaacttaactcgaggtcagctcccatgcataactcgagtttaattctgataccaaaactccatgattgaactgacgagtttgagtcaataaaatggatttaatcctcttggacaaggtgtcaactaacaaaacaaagatctttacggtgtttagtcgatcaacctaatacttcttaggcggagcacagttctcgcaatcaaagaaagtccaaagattgagtttgggggtttgatcaacctatttctctcttagccacatggcccaaatttcttttagccacatggcccaaatttttgaaaaagtacggactttgcaaatccggaaacttagaagcaaatactttaagcaagtgtcattccaaaacccctatggacaacgaaaaggaaaaagttttaaaaaaccctcttgggtacacaaccaacaaattttaaaaccccttgggcaaataaaaattccctttcgggaaagtcgtattcataaaataaattgggacaatccccaaattttatggtaatagccataaaagagttaagatgagctgaagcctcatcaacactcggtgtaatctcgtcttggttcaaagtagcagtggccgttccttgatcgtgagtttcagtttcataattaggagctgaacatgagctggatgaagcatcgacattagttaggatacacattttggcgagttgtcattcaagtttatgaattgattgtggaagttattttatgaattagttctataattaatggtacattggaagaaggaaagaggctataaaagagaggtgaagactccaagaaaaggggggctagagattctatattttgaccccaaatcttaaacttaagcattgttattttctcataaatacacaaaagattatttcttctccttttatgtaagatctttacataaggaatactataccattttctatgttcaattcttcatacatttttatatactctcttaaacttttattatgcatatttgtcgtgtacttttgtacttgagagttttagcccacaaataatataaatacttgagtgtgtgaatccgacatccataaaagtctgtatgagtctctggctatgtatcttctagcatggaaacacaactttagcttttaggatctggttgtggttctagttcttatagtcaatcatagacatgacatctagtcatatttgactccaaaacactaaacaagcttcttcttgcttctcaaagctttgatggtgacatcgaagtccgtatgagtctttggctttgtatcttctaacaaggaaacattacttaggcttttaagatccggttgcagttcttgttcttatactcaaccatacaaatgacatctagtcatatttgactccaaaatactaaccaagcttcttcttgcttcccaaagctttgatcgtgaagccgaagtccgtatgagtctttggctttttatcttctaacaagaaactaatacttaagcttccaagatccggttgcggttatagttcttatactcaatcatacacatgacatatagtcatatttcactccaaaacactaactaagattctttttgcttctcaaaactttgatggtgaagccgaagtctgtatgagtctttgcctttctatcttctaacaaggaaacactacttacgctttcaagattcgcttaaggttctagttcttatactcaatcatacacatgacatctagtcatatttgactccaaagcactaaccaagcttcttcttgcttttcaaagattagatacggaagccgaagtttgtattagtctttggctttgtatcttctgaaaaggaaacactacttacgcttttaagatccagttactgttctagttcttttactcaatcagacacatgaagtctagtcatatttgactccaaaacactaaccaaacttcttcttgattctcaaagctttgatggtgtagtcaaagtccgtaggagtctttggctttgtatcttctaacaaggaaacactacttaggcttttaagagccggttgcggttctagatcttatactcaatcatacaactgacatctagttatatttgactccaaaatactaaccaagcttcttcttgcttctcaaagctttgatggtgaagccgttggctttgtatcttctaacaaggaaacaatacttaggctttcaagatctggttgcggttctagttcttataattaatcatacacatgacatattgtcatatttcactccaaaacactaactaagcttctttttgcttctcaaaactttgatggtgacaccaaagtccgtatgagtctttggctttctatcttgtaataaggaaacattatttaggctttcaagatctggttgcgattctagttctgatactcaatcatacagatgacatctattcatatctgactccaaaacactaaccaagcttcttttgaattctcaaagctttgatggtgtagccgaagtctgtatgattctttggctttgtatcttttaacaacgaaatattacttaggcttttaagatccttttacggttctagttcttatactcaatcacacacatgacctcttgtcatatttgactccaaaacactacccaagcttcttcttgcttctcaaagctttgatggtgtagctgaagtccgtatgagtacttggctttgtatcttctaaccaggaaacactacttaggcttttaaaatccgtttgcggtgctagttgtcatactcaatcatacatataacatctagtcatatttgactccaaaacactaagtaatctttttattgcttctcaaagctttgatggtgtagccgaagtctgtatgagtctttggctttgtatcttctaacaaggaaacactacttaggcttttaagatccagttgtggtgctagttcttatacaaaatcatacacatgacatctagtcatatttcattccaaaacactaaacaagcttcttcttgcttcccaaagctttgatggtatagtcgaaatccgtatgagtctttggatttgtatcttctaacaaggaaacagttcttaggcttttaagattcggctgcgttctagttcttacactcaatcatacacatgatatctagtcacatttgactccaaaacactaaccaagcttcctcttgcttctcaaagttttgatggtgtaggtgaagtccgtatgagtgtttggttttgtatcttctaacaagaaaacactacttaggctttttaagatctgattgcggttctagttcttatactcaatcatagacatgacatctagtcatatttgactgcaaaacaataaccaagctacttcttgcttctcatagctttgatggtgtagccaaagtccgtatgagtctttggttttgtatcttctagcatggaaacaaaactttagcttttaggatctggttgtgcttctagttcttataatcaatcatacacatgacatctagtcatatttgactctaaaacactaacaagcttcttcttgcttttcaaagctttgatggtgaagccgaagtccgtatgagtctttggctttgtatcttctaagaaggaaacaatatttaggctttcaagatccggttgcgtatttcttagacttaatcatatacatgacatatagtcatatttatctccaaaacactaactaagctttattttgcttctcaaaactttgatggtgaagctgaagtccgtatgagccttttgctttctatcttctaacaaggaaacactacttaggctttcaagatccgattgtgattctagatcttatactcaatcatacacatgacatctagtcatatatgactccaaaacactaaccaagcttctttgtgcttctcaaacctttgatggtgtagtcgaagtccttatgactctttggatttgtatcttctaacaagaaaacattacataggattttaagattagtttgcagttctagttcttatactcaatcatacacatgacatctagtcatatttgactccaaaacactaaccaagcttcttcttacttctcaaagctttgatggtggagctgaagtccgtaggagtctgtggctgtgtatcttcgacaaggaaacactacttaggcttttaagatcctgttagggttctagttcttatactcaatcatacacatgaccttttgtcatatttgactccaaaacactacccaaccttcttcttgcttctcaaagctttgatggtgtagctgaagtccgtatgagtatttggctttgtatattctaacaaggaaacattacttaggctttcaagattcagttattgttctagttctttacttaatcataaacatgaaacctagtcatatttgactccaaaacagtaacaaaacttcttcttgcttctcaaagctttgatggtgtaggcaaagtccgtatgagtctttggctttgtatcttctaacaaggaaacactacttaggctttaaagatccggttgcggttctagttcttatactcaatcataaaaatgacatctagtcatatttgactcgaaaatactaaccaggcttcttctcgcttctcaaagctttgatagtgaagctgaagtccgtatgagtctttggctttgtatcttctaacaaggaaactcaagatccggttgcggttctagttcttatactcaatcatacacatgacatatactcatatttcactctaaaacactaactaggcttctttttgcttctcaaaaatttgatggtgatggcgaaggccgtatgagtctttggctttctatcttctaacaaggaaacaatacttaggctttcaagatccagttgcaattctagtttttatactcaatcatacacatgacatctagtcatatctgactccaaaatactaaccaagcttcttcgtgcttctcaaagctttgatggtgttgtcgaagtccgtaggagtctttggattggtatcttctaacaaggaaacattacataggattttaagattaatttgcgattctagttcttatagtcaattatacacatgacatctagtcatatttgactccaaaacactaaccaagcttcttcttacttctcaaagctttgatggtgtagcccaagtccgtatgagtctttggctttgtatcttctaacaaggaaacactacttaggcttttaagattcggttgcggttctagttcttatactcaatcatacaaatgacatctagtcatatttgactccaaaatactaaccaagcttcttcttgcctcttatagctttgatggtgtagtcgaagtccgtatgagtctttggatgtgtaacttctagcatggcaacacaactttagcgttttggttccggttgcagttctagctcttatactcaatcattccgatgtattcctatttttactgtttttagttatgttttagatataggattttaagtctttttgttatgtttagaatgtttttagagtcttttcgggtattttatggagagggacaacattggagatgaggagacattttggagcaaaagctaaggaaaagaagctaaaggacgaattcactttcagaatcagtcgagagtgtcgatcaacacacgcttggttttgatcgacaccaattgcggcccagagaagtccatcacgcttttaagtttgaaaaattggaaaattgcccctgaagactttcctattttcattattggtcttgaaggttttataggtcatatatatagttttagaggtcattgtttagacctaagaactttttattatcttgtttcacaacctctaatcttctatttgcttactttgttttctttttactttcttatattctcttctagcttaatcatgacacttagctcaatgtgtgaacaaaaggactatggaatccgacccttaaatactgcaattgatttcttatttgagagagaggttttaagacaatttaaaccatatcacatacacatgacatctagtcatatttgactccaaaacactaacgaagcttcttcttgcttctcaaagctttgaagacgtagccaaaatctatatgagtctttggcattgtatcttctaacaacgaaacactacttagcttttaagatcccgttgcagttctagttcttatactcaataatacacatgacatctagtaatatttaactccaaaacactaaccaagcttcttctttgttcttaaagcattgatggtgaagccaaagtccgtatgagtctttggttttgtatcttctaactaggaaacactacttaggctttcaagatcggattgcggttctagttctcatactcattcatacacatcacatctactcatatttgacaataaaacactaaccaaccttcttcttgcttccaaaagcttcgatggtgtagccgaagtccgtatgagtctttggctttgtatcttctagcatggaaacacaactttagctttagggattcggttgcggttctagttcttatacgcaatcaaatacatgacatctagtcatatttgactccaaaacactaaccaatattcttcttgcttctcaaatatttgaaggtgtagccgaaatccgtatgagtctttggctttgtatcttctaacaaggaaacactacttagcttttaagatccggttgctgttctagtttttatactcaatcatacacatgatatcaagtcatattcgactccaaaacactaaccaagcttcttcttgcttctcaaagctttgatggtgtagccaaagtccatatgagtctttggctttgtatcttataacaaggtaacactacttaggcttttaagatcaggttgcagtttaagttcttatactcaatcatacacatgacatcaagtcatattcgactccaaaacactaaccaaccttcttcttgcttctcaaagctttgatggtgaagccaaagttcgcatgaatatttggctttgtatcttctaacaaggaaacactacttaggctttcaagatccggttgcggttcttgttatcatactgagtcatacacatgatatctactcatatttgactccaaaacacttaccaaacttcttcttccttttcaaagcttcgatggtgtagccgaagttcatatgagtctttggctctgtatcttctagcatcgaaacacaacttttcctcttaagatctgattgcggttctagttcttatacttaatcataaacatgaaatctagtcagatttgtctccaaacactattatggcagatcatgttcaccaggcaatgacccaaaataagatcttggtctatttgagattgttccttttaatcgtaatcaaagatgttttcttgtttcttgtttcttttctgaacaaattgaagaacctaatggaccgaacacatcctacgaaagatatcggaacaccaaaaccagaaagaatgaaagtagagctaattgcgagagttcctcgttaaaagtgcaagctgtaattctacgtttcagaatcccacttaataatttcctcaaaaaatgaaatctgcttttcgtaagacgtgtctttagaatactgttcaaaacaagtaaaaaatttcaaggagtaaaggatttgatgggaattccgggtcgaagaagaggcagatcaaaatatggtgcaaaaaaacccaaatcgatatgaatggaagatgcctctggaactagtattggtcagtcggtggaacaatcacaacgttacgccctaaaatatcaactatctcaatccccaagtaattgtttaatataaagagattcgtcgccccgtctgagaaggtcacgctctattttgcctagaaataagatctctaggcggtccatttcggtcgggctagatcgggggttcgaaatgtccagcgcgtcccgcctctcgttcaagaagtcgaaaaagccttttgaggagagtaggcgaagcttcttcttgcctcacaaagatttcatggtctaaccgaaataagtattagtctttggctttgtatcttctaacaaggaaacactactttgcttttaagatttggatgtggttctagttcttatactcaatcatacacatgacatatactcatatttgacttcaaaacactaaccaagcttcttcttgcttctcaaagctttgatggtgtagcggaaatccgtatgagtctttggctttgtatcttctaacaaggaaacactacttatcttttaagatccagttgtggttctaattcttatactcaatcatacacatgaaatctagtcatatttgactccaaaacactaaccaagcttcttcttacttttcaaagctttgctggtttagccgaattccgtatgagtctttggctttgtatcttcgaacaaggaaacactccttaggctattaagatcagttgcggttctagttcttatactcaatcatacacatgacatctagtcatatttgactccaaatcactaatcaagcttcttcttacttctcaaaactttgatggtgttgtcaaaatctgtatgagactttagatttgtttcttctaacaaggaaacactacataggctttcaaatccggttgtggttctagttcttatactgaatcatacacatgacatctagtcatatttgactccaaataactaaccaagcttcttcttgcttctcgaggctttgatggtgaagctgaagtccgtatgagtctttgcctttgtatctttgatataggtcaaattgccttaagcccactctctcaaataagagaacgattgcagcacttaagggtcgaattccacaaagctctcggatcacataatagaccaaggttttgaatctacatatacatttttggtagggtttttggcaaaaaatccctcacatatttactattttcaatatgagtccttactaatttaatctcaatcaaatactttataactaaaaacttacaattagtttaattgcattaattagttgaattaactctttcctaaatttttattctcaatgaaatcattttttattgaactatattcgattgaggctaatttcctaaaatctatatatcgacattaaatataaatatctaatttttctgtcactatatttttttatatatctaattttgcttttagtttatatataaaacacatatagttaataaaatattaaattttttcgcatctgatgaaatttaaattttttaaaacaaacatataatactccatcgatgaaaaaaaaagttttaaaggtcccacattgctcaaaaaaaaaagaggaaatcgttaagagtcatacgaattagcaagaactttaattttacttcggtcctttattttaaataactaaaagtttaaaagttttcaaaaatattttatatatttaaacttttaaaaagtgaaactctataacaaatatttaaatattaatgattttaaaattttattaagatttaatttcaccagacgaggttaaaatgatgtttaatttcacgagacaaggttatatggtgggatgggtttggatcgatattgatacgggatgatatactatggacgaaatcctaaaattaacaatcaaaatacaattatactattttaaacgctaatttttttttaattagttataaaaatcatatagaggtgtatcatagtatcatacataaaaaacaatagcatgtatctatagatcatctttaatacaaaaatattattttttatttaataaaaatatagggtctttgatgtacctcttgcatatgttatatatataaataatattaattaaaataaaaatatctaattttctaacaaaattatcgacccctgtgtgctgcgggtcaatatctaaattatacaagttctagatctttattaactctaaaaaacccaaaccaaaaaaataaatactgaattttaatattaaactaacaaatatgagaaaacaaaacatgaattgtccaagatttacaaagataaaaattatgtgtgaagaatatataatttatatagaattaataattcctataaaaaatatctataacttcttaatgaacatatccacccgcggtgtaccgcgggtcaatatctagttaagctaagtaaaatagtgatgaaaataaaaagaaacagaagaaagcaatagcagattgtgaggttgtaagacaagaaagtaaaaacgtcaggcttagggtattgtcagaaaactattggttagtagatctaataatagctaggttgttatcgaaccattcttaaactcaaactctaatttttgaataaccagtggcgtttcgcgaaactcccaatgcctatagctaagaataaccggagaagccgagagatcttatacttatacatgcattctaaacgagttcaattgttcaccttagtagataggccgattcttattacacacctataaccgaggctcatcaaataattaaatccaactacagatacttatggcgggtatatctattgtttggattcaagttctaggtgatcaagctaaaactagcattaagaacaattaaagatgaagaattctaaaatactccattatctccaaatgaatcccaaacatgttaagaccttaagtggattagaaaagactctagaaataacaaatagactataaaacatatacctaaaacatagttaaaacatgtaaaaatagggatatatcaatcttctaacaagtaaacactatagtggtggatctagaacatttttttatataggacaccataaattatttataaataacgatataaatgaaatatgtaatataagatttctaaagtgttgcatgtacaacttttcataaattttgtattgattttgaagtatatttatgaaatcataagaatatttaattattttgtgaaaacaattacttgcacacatatagccattaagaaaagaaaagtaaactaaatttaggaaaataaacatacaattagtatcgatgatgataggatactgagattatagaaaaggaaaaaaaaagttttgtgtgtatccacttgtgtgttccatgatctcattcttgcacccgttgttagtctatcatgaattgcaagccaagtgatgaaagagaacttcggtgtagcttccgagaaccaaatccctttcgcccatctgcagattggtttttcaactctcagcattttccaagtttcatttgaggagaagttgtgtttaaaacctgtcttccatttccatagaatcaaatcttcctcttcaaccttcctcctcacccttgtttccctgatgacctcttccactctatttaaagtctccactctatgccgtctacctctgtgagaggccaaaacgtcacccactgtggcttcttttgtaatacccaaatcaatgcaccctcgatctccaaaagtatcaaataagttccccaaagaggaccatgtatcataccaaaaggatgtccctttgccactttttatttcaacctgatagaaatcctttgccaagtctctaagctttaagagtttcctccacatccaagaaccttgagatgaatttcccttgactgtccaaaacgtttttttccgaattaaataggcatgaatccacttactccacagagacgttggtgctgcaaataaacgccaaattagcttcagaccacaaactttgtttgtctctttgagaggtcgaagacctagtcctccttctctaatcggcaaacaaactacatcccacgatatcttagctttagaaggatttaaatcaggcccactccagagaaaagcagaacaaagttgttgaatctctttaatacaagcgccgggtaagctgaatgttgaagaccaaaagtttgtgatgctcatcaagaccgctcttatcaactgcaatctccctgcataagatagaaatctacgcgtccaagagcttattctggttctgattttctctactagaggaagataatcatgagctgacatagctttagtcatcaaaggtaaccccaaataccgtactggcagcttacctgttgcaaatggaaaactccattgaatggcagcttgagtagtagggtcaatccctgccatatagagagtagatttctcaatactaattctcaaacccgagcattttgcataaccatcaaaaacagagataatttcctcgatcgacttctttgtcccttctgcaaaaaccattaagtcatctgcaaaacacaagtgcgtgagaagaacattgcgacattgtgggtgataaccaacctttccctccattgccgccttattgatcatttgggttaacacattcatgcagatcacaaacaagtaaggtgataaagcacaaccctgtcttaaccctctcttactcccaaaaaaccccggaagctcaccattgatttgaactgagaacgtagctgttgatatgcagagatggatccagtgaatgtatttggtcgggaagtgcatagccttaaaagtgttcagcagaaaagtccattgtaccgaatcgaaagcttttgaaatatcaatcttcatggcacacctaggggagatgtcgtctttgtgatagtttttaacaatctcggacgccaacaaaacattctctagtaagagtctgttttttatgaacgcagactgatttggcgagataagctccggcaagtagaagcttcaacctattggccaatatcttagatataaccttgtagagaacgttacaacaagatatcgatcgataatctttcattattttggcatcttctttttttggaatcagagcaaggatcgttgtgtttataccttttggaaggaaacccttaatgaagaaagattgaatcgcagtcgtgaaatcatcgccaatgactaaccatgccgatttaaaaaattcactcgtatagccgtctggaccgggagctttgttcgctggcattgcaaagagaacctgcctaacttctgcagcagtgacttccttttcaagcattatctgttgagcctcagtacatttgaaaggtagacaatgttccaaagtctcagcagtcatttcttcataatccaaaggtacatggcctaagaaatccgagaaaaaatgctctgcttccttctttatttcatcttgactagatgcaattgttccatcctcacattgtatttcccagattgtgtttattgactcccgtaacttagctgcattgaaaaacgttttgttgtttttatcccccacgtcaagccaatgcagctttgacttttgctttagaaatgactcttccagctctgacaaatgagaccactttctataagcttctgtttcgtcctgtgatgctgcatcagtcggacaagacaaagtttcactctgtttcttacatagatcttcaaaagctgcttttactctcttgtgcaaatcaccaagtttctccctacttaactgtctgatatgaggtttcagatttttgagcttcttggcaaaccggaatattgcagaagtagagtgaaacagggttggtgtatcttgccaataagattgcaaaaggggttgaaactctggcatcgtagcgtttgaatttgtgaacttaaacggtttcctttttaccactttctctctttggatttgaattctgcagcggagatggtctgaacaaccgcctggttcaaaaacgcaatacccttgtgagtagtggttgagccattcactattgataagaaccctgtcaagcttcttacagattaccccctcatctctcttgttactccaagtgaataacggaccatgagatcctaaatccattagtgaacaatctctgataacctcttgaaaatctctcatacctactggaatagtaggcatggtttcgaaatttgaatgttctactccatccaatatctcgttaaaatcacccataagcagccatcttttatttctaaacaatggcgaatcctggtgattcctcaagtcttcccataacactttcctctcttctgctaaattctttgcataaatgaaagaacagaaaaattcatcttcttctccctccattagtatagaacatgtgattagctggtcacttttgaatattggagttaaacgcacggtagatctccaaagaacccaaatgcgaccatgctgattgaactcatagtttgccataaaagaccaattgttgaaaactgtagacacaatactcgttgccttcttttccttgactctcgtctctaataagcatccaaattgcatctcattattgtttgtccagtgacggaccacagaatgtttagaagttttattaaatccgcgcacattccatgaaaaacacgacatttagtatgctttacggtgtgacttcttgcctgcaacttttggaactgagttctttgttgcctgattcgaagtcaccgtaacatccttcttctttcttgagtgagtacgtgttgcatttggcttatcatttgtctctgtctcctcgacaaactttgtttctacatcatttgcctcttccgtagcgctattctttacattgtttcccacattttcaaatatttcgccttcctcctcttcatccatactcaagactgcatatttggaagctgacaccaatgttgattcctctacttctgctcctttgctcgggctacgacttactttagaaggagaaacctgtaaccattcaccctgttccttcatgtgaacatcctgttccttcactattactatttctgatgctggagcagagacagtttcatgagtggtgatttgattagtagataaaatagcgttttatacttttatgctatagtaaacaaccctcattttttctataacgttttaaaatttgtaaacgctatgtttgggtgattaaaattttattctgagtcacgcttctaggttaaacatataatatagcagttatcatttattaaacgctgtgtaatgtttagaaagaaaccaattttgcccgctagtacttagcaaaattttggccacaaaaaattgagtaccctctcaatattccacactactctctccagctctctccattgtttcacgcatgaaccttttcttaacaattgctttaatcttcagctctcttccattaattctaaagagataatcgatactaatttggggttttcagcagatctaggtttggatacacatctctctcttcttccacctcataatttctttcgactgttattcatctaatttaggtttttgactgcaggttgctttgctgagagattggtgtgctcgagttaaggagaaatttgtgtgagcaattggtatgattttgttttggtcgattttgatttagggttaaaatttccctatttgattttttcaatttgctttgacagggaggagatttcgacagaagtaaagctatataataaggtaacatgttctttatgttcgattgagacaagtaatgtttcgatttttggagttggagtcaagttaatggcttcttctgtcttctgttttctagctttttttgttttgacaagaatgtgtgatggtttcaaatttggattttgttttcagtttgtgcattgatagagttttacagaggaagctttcggtcattgatagagtttcaaatcaaaggtatctcaaattttaaagtatttgttcagtttgaagcgaagggatttgttctagagaatctcaaattgcttccttgtttccttgaagtatcatatccatcaatcaacattcttgttacttagaggtatatatatccttcatatttcattgaattttcttaaaatatgtttcatattgttatgtgattgcgtctagttattatagtgtctaactctagaaacttttatcacaaatgtatgtatcttttggtcgtggagctgtgatcttattgtaacatggacaagtcttgggtttggctttcaaggtatggagttgtatcttaatcttagttatgttagttatgttctccaggactagccttgagtatgagcaaggagccacagattttgtgaaagcatcagcgaggaagctgggtaatcctcccaacatgttttgtccatgtgtagattgccgcaatgtgtgtcatcaaccaggagacacggtacttgatcatctggtaattagaggtatggatcacaagtataagaggaattcatgctggagtattcatggggatttaagaaatgagacaaatgagattccgggttcttcatttgaagcttatgagttgtttagaacagcttttcatgaggaagaggaaaatttacagtctcgggaaagactatggagatcaaacagaggacagtaaagaagattcagagtttaagaagaaagtaaaacaaaggaataagaagaaagaagataggaagtgcacgagagataatttgtctgattttctcatgtaacaatcgaataattataactatagcataaaacaattaatagtagtgtggggcacgtgcctatgtatgtagtcttgcaccttgatccgcctttgaaacattatatacgcttttaagattcggttgcgattctagtttttatactcaattatacatatgacatttagtcatatctcactcctaaaatactaaccaaacatttttttgcttctcaaagttttgatgctgaagccgaagtacgtatgagtgttttgtattgtatattctaacaacgaaacactacttaggctttcaagatccggttgcgattctagttcttatactgaatcatacacatgacatctagtcatatctgactccaaaacactaaacaaacttcttcttgcttcttaacgttttgatggtatagttgaagtccgtataagttttaataatgatacattacttaggctttcaagatccggttgcggttctaattcttatgtgctacaagaaaactgggttttaacgactacacgataagttgccaaatagtcgtcaaatagtgagttatgactaataagcgactaaatctggtaatcgtaaatcgatggtaaaataaatagtcgtaaaaatagtcgccaaatagcaaatattgtacgactaatattcatagtcgtaagagtagtcataaaatagtcgtcaaatttagtgactaattaacgactaatctgcgattaaatttcacgaacataaattgtttgtagtgttatagtagtagagtagtcgttaaaattcgttaaaatttagtgactaatttacaactatattgcgactatggtcgtatttatgtatttatacagtattgtatttatttgtacagtatttatatatttgtacagtatttatgtatttatttcagtattaatattaatatttattattaattatttccaaacatatttttattaattatatttaaaagaataccatattacaaaataaaattacaaacattataaaacataagaatacatcatcctcctaaaaacataattaaaacaaagtagataacaatctttaagaaagaactaggtctgaacaagcagtcaagtcctatgaacactaaccgttttgatgaggtaaaaggaagagcagtgagattagctccagcctctgtggattatgttgggaatggatgtccttaagtttgttgattggctttctggattttccattagtcggattgatttgaatctgtagtacttaaaccatccatgcaataaagtcgagagatagatcataatttcagacaaaagtttgaactcaataaaacgactatctaagttagaatgacacaactaactcatgagaacagaaaagatgaagttagtaactgactcccccagacttagataacactgtccccagagttattaagctagaggaatcgaaagaaaaataatcaaaagttaaaagttagagaaacgtgagttgccacctgagagtggtgtcgatcgattataggttggtgtcgatcgacactcaggtcatttttgcatcgctttgcgaattcagctcatcgttgtagagctttggttagtgttttcacatggatcctccagttagactgttaaatcactaaaacacacatcaatagttccaacaaagcataggaaaataagtgcaacaagttccaatacaaataacaaatagtctgaaataaagcaaaaacaaaatcagaaaacaaagcaagatagggaggatggctagtcctcatgctccgaacgggaggtgggtgcgggagaacgatgacgacgacgagtggaagcaacacaaccgcagcgagagagtgtagctatggcgttccaaacgctcttgaagctgtcgacgatgtattgctgaaagacatatggctctatcgggataggagtaggagaaggcagctcatatggtagagctaaagaagaagatccaactctcggacccccaacagggtcaatgaactcatcctcagtcttagtcggtgcggatccttaagctgaacctctctgtctcctggagcatggcgcggaatgcagacgggaaggatcatgatgaaaaccaatctcctcatgctctcctgtaatctctgtaagtgcagggcaaggtaactgaatcatatggtgtcgtgtttgtctctgaaacaccagaggaagttgccttccagccagtgaaagttcttaagatatctttcatccattgtgaatctcgtggtgttgacctcttctccttcaaagctgatgcaaaaatgctcaaatataggagtgagaagactgccaactctcttagatttcttccttttacgtgtaaagggcttggtcttgagtgagaccaagtgatgagcaaacacaacgccaaagttgacatcgcggacaacctcctcaactccaaagctgtcaggaaagaaatcatgaacagcatgatagagcaacaacaacatagaaagtctcatcttgccaggcttcatcttgcacaacagtgtgctagtaatcagcctaaccaaatatcgcagaaaccgggtgacgaatctctgagtgaacttcgtccttggaatcataaattccattaccaaacctgcactagataacctgagcatccttaaactgttcaagcagggaaactccagtgagatcattgtcaaaaccatagatgtcacacaaatctcttggtggtagactctatctgacaccgcgaatgaagtagataagagctccttcctgagcattgcgtttcctgtcattcacatagtagaccctaacagaaaccatgaattgtctaactagctcaggatacaaatcgtactacctacaacagatggttcccaaacctatatcatctagcagtcctaaaacagatttctctatctgcaaacgctgcattaaaccaaaatccgcaaaccaagtaggcaaaatttctacactcatctaggcattatagaaaaaagtatcataataatcccaatctggagaaaaagggcgattgatatagtcacctttagtgaattctttgttgacatccttctcccaaactctttgagaaagaattctttctgttagtagctttggccatggaaatcaatagataagaggttgaggcgctgcagcaggtagtggcggttgggaagggcggagaccggcggcggtggagaaggtccggcggtggtgagcagcggcggaggaggaaggtggaggaacactcttccttgccttctttttctgcccagtcatgttgcagatcgatgaaatagatacttggggaagaaagaggatgaaattctaatgagattagagcctaaaatcacaagaacctgtgaacaatctagagagaaaagagtgatttcggcgttttgaataaaaactgaaatgaagaagatgaagtttaggtgaaatcgacttaccttgaaaatgagagtgtcgatcaacaccatcgcgtttcgtcgacacgatgttttttctttttttcaaatgagcatccatttgttatcactattgcatcatatcaccacagttttataccatttctcatcatttgtcatcactttgcatgtttaggatagttttgcatgcatgttgcatatttgtgttgttttcatctgatttagagctattgacgacctaattagaagaagcgaacctgatcatatcaaaccactcgaccccctggtcgagtagatgtttcacgacttcaacagaccactcgaccccctggtcgagtagaagacctcatcacttcacgtcactactcgaccccatgatcgggtaccaccaaaacaaccactcaatcacatcactcgaccccctggtcgagtatcatcacctccaccacctgaccatcactcgatcacatcactcgaccacctggtcgagtaactctatcaccttcactcgatcactctaccaccaagtcgagtaccaccatctctatcgctccccttcatactcgactgccagcttcggagtcttctatattctgcattcaactagacactcgagcaaaaggaagaaaagaagactccagcttaccactcgaccatgcactcgaccacttgggtcgagtaccgttcttaatccgtcccaatactgcgtcgttttgagtattagggttattttgctataagtagcatgtactttacatttttgttatctaatttttatcccgcagacactgtgttcttgacgtttttgtaatccggatttctctttatctattcagtattcagtatttgtttttcatttcgcttactaagttgttcatcctgttatcatcctgctattactctgttgttataatgttttcattccattcaacgtttatgctttcttcagtgatgtttgagtagtgaataggtttctaaggatgggttagagtagtttagaattcttagtatgttaggtggttgagtttgatttatagatcccttatggattagttgttcttaatgcctattgctttctgatgaactggaatttgagtccaaacatttccgcgcccaaaaggtgttcgatgaaatgtctgaaccactaattctagagatttgtggctctgtaccaaggtattggttgcagggagcattttggctttaatttgttgattcgtaatgcttgttaggttggctctcgtcaatggtgattgagtcagggactagtttaacttgagtgtctttgttgcggtggcacttagatttggttaacgaacttgttgtctaggataatttattgagcatgttaatcacctgtaaactgagtaaacaaaactactcaattaccccatcctcgggaattctttatctaattgatttctttatttactctgctattgtttactgcatcttgttacttgttgcttagtttttacatttctctcctgttactcgaccagatactcgaccacctagttgtcgggcaacagactgtgtagtcgagtatctttgtcagtgtctttgctgtttactcgacctgtcactcgaccacacccagtgcttggcagcaagctgtgttggtcgagttttttgatttatctgtttgaatttatgtttcctgcatgttcacttaggactactagaacacccgaaaacctgttattgcttggcttgactctgtgaactctgattgcatcttgattcttagcatcacacccatttggattgacaacctaaaatactacaacgacatgattggtgttttaggataattgactaaaaaacaattatcaatttggcgatgttgccaattgggtgtttgtttgttacatttgagatttcagacttgtttagatcaagttctttttcaattttcatttcgattactaactgtgtgtttttattgttgtcttcttaatccaggtacacctctactttatgcaaactcgatcaacaggcaaccagattctcctttacaacgatagcatcgaccgcatagctcgtgaactcaaagaaaggagaaacacaatcaaacttgtacctcagcaaccattcgatatggctgacgaacaaaatcaacagaatggccctacaaacattggtgctggagatgcaccaagggaccaccgtcaaaggaaaggaattgcacctcctgctatccagaacaacaacttcgagatcaagagtggtctcatctagatgattcagggaaacaaattccatggtctgccaatggaggatccactcgaccacttggatgaatttgatatgctctgtaacctaacaaaattcaatggtgtcagtgaagacgaattcaagctccagttgttccattctcttttggagacaaagcacacatctgggagaagaatctgccccatgactcaatcaccacctaggatgattgcaagaatgcttttctagcaaagtttttctccaacgccagaactgcaagactcagaaatgagatttctggtttttcacagaagactagtgaaagcttctatgaagcatgggagcgcttcaagggttacaccaaccaattccctcatcatggtttcacgaaagcctctctgctcagcactctatacagaggagttttaccacgcatcagaatgcttctggataccgccagcaatgggaatttccagaacaaagatgttgaagaaggctggaaattggttgagaacctagctcaatcagatggtaattacaacgaggactgcgacaagaccatcagaggcacaaccgactctgatgacaaacacaggaaggagatcaaagcgctgaatgccaagctggacatgattcttcttagccagcagaagcatgtgcacttccttgttaaggacgaggattatcaagtccaatatggggagggaaagcagttagaagaagttagctacatcaacaatcaaggtggcgacaaagggtataacaacttcaagaccaacaaccccaacctctcttaccgcagcaccaacgtgtctaacccacagaaccaagtgtatccaccacagcaacaacaaggtcagaacaaaccttttgtttactacaattaatgttttgttcccaagcagcaatttcaagggaactaccagcagcaaccaccacctgggtttgcacctcagcaacaccaaagtccttctgctcctgacgctgatatgaaacaaatgctacaacagctgcttcatggacaaccatctggctccatggagatggccaagaagatatctgagttacacaataagctggactgtagctagaatgatctaaatgtcaaagtggaatcactaaataccaaagtccgttacttggagggacattctgcatctacttccgctcaaaaacagataagccaacttctaggaaaagcaattcagaatccaaacgaatatgctcatgatatcactctgcgcagtggaaaagcacttccaaccagggaggaacctaaaacagtcaatgaggacagtgtagatcaaaatggggaggatttcagtctcagtgaagatcaagctgacaaacaactcgagcagtcacccgaccatgttactcgaccaccattcccagaaacatcaccaattgctctgaaacatgttgctgtcaagaaccaagaaaaggtctttgttcctcctccttacaaaccccagcttccattttcgggctgtcacaaaaaagcattgacagataagtatagagctatgtttgcaaagaatatcaagaaggttgagttgcggatacctcttgttaacgctctagcactaatcccagattctcacaagtttctgaaagacttgatcgtagaaagaattcaagaagtgcaagggatggtagtattgagtcatgaatgcagtgctgtcatacagaagaagatcattcctaagaagcttagtgatcctggttcattcactctaccatgctctttaggtccattggctttcaacagatgcttatgtgatttaggagcgtcggtcagtctcatgccactctctgttgccaaaagattggggttcactcaatacaaatcctgcaacatatcccttatcatagctgacatgtcagtaaggatcctgcatggtttactcgaaaacctacctgtcaggattggagctgtagagataccaagtgactttatagtcctggagatggatgaagagcccaagaatcctttgattctgggagacctttcttagcaattgtaggagctatgattgatgtcaagaaagggatgattgatctaaaccttggcaaagactttaggatgacctttgacgtcaaagacgaaatgaagaagcctaccatagaagggcaactcttttggattgaagaaattgatcagttagctgatgagttactggaagagcttgcaaaagaagatcatcttaacggtgctttaaccagaagtggtgaagatgggtttatgcatttgaaaactttgggataccataagctgttatactcccataaagcgatggaagaatcagaaccctttgaggaattgattggaccagcaacagaggtaatggtaatgagcgaagaagggtcaacacaagttcaacctccacactcgagaacatactcgaccaatcactcgaccttgactgtcagcgactctaggaactgatcatcccaacttcacataactggtctgaactcaaggcgcctaaggttgatctcaaaccacttcttaaaagtttaaggtacgcattccttggtccaaactctacttaccccgtgatcattaatgctgagttaaatgatgatgaagtgaacttgctattatctgaacttagaaagtataggagagcaattggttattcattatgtgacattaagggaatttcacctagtttatgcaatcataggatccaccttgaaaacgaatcctattctagcattgaaccaaagaggaggttaaatcctaacttgaaagaagtagtgaaaaaagaaattttgaaactgcttgatgctggtgtcatctaccctatctctgatagtatttgggtttctccaatgcattgcgtccctaaaaagggcggaatgaccgtcgttaaaaattaaaaggatgaactgatccctactagagctataactagtcatagagtgtgtattgattataggaagttaaatgctgcatctaagaaagatcattttcctttaccattcattgatcaaatgctagaacgcttagctaatcatccatactattgctttcttgatggatatagtggtttctttcaaataccaattcaccctactgatcaatagaaaactactttcacatgtccttatggaacttttgcttataagagaatgccatttggtttatgcaataatcctacaacatttcagaggtgtatgacctttatatttttagatttaatcgaggagatagtggaggtcttcatggacgatttttcggtctatggcccctctttctcctcatgtttgttgaatcttggcagggtattgaccaggtgcaaagagacaaatcttgttcacaattgggaaaagtgtcatttcatggtgaaggaaggcatagtgttagttcacaagatatcagagaagggtatagaggttgacaaaggaaaaattgaagtgatgttgtagttgcaggcaccaaaaacggtgaaggacatgagaagtttcctcggtcatgctgggttctacagaagatttattaaagacttctccaagatagccagaccgttaaccagactattgtgcaaggagaccgagtttgaatttgatgaggactgcctcaaatcctttcacaccatcaaggacgccagccggacgttggatgaagctcaaggaagatatgcaacaattgagaaggagcttctagttgttgtattcgcatttgagatgttcagaagctatttggttggatcaaaggtaactgtctatacagaccatgcagctttgaggcatctgtatgccaagaaggatactaaaccaagactgttaagatggatactcctgttgcaagagtttgacatggaaatagtagacaagaaaggcatctaaaatggtgcagctgaccatctgtcaaggatgagaatcgaagaacccattccgatagacgattcaatgctagaagagcagctcatggttgtagaattcttcggtaggagctacagcgggaaagagttccaccaactgaacgatgttgaaggaagatctccaaggtatgctgatcacgtcaattacttggcgtgcagagtagagcctcccaacctgaccagttatgaaaggaagaattttttccgagacatacaccattactactgggatgagccttatctttacactctctataaagataagatctacaggagatgcgtctcagaagatgaagtagaaggtatcctgctgcattgccatggctccacatatggtggtcacttcgcgacgttcaagaggaggaccacactcactcgatctagcagcaagagaggacgacttctgcagtcttgtagtttacgcgaccggggtgctggccgaagcagaagaagagaggtcgagtatcgtcaaagcggtgctggccgccacagagttgatgaggtcgagtacccacatgttggagctgacatagaacaaggcgaatcgtctatggcctgggagcaatcacaggtagccattgacgaccaactccgtttattcttcgactgaggtaagcgcctcatggataccctgaaatacttggattttcttattcattttaatcactcttgttaatccaagtagctgactctccttattagagcagttaacccaaacccaaacctaaactttctttcaagccttatatcacttgtgagtgtttgtgaggtcttattccgattaagtttagtagaaagtgtcaggtttgtaacgacagagatagtgtctcatgtagttctagtttacatttttcggactagataggactaggtgagcgcttatactttaagtggggatgtgtctaaaaaaaaaaaaaaaaaaaaaaagaggagttgattcattgataagaaaaggtaaaagactctaggtgaagtaagctaaaggagcagaaaaagtctagtaaagattttgggatttgtaaagaaaagagttcttgttagctaatgaagaagggtaaaagccctcagttttaaaattttaaaaacaggaaccttagttgtttaagaaatccaaatccgctagatgtatcaaagtgttgaggaaggttctcctagagtcaagagaaaagaaaagaataattagaaaaagggcttaaaagattcatgaatgcaaagggtatagttaagtttttatattgggagtggagatgggattaccattagagcttcattggttatactctgggtagatgggatcttatctctgtatgcatagcttgggacttacttttagcattctactaaagcttaatcattttttgagagatcccatgttactaaagcttattttgtaagggaccatctttgtctcttgacctttaccttagccaaatgagttcattgatgatgcattgcttgattcacgttccagaactaatgaatgttaaagggattggtagatttgaaaacatgtgtaggtcgaacataagagtcggattgattaataacaaggcatggctaacgtttttgagtacaattcgatcatatcccagcttagaactatcaacttggacattgatttcatttgatttatctggtgctttggctctgagtcctcgccttcaaacctcacctccagcttgttcttaattgtttgcttgagggcaagcaaagactaagtttggggagttgataagtgtgcattttacatgttttgagcatccatttgttatcactattgcatcatatcaccactgttttataccatttctcatcatttgtcatcactttgcatgtttaggatagttttgcatgcatgttgcatatttgtgttgctttcaggtgatttggagttgttgacgagctaattggaagaagcggacttgatcatatcaaaccactcgaccccctggtcgagtagatgcttcacgacctcaacagaccactcgaccccctagtcgagtagaatacctcatcactttacgtcaccactcgaccccatgatcgagtacccccacgacaaccactcgatcacatcactcgaccccctggtcaagtatcatcacctccaccacctgaccatcactcgatcacaccacatgaccacctggtcgagtaactccatcactttcactcgatcactctaccaccaagccgagtaccacgatctctagcactcgatttcatactcgacagccagcttcagagtcttctctattctgcactcaatcatcctgctattactttgttgttatcatgctttcattccattcaacgtttatgctttttgctatgatgtctgagtagtgaataggtttctgaggatgggttagagtagtttagaattcttagtatgctaagtggttgagtttgatttatagatctcttttggattagttgttcttaatgcctattgctttttgatcaactagaatttgagcccaaacatttccgcgcccaaaaggtgttcgatgaaatgtctaaaccattaattccagagatttgtggctttgtacaaaggtattggttgtagagagcgtttttgctttaacttgttgattcgtaatgcttgttaggttagctctcgtcaatggtgattaagtctgggagtagtttaacttgagggtctctgttgcggtggcacttagattttgttaccgaacttgttgtctagggataatttattgagcatgtcaatcacctgtaaactgaggaaacgaaactactcaattaccccatcctcggaaattctttatctaattgatttctttgtttactctactattgtttactgcatcttgttacctgttgcttagtttttgcatttctctccttttactcgaccacccagttgtctggcaacagactgtgcactcgagtatctttgttactgtctttgctatttacgacctgtcactcgaccacacccagtgcttggcaacaagctttcttggtcgagtgttttgatttatctgtttgaatttctgttttctgcctgttcacttaggactgctagaacacccgaaaacctgttattgcttggcttgactctgtaaactctgattgcatcttgattgttagcatcacacccatttggattgtcaacctaaaatactacaacgacatgattggtgttttaggataattgactaaaaacctattatcacggaacaccaccggttatttcataattagagtttgagtttaagaatgtttcgttaacaacctaactattattagatctacgaaccaataatttccttagaataccctaagcctgacgtttttactttcttgtcttaccacctcacaatctgctattgcttccttttgtttctttttattttcattactatcttacttagcttaattcaaaaccttggtctattgtgtgatccgagagctttgtggaattcgacccttatgtgctacaatcaatctcttatttgagacagtggtcttaaggcaatttgacctatatcaaatttggcaccgttgccggggatcgacccgggtcacccgcgtgacaggcgggaatacttaccacttagtacaacgacccaatatagtggtaagtattctcgcatgtcactcgggttcgatccccggcaacggcgccaaatttgatatagctcaaatcgccttaagctt

SEQ ID NO: 192 - DNA, 117728 bp, Arabidopsis thaliana
gaattctttctgttagtagctttggccatggaaatcaatagataagaggttgaggcgctgcagcaggtagtggcggttgggaagggcggagaccggcggcggtggagaaggtccggcggtggtgagcagcggcggaggaggaaggtggaggaacactcttccttgccttctttttctgcccagtcatgttgcagatcgatgaaatagatacttggggaagaaagaggatgaaattctaatgagattagagcctaaaatcacaagaacctgtgaacaatctagagagaaaagagtgatttcggcgttttgaataaaaactgaaatgaagaagatgaagtttaggtgaaatcgacttaccttgaaaatgagagtgtcgatcaacaccatcgcgtttcgtcgacacgatgttttttctttttttcaaatgagcatccatttgttatcactattgcatcatatcaccacagttttataccatttctcatcatttgtcatcactttgcatgtttaggatagttttgcatgcatgttgcatatttgtgttgttttcatctgatttagagctattgacgacctaattagaagaagcgaacctgatcatatcaaaccactcgaccccctggtcgagtagatgtttcacgacttcaacagaccactcgaccccctggtcgagtagaagacctcatcacttcacgtcactactcgaccccatgatcgggtaccaccaaaacaaccactcaatcacatcactcgaccccctggtcgagtatcatcacctccaccacctgaccatcactcgatcacatcactcgaccacctggtcgagtaactctatcaccttcactcgatcactctaccaccaagtcgagtaccaccatctctatcgctccccttcatactcgactgccagcttcggagtcttctatattctgcattcaactagacactcgagcaaaaggaagaaaagaagactccagcttaccactcgaccatgcactcgaccacttgggtcgagtaccgttcttaatccgtcccaatactgcgtcgttttgagtattagggttattttgctataagtagcatgtactttacatttttgttatctaatttttatcccgcagacactgtgttcttgacgtttttgtaatccggatttctctttatctattcagtattcagtatttgtttttcatttcgcttactaagttgttcatcctgttatcatcctgctattactctgttgttataatgttttcattccattcaacgtttatgctttcttcagtgatgtttgagtagtgaataggtttctaaggatgggttagagtagtttagaattcttagtatgttaggtggttgagtttgatttatagatcccttatggattagttgttcttaatgcctattgctttctgatgaactggaatttgagtccaaacatttccgcgcccaaaaggtgttcgatgaaatgtctgaaccactaattctagagatttgtggctctgtaccaaggtattggttgcagggagcattttggctttaatttgttgattcgtaatgcttgttaggttggctctcgtcaatggtgattgagtcagggactagtttaacttgagtgtctttgttgcggtggcacttagatttggttaacgaacttgttgtctaggataatttattgagcatgttaatcacctgtaaactgagtaaacaaaactactcaattaccccatcctcgggaattctttatctaattgatttctttatttactctgctattgtttactgcatcttgttacttgttgcttagtttttacatttctctcctgttactcgaccagatactcgaccacctagttgtcgggcaacagactgtgtagtcgagtatctttgtcagtgtctttgctgtttactcgacctgtcactcgaccacacccagtgcttggcagcaagctgtgttggtcgagttttttgatttatctgtttgaatttatgtttcctgcatgttcacttaggactactagaacacccgaaaacctgttattgcttggcttgactctgtgaactctgattgcatcttgattcttagcatcacacccatttggattgacaacctaaaatactacaacgacatgattggtgttttaggataattgactaaaaaacaattatcaatttggcgatgttgccaattgggtgtttgtttgttacatttgagatttcagacttgtttagatcaagttctttttcaattttcatttcgattactaactgtgtgtttttattgttgtcttcttaatccaggtacacctctactttatgcaaactcgatcaacaggcaaccagattctcctttacaacgatagcatcgaccgcatagctcgtgaactcaaagaaaggagaaacacaatcaaacttgtacctcagcaaccattcgatatggctgacgaacaaaatcaacagaatggccctacaaacattggtgctggagatgcaccaagggaccaccgtcaaaggaaaggaattgcacctcctgctatccagaacaacaacttcgagatcaagagtggtctcatctagatgattcagggaaacaaattccatggtctgccaatggaggatccactcgaccacttggatgaatttgatatgctctgtaacctaacaaaattcaatggtgtcagtgaagacgaattcaagctccagttgttccattctcttttggagacaaagcacacatctgggagaagaatctgccccatgactcaatcaccacctaggatgattgcaagaatgcttttctagcaaagtttttctccaacgccagaactgcaagactcagaaatgagatttctggtttttcacagaagactagtgaaagcttctatgaagcatgggagcgcttcaagggttacaccaaccaattccctcatcatggtttcacgaaagcctctctgctcagcactctatacagaggagttttaccacgcatcagaatgcttctggataccgccagcaatgggaatttccagaacaaagatgttgaagaaggctggaaattggttgagaacctagctcaatcagatggtaattacaacgaggactgcgacaagaccatcagaggcacaaccgactctgatgacaaacacaggaaggagatcaaagcgctgaatgccaagctggacatgattcttcttagccagcagaagcatgtgcacttccttgttaaggacgaggattatcaagtccaatatggggagggaaagcagttagaagaagttagctacatcaacaatcaaggtggcgacaaagggtataacaacttcaagaccaacaaccccaacctctcttaccgcagcaccaacgtgtctaacccacagaaccaagtgtatccaccacagcaacaacaaggtcagaacaaaccttttgtttactacaattaatgttttgttcccaagcagcaatttcaagggaactaccagcagcaaccaccacctgggtttgcacctcagcaacaccaaagtccttctgctcctgacgctgatatgaaacaaatgctacaacagctgcttcatggacaaccatctggctccatggagatggccaagaagatatctgagttacacaataagctggactgtagctagaatgatctaaatgtcaaagtggaatcactaaataccaaagtccgttacttggagggacattctgcatctacttccgctcaaaaacagataagccaacttctaggaaaagcaattcagaatccaaacgaatatgctcatgatatcactctgcgcagtggaaaagcacttccaaccagggaggaacctaaaacagtcaatgaggacagtgtagatcaaaatggggaggatttcagtctcagtgaagatcaagctgacaaacaactcgagcagtcacccgaccatgttactcgaccaccattcccagaaacatcaccaattgctctgaaacatgttgctgtcaagaaccaagaaaaggtctttgttcctcctccttacaaaccccagcttccattttcgggctgtcacaaaaaagcattgacagataagtatagagctatgtttgcaaagaatatcaagaaggttgagttgcggatacctcttgttaacgctctagcactaatcccagattctcacaagtttctgaaagacttgatcgtagaaagaattcaagaagtgcaagggatggtagtattgagtcatgaatgcagtgctgtcatacagaagaagatcattcctaagaagcttagtgatcctggttcattcactctaccatgctctttaggtccattggctttcaacagatgcttatgtgatttaggagcgtcggtcagtctcatgccactctctgttgccaaaagattggggttcactcaatacaaatcctgcaacatatcccttatcatagctgacatgtcagtaaggatcctgcatggtttactcgaaaacctacctgtcaggattggagctgtagagataccaagtgactttatagtcctggagatggatgaagagcccaagaatcctttgattctgggagacctttcttagcaattgtaggagctatgattgatgtcaagaaagggatgattgatctaaaccttggcaaagactttaggatgacctttgacgtcaaagacgaaatgaagaagcctaccatagaagggcaactcttttggattgaagaaattgatcagttagctgatgagttactggaagagcttgcaaaagaagatcatcttaacggtgctttaaccagaagtggtgaagatgggtttatgcatttgaaaactttgggataccataagctgttatactcccataaagcgatggaagaatcagaaccctttgaggaattgattggaccagcaacagaggtaatggtaatgagcgaagaagggtcaacacaagttcaacctccacactcgagaacatactcgaccaatcactcgaccttgactgtcagcgactctaggaactgatcatcccaacttcacataactggtctgaactcaaggcgcctaaggttgatctcaaaccacttcttaaaagtttaaggtacgcattccttggtccaaactctacttaccccgtgatcattaatgctgagttaaatgatgatgaagtgaacttgctattatctgaacttagaaagtataggagagcaattggttattcattatgtgacattaagggaatttcacctagtttatgcaatcataggatccaccttgaaaacgaatcctattctagcattgaaccaaagaggaggttaaatcctaacttgaaagaagtagtgaaaaaagaaattttgaaactgcttgatgctggtgtcatctaccctatctctgatagtatttgggtttctccaatgcattgcgtccctaaaaagggcggaatgaccgtcgttaaaaattaaaaggatgaactgatccctactagagctataactagtcatagagtgtgtattgattataggaagttaaatgctgcatctaagaaagatcattttcctttaccattcattgatcaaatgctagaacgcttagctaatcatccatactattgctttcttgatggatatagtggtttctttcaaataccaattcaccctactgatcaatagaaaactactttcacatgtccttatggaacttttgcttataagagaatgccatttggtttatgcaataatcctacaacatttcagaggtgtatgacctttatatttttagatttaatcgaggagatagtggaggtcttcatggacgatttttcggtctatggcccctctttctcctcatgtttgttgaatcttggcagggtattgaccaggtgcaaagagacaaatcttgttcacaattgggaaaagtgtcatttcatggtgaaggaaggcatagtgttagttcacaagatatcagagaagggtatagaggttgacaaaggaaaaattgaagtgatgttgtagttgcaggcaccaaaaacggtgaaggacatgagaagtttcctcggtcatgctgggttctacagaagatttattaaagacttctccaagatagccagaccgttaaccagactattgtgcaaggagaccgagtttgaatttgatgaggactgcctcaaatcctttcacaccatcaaggacgccagccggacgttggatgaagctcaaggaagatatgcaacaattgagaaggagcttctagttgttgtattcgcatttgagatgttcagaagctatttggttggatcaaaggtaactgtctatacagaccatgcagctttgaggcatctgtatgccaagaaggatactaaaccaagactgttaagatggatactcctgttgcaagagtttgacatggaaatagtagacaagaaaggcatctaaaatggtgcagctgaccatctgtcaaggatgagaatcgaagaacccattccgatagacgattcaatgctagaagagcagctcatggttgtagaattcttcggtaggagctacagcgggaaagagttccaccaactgaacgatgttgaaggaagatctccaaggtatgctgatcacgtcaattacttggcgtgcagagtagagcctcccaacctgaccagttatgaaaggaagaattttttccgagacatacaccattactactgggatgagccttatctttacactctctataaagataagatctacaggagatgcgtctcagaagatgaagtagaaggtatcctgctgcattgccatggctccacatatggtggtcacttcgcgacgttcaagaggaggaccacactcactcgatctagcagcaagagaggacgacttctgcagtcttgtagtttacgcgaccggggtgctggccgaagcagaagaagagaggtcgagtatcgtcaaagcggtgctggccgccacagagttgatgaggtcgagtacccacatgttggagctgacatagaacaaggcgaatcgtctatggcctgggagcaatcacaggtagccattgacgaccaactccgtttattcttcgactgaggtaagcgcctcatggataccctgaaatacttggattttcttattcattttaatcactcttgttaatccaagtagctgactctccttattagagcagttaacccaaacccaaacctaaactttctttcaagccttatatcacttgtgagtgtttgtgaggtcttattccgattaagtttagtagaaagtgtcaggtttgtaacgacagagatagtgtctcatgtagttctagtttacatttttcggactagataggactaggtgagcgcttatactttaagtggggatgtgtctaaaaaaaaaaaaaaaaaaaaaaagaggagttgattcattgataagaaaaggtaaaagactctaggtgaagtaagctaaaggagcagaaaaagtctagtaaagattttgggatttgtaaagaaaagagttcttgttagctaatgaagaagggtaaaagccctcagttttaaaattttaaaaacaggaaccttagttgtttaagaaatccaaatccgctagatgtatcaaagtgttgaggaaggttctcctagagtcaagagaaaagaaaagaataattagaaaaagggcttaaaagattcatgaatgcaaagggtatagttaagtttttatattgggagtggagatgggattaccattagagcttcattggttatactctgggtagatgggatcttatctctgtatgcatagcttgggacttacttttagcattctactaaagcttaatcattttttgagagatcccatgttactaaagcttattttgtaagggaccatctttgtctcttgacctttaccttagccaaatgagttcattgatgatgcattgcttgattcacgttccagaactaatgaatgttaaagggattggtagatttgaaaacatgtgtaggtcgaacataagagtcggattgattaataacaaggcatggctaacgtttttgagtacaattcgatcatatcccagcttagaactatcaacttggacattgatttcatttgatttatctggtgctttggctctgagtcctcgccttcaaacctcacctccagcttgttcttaattgtttgcttgagggcaagcaaagactaagtttggggagttgataagtgtgcattttacatgttttgagcatccatttgttatcactattgcatcatatcaccactgttttataccatttctcatcatttgtcatcactttgcatgtttaggatagttttgcatgcatgttgcatatttgtgttgctttcaggtgatttggagttgttgacgagctaattggaagaagcggacttgatcatatcaaaccactcgaccccctggtcgagtagatgcttcacgacctcaacagaccactcgaccccctagtcgagtagaatacctcatcactttacgtcaccactcgaccccatgatcgagtacccccacgacaaccactcgatcacatcactcgaccccctggtcaagtatcatcacctccaccacctgaccatcactcgatcacaccacatgaccacctggtcgagtaactccatcactttcactcgatcactctaccaccaagccgagtaccacgatctctagcactcgatttcatactcgacagccagcttcagagtcttctctattctgcactcaatcatcctgctattactttgttgttatcatgctttcattccattcaacgtttatgctttttgctatgatgtctgagtagtgaataggtttctgaggatgggttagagtagtttagaattcttagtatgctaagtggttgagtttgatttatagatctcttttggattagttgttcttaatgcctattgctttttgatcaactagaatttgagcccaaacatttccgcgcccaaaaggtgttcgatgaaatgtctaaaccattaattccagagatttgtggctttgtacaaaggtattggttgtagagagcgtttttgctttaacttgttgattcgtaatgcttgttaggttagctctcgtcaatggtgattaagtctgggagtagtttaacttgagggtctctgttgcggtggcacttagattttgttaccgaacttgttgtctagggataatttattgagcatgtcaatcacctgtaaactgaggaaacgaaactactcaattaccccatcctcggaaattctttatctaattgatttctttgtttactctactattgtttactgcatcttgttacctgttgcttagtttttgcatttctctccttttactcgaccacccagttgtctggcaacagactgtgcactcgagtatctttgttactgtctttgctatttacgacctgtcactcgaccacacccagtgcttggcaacaagctttcttggtcgagtgttttgatttatctgtttgaatttctgttttctgcctgttcacttaggactgctagaacacccgaaaacctgttattgcttggcttgactctgtaaactctgattgcatcttgattgttagcatcacacccatttggattgtcaacctaaaatactacaacgacatgattggtgttttaggataattgactaaaaacctattatcacggaacaccaccggttatttcataattagagtttgagtttaagaatgtttcgttaacaacctaactattattagatctacgaaccaataatttccttagaataccctaagcctgacgtttttactttcttgtcttaccacctcacaatctgctattgcttccttttgtttctttttattttcattactatcttacttagcttaattcaaaaccttggtctattgtgtgatccgagagctttgtggaattcgacccttatgtgctacaatcaatctcttatttgagacagtggtcttaaggcaatttgacctatatcaaatttggcaccgttgccggggatcgacccgggtcacccgcgtgacaggcgggaatacttaccacttagtacaacgacccaatatagtggtaagtattctcgcatgtcactcgggttcgatccccggcaacggcgccaaatttgatatagctcaaatcgccttaagcttactccctcaaataagagttgtcgttagcacttaagtgtcgaattccactgagctctcgatgttcacacaatagaattatgatgttattaaataatctagacaaagtaattgaatgtaaaagacaaataaccaagtaaacgaagtgtagattcaagtgattaaagcgtcgggtctaaggaattgtctcgggagatagataaattgtagatctagctaatataaggattgttatggcaccgttctcaaactcaaactaagattctagagtaaccggtgatgttccacaaaactctctttacttagagctaagataaccggagaaaccgagaaatcttatactaaagcatgcattgttatcaagcttgattagttcacctagtatctaaaccagagcccttctatgagcctacatgttctttcttaaatgcctaaactcatctatgatagttcaaacaacaagtacctatggtgggcatacctattatctaatatcacgttctaggtgatcaatctaaaactagcaataagaataatcaagatgaagaactataagaataatcttaaggggttttcgatctactaatccatctaaatccctattgagactccctaaacccaacaaggtgattactcagatatgataacagaaacacaaatcataatctgactagtttgcattgatgaattagaaatagagtaaaaggagtccagaatcctctctacagggattggattcttctctccaaaatgtatctcaatctctgaaaaaacaaaacttaggtctaacaatgaccaaataattaggcatattcgtgtctaaaaaaagtgcaaggactactttgcaaataaggaaaactctagggcttctcaaagacttggcagaaaacaggaattccctcagtcgaaataagggtttcaatcgacataggtatggtgtcgatcgacaccaacttctgaaaaacgtctttgataatcttcattgctgaaaagctttcaaaattccttattatgcttcatagctcccagatgtgtaagtgtacttgaaatgactcaaaacatacgaaaaagactctaaaacccattatgaaactatgttaaatatcagtaaaaaccaagatatatacggggttattatctacacgtgtgtcaaaatgatcaatagaatcagaactatggtaaatcctttcttcacctgaaaagagtagtagttcactgtcatatacacttataagtagcaggtgataaagttatatgtatacttttgagtaatatcaaaagttaattcactaacctgttagcttggaaagcatatgatcgttaattgagttaacatcgtcattggtgggacacaaaatacctctatcttggaaaaacgttggatctctctcttgagcaaaggttgtaccatagactgcttgaatgattaattctatagggttgtctccttcagaaatacgattatcatctggtatttgtatctgagttactccgtcgttcggctcatttagttttccctcgccaactgcaaggatccatttcaaaaattcttcaatctcacgtgcctcatttatgtctatatcttggagaagcctcatgttcttcgtcaactttaaaactttgcaatgctgctaaagataagacgaattgagtgacgatttgacaatcagttccctaccggctgcagggatgacaggaagaatttgcctaaaatcacctctgaaaagaataacttttccaccaaacggcttatcttctggagtcgatagaatatcttttaaactcttatctaatgactcaaaacagtacttactcatcataggagcttcatcccaaatgatcaacttagttgctgttactaattcaacaagattagtaccacgttctatgttgcatgttgaggtctcatgaggagttagaggaataccaaacctagaatgtgcagttcggccaccttctaataacagagatgcaatgccgcttgatgcaacatttaaacaaatatctcctttagatcttatcgctacggatagaaccttctacaaaaaggtttttcatgttcctccaaaaccatataagaacaaaacacctcctttgtcattaaggacaacatccattatttcatcatataccttcttctattccgcagttaacatctttaaccaattatcatgttttgttttcaatgactcacggttgtagttgcgttcatcgaggatcaactgattaaaggcaggttcatcgccaggttcaagctgaggcaacatcttatacctccaaagatttgttccatgctttttcaatattgtttgcaactcttgtaaacataactgaatcctgtcttcgtccgacaatatgtattctacatataaattaatattagattgaatgtactaaactatttataaaaacatctataaaattgtatatttaattaaaaataataatttaactaacatggttgtctaactgatttccaagtgtgttcccatacagacagtatcttctaagtgtgttcccacacaacggctggggaacacaagtttcggaaataagcataataacaaacaacttgcgaacatacttaggagaacaccaaaaattagccttctcaataccgtggatatattccttatcatcatcaagcaaacctagagtatagcatgaatctctgtatgattcatgaacaacaccctcgacggttttgatatcatcaaatcgttttggaccatttttgttgttaatcaggatgcgaaggtgatatgcatcatctatctttggaggtacatgatttattctaccaacagcaaaacctggcatttttcttctgtgaaactccttatctttaccattccacgtatagaaattaggtatttgttcatataaaagttttgctgcttccagatcacgcttattaagctcgaaccttgcggtaaattgagtctcatcattattcactctatacaaaacatattcagcagtctcaccttccttgacataaacgggttacttgcttttctcatggaatgtaagtttaaatactgatgtttgtcgataatgtataggataccctctaatcttccacatcgcttcacatgcagatacgtatctgtaaaacggtatttgagttatttttcattaagtttcatatttaaaatagtctcctaagaatgtttacaataaactgaaataaaataatgaaaaatacctgcaatcaaaataatcctgaacttgatttcgttcttgtggatctttatttgtttctcctacattgtttttctcggtgacatcttcttttcgatgaggctcgacagagacggttacacgatcaggtccctcgttaacatatttgaataagtatttaacagagacgtttggttacaccactctacattgatgtgagccctgtatttccgtaacaggacatcgttgtatggaacaacataccggttgtcacattgatacttattcttctcgatgaaaagaccagtatctatgcgtctatatattggataaccttcattgtcaagagacgtgttctcaacattgttctttggataaaacttggaatatttaccattttccatgcatggcaaattaggattaaccaatccgcatggttcatgaatcatacattccgacacaacttgatatagctctggatctttttctttatctggaatttcggcaaagataatctttttaacgtcatcagcggtaggaaacttgtatctaggatccattcaaaaaattatgtgagcatgtggaagacctctctactgtatacatctgtttcaacataccaattatgagttaatgtcacttgcaaattaaaattcatgaaatatatgttttgaaaatatgaaatcatttagtacctgatttggtttttccaaagatatgattctttgttagatcatccatcaagttgtcgagtttgattttataaatcctgcaaatgatatccagcctgtcctcagaattcaaattccgttctttaacaaatcttgtgatctctggccacttaggattacatgtgaaggttataaacaagtcgggaaagccaaaatttttataggtcgccattgcatctaagtagttctgctgcatataagctggaccaccagagaaagatggaggaatgatacaactttttcctttattagaaagatcattatttccggcatcagaagcatcttgaactgcctgcttgttggtactgcgcaacttcgtttgatttttttttatataccttaaccgattagactctatcatggtaaaagcgtcaaccatgaattgttgaagtaaacgctttgagcgaaggaggatgtgcttctcatcttttctcgcttgtaaacggtagtcaaaccactgcctcatactaacatcttcctgcttcttctttccttttgttattttggtaggagttttttttattccaagcctataaccatcctctccttttggaaataacaatggatactaaaaagctagatatgaaacgtgacattcaagtattctccttaactttccagacttcatctgtaggactatatctcttgtatctagattgtcgtcaaaatctccaggtatcaatgcagcaacttcagctacagatggaaggttatacactctcccatctttgtcgcgcttagatataatcttcatatgaaaatttgtctcttctctctttatgttgaatctatcacgggcaatcctaaatgcaccaacatgagggtttatcttgtttaacatttttagtaaagctgcaactattcttgaacttttgtttaccaccttctgtcccaccattattacctttgctgcaattttggataataacaaaagacaaataataaacaaaatgtattaactggtacaaaatataaatttttcataaagctcaattgaagttaacacttacctcataacttcaattcgattatcaacttcattcttagtgtccatgatataaagctgttggaattttgcatatacgccaggttttggtttcaacgcgcctatcaagtgattgttttctctttgtaaaacaaacatagatggaccacgtctcttttttactgatcgatctaccttgccaccaatagatgtgaatgaaaacaacatgttgtatggtctgatatttgctctaaacaatttagcatcttcatggtcgcttgtaagcaaccaccacatatatttaggtgattcttttaacataagtagaacaatctgtccttgcatacaacatcctgtaaaacctggattagcactcctccttcttctatttagtcctcactgtaccagaaaattacaccacaatgtagacatgtgtgattcgcatcaccttcgttatgataacctgaatcgaaaaaacatcaataacaaatatgttatataagtttttccttgtttctaatatatataatatattaacaaatcatctttgtttgaagctgcaacaccaaactccttgtttaaattccttattaacaaatctttcatgtcgatcatatattttggtccaacaacctgatcgctcggtaaatctttatccgactcatactcttcttactactacagtcaaatatatgatcatcaaattcttctgacctatctgtagacaggagatgaaatgaaagtagaaaaaaataaagcaattttacactgtttatataaaggtagctatttttaaaagtatgattaacattataccattattagaatatattgcttcagaatgatcaatttcttcatcattgagcgtattggcacgtacaatacttgtagaattttcctttgattatgtttttgttgaaagtgggactcctaacaatcaacaaacaaaaaatattaaattttttatggaagtaataatataatttctgttaaactattgaaaattaggcaaacatagtaaaacataatataaatagctaattttcaaatatgaatcgaacgttgcccatttgatacttttttcttcttattcgacattaatcaaatggtatagaacttggatcctctcctagaacctcccgatatatttgttatatcctataagacatttccagagtcatctaccccaatcaatatatttaagtttggggtagtttgattaggagttaagaagtctggtgatcttactgagaaaaacaacaatcaaatgaagataaataaaaatattaactaaaatgtattgtatctaatacatataactttataacctgatgagattgatctttttctggccattcttttaacagcagacaaccttcgaacatgtgttttgttaacaatatcataattgttcgttgcttcatcattggtcttctctcgaagtaatgatgatattcttttagtattggataaatttcctgcaaagaaaatataaatatcaacacataacatataaaaaataatttttttatatttaaaatttagatgataatattgtatatcgaataatatataagttactaacctgatttcctatttttgcggcagctcttgtaaaagttggattaatcacttctgagctattagatcgattgactatatttcctcttgtgtttggtatattataaattactctgtctcatttggagttcaaacatatatgaatcaaaataaagtcgaaagaagtaatgatgaggatatatgagcatactacctgtaagagttgaattcatcgaattaataggggtaatgggtgaggaactcccattattatttcccgagtataagggtaaggacacatgagtatgaggagtctgactcctttttgtaagatcgatccaaatgttttattatgcgaaggaaagttggttttatcgaacaaacgtcttgttcgttttgaagttttctgattttttttgttgttgatctacatcattttcatcattatcctttcttttcttcattgtaatcgacgaataaaaacaaagaatattgatttggtttcagtagaaaggctaaatgtttcagaaaccaaataaaatgataaacataacaatgctaaaaattaggaaacaatatatatgaaaatgtattgttaacaaaaatatctataatataattctatatggcacaacatacgaaatgtatattctagtttagtttatctactctattattatgcaaattgtaacacaacttatgagatgcttgattaagaaactcatcgttgaaataattgatgtttccaacttagaagattctctaacgttttaatgacatatttcgttggacaaatattttaataaattctaagttttgcatatttattttctttgtttaatacattcatatctaacacatattttagtttacatttgatttcaaaagttccatttcaaatacattattttaaaatcaaaaaaatatctaaataatttaaatccaaataacctaataagtggccaatatcaaaaaaaagttataattttatctaagattacggaactccagctgatttagtaagcattaactaaaacgaagcataatcaaaattaatgtttaacaaaaataatgcataggaaatgaaaaaaaaacatatacaaagtcttaatagtacctgttttaaatataatagagaagattttataaaaacgatggaaacaagtctggtattgatgttttccgttctcatcaacaacttcacctatttcagctcgttgcattcgttcaaggaattgagtcctgaaacagtagcaaaaaaagaaggaaataaatagccaagaataaaattatttataatacactaaacagttaagagataatgaaaatataaacgttcttacgtgatgcgatccatgttaatctctgggtaactttaattgaatgtaattcttgaagcaccattatgtgtgattagacattgacgacctaaaatatttatgtttttattatatgcattagctataaaaaaaacatatgatgagaagagagttaaatttaccttcatgatcagcaacgttccaaaatcgaagcacgcatgttataggattcataccgaaggtccactgataaccaaggtgtagaccaagttccctccacaaacgcacaaacaaatcacaagtatatccacttgcaacacatgtaagagtttttcccctaataagaatatcttaattatttctctctaacatctaagttctataaattaagccacctataaagataacaatgcttactatgtttctacattaaaatatataaccaaaaatatgtcgaactatatagtcggaaatactaaccaagtatttttaagctcaaactcgagaaattgagaaagtcgaggttttcggaatattgaggaacataatctggtcttgttatattcccaactcgcacgacaacaccataagcatctacaaaacattttcagaaatttgagagaggtatgatattcctttgtaataaccacctctatcatctctcaacatgtttttattttttttcaagttaataggtcagaagaaagatgaagaaggtaagtaatggatataaagaagggaggaggttactttttttttatgggttaggatatgtgtaggcgtatagcttagaatattttagtgtatattacttttacaaaataatttaaattattacaataatttatatgccatacaaatcttgtcagtcgaatttggaatatcgatggtaagttataatgctttttatggttacttgcaaaaagtaattaattttgaaaggaacaaaatatgacataagttgtcatatctcttggatgagttgtcaaattttgttaaagttgtcaacaatatatttcattgagacaggaagatatgtaaataaattgaattcaatataaaagtcaatatttttatctactcaattaaagaacagaattattccacaaaatatgtataaaagcacaatataattataatagaccgaaatcttatatatatatattacattaaataaaggttaaattttaacagttatatatgtattgttattttttaagtcataaaagtaatgatgtgactttgatatgtatccaaaaagaaactttaaaaggtgtgcatagatttccaaaaagaaaattcttttaatataatagaaaggatattgaaagataatgcttgtgtagggttttaaatctaaagagtccaaatatatatgattatgttttgtaaaagacaatgacattgagttgaaaagaaatgaacttaatatttaaagatccttgataataggtttttggtcaattatcctaaaacaccaatcatgtcgttgtagtatttttggttgtcaatccaaatgggtgtgatgctaacaatcaagatgtgatcagaagtcactaagtcaagccaaacaataacaggttttggtgtgttttagcagttctaagtgaacatgcagaaaacagaaaatcaaacagaaacagtaaaacactcgaccaacacagctctttgcagagcattgggtgaggtcgagtgacaggtcgagtaacagacaaaaaataaaacagggatactcgactgcacagtctgttgccagacaactgggtggtcgagtatcaggtcgtgtaacagtaaagaaatgtagaaattaaacaacagatgacaagatgcagtaaacaacagtagagtaaacaaagaattcaatcagataaagaattcccgaggatggggtaatcgagtagcttcgttttctaagtttacaggtgattgacatgctcaataaattaaccctagacaacaagttcattaaccaaatctaagtgccaccgcaacagagaccctcaagttaacctagtcccagactcaatcaccattgacgagagctacctaacaggcatgacgaatcaacaagttaaagccaaaacgctccctgcaaccaataccttggtacagggtcacgaatctctggaattagtggttcagacatttcatcgaataccttttgggagcataaaatgtctgggctcaaattccagttgatcagaaagcaataggcattaagaacaactaatccagaagggatctatcaatcaatactcaatcacctagcatactcagaattctacactactctaacccatcctcagaaatctattcactactcaaacatcataacagaaagcataaacgttgaacaagttgaaaacatgataacaacagtgtaacaacaggatgataacagaatgaacaacagtaaacgaaatcaagacaaaagctgaatactgaatactgaatagataaagagaaatccggattacaaaaagactagaacacaaggtctgcggaataaaactaggtaaaaacttctttttgcgaaaatgtgaagtacatgctacttatagccaaatatcccgaaaccctaatactcaaaacgacgaagtattgggacggataaagaactgtactcgacccatgtggtcgagtgggaggtcgagtgagtagctggagtcttctttcctttcctgtgctcgagtgtctggttgagtgcggaatgaagaaggctctgaagcttgtcatctagtatgcagtcgagtggtgtgatggtgatactcgacttccaagtagagcaatgaggtcgagtagtggtctggcaatgaaggtgaagacactcgacctcgtggtcgagtgaagtgatcaagtgtttgtcaggagatactcgacttccaggttgattgacgaggtcgagtggttgtctgatgatggaggtgaagacactcgacctcatggtcgagtgatgtgatcgagtgatggagatgagggcactcgacctcgtggtcgagtggtgaagtgaagtggtgatgtcctctactcgacctgggggtcgagtggtctcttgagatcttgaagctcctactcgacctctgggtcgagtggtttatcatgatcagatccgcttcttccagatagctcgtcaacagctccaaatcacctgaaatcaacgcaaatatgcaacatgcatgcaaaactatcctaaacatgcaaagttatgacaaatgatgtgaaatggtataatcagtgatgatatgatgctaaagtgatgacaaatggatgctcaaaacatgcaaaatacacatttatcaactcccccaaacttagtctttgcttgccctcaagcaaacaatcaagaacaagctggaagtaaggtttgaaagcggggattcagagccaaagaaccagatagaccagatgaaatcaatgtccaagttgaaagttctaagctgcaagatcaaattctacttaaagacgttagccatgcctcattatcaatcaatccgactcatatgctcgacccacacatgttttcaaatctaccaatccctttaacattcattagttctggaacgtgaatcaaacaatgcatcatcaatgaactcatttggctaaggtaaaaggtcaagagacaaagatggtcccttacagaataggcttcagtaacaggggatctctcaaaaaatgattaagctttaatagaatgctaaaggtaagtcccaagctatgcatactgagataagatcccatctacacagagtatatcaaatgaagctctaatggtaattgttgattctgtaatcaaacaatgaatttgtactaagggatttagacaaattcactcctctcttagctcacaaataatcaaaggaaaagaactaagttgcttgaacaaaaagctagggtttgctctgtaatagtagtctcttgtattaggttaaaaatggtctcaatggggggtttgacccctctatttatacaatgggtcgaatataccaaaatatgataaacttctaattatcctaggtctaaatcttcattacttctattcttcataagatcctcttctcttaaatggaagttttccctttacacgacctaagaagttggttatggcgatcttgattgtcgacttaagtcttcgggcgagctcatgacttaggcccattaacaggctaaccgggataccccggttcaatcgacttctcgattttattcacattattcctcggtttaaattggtattgtcggaggtgctaattcctgcaccaacaattagtccccccccagtccggagaatccgagttgcctaattcgaaatttccgaacttagaaattgaatatttgatttaaatcttggaagacgtgaattaatcattagatctccgaatcgattcgtatttcgaacgtatttgacacgtgtcaaatcgtcgcatctgtacgcgcgcgtgaagctcaagaaccgaagcgtcccgtaggtttaatgatgacctcgtaggcttgccgcccattcgtctctatttatattcgaccaaaccctcgggaaatcattttctgccgcttgcaagaagaatcaaaggtagctttcgctctctcctctacgaattattttgtattctcgattctttatcgatttttccggcaatgggtaaggctgttcttgtttctccgtcctcttcttcctccgagagcgaagcgtcgttagttcgccgaaactctcggttaaccgggaatccaagtgacgaagctcaatctagtcgatcgaatcggatcgaaattccgacgttgcttgatgagccagatcgggaaggttccggtggacatcccgctgctcctgaagattcggtggattttttagctcagttcgacccactcatcgacctggaggatgcttacaacacgcatccgcagtatacagaggctgaagttaatgcgagattacttcatgaggattatgtcgaatttgacctcgacccaattgttcattggaacaccgagatcaccgtaaaaaagaccctttcaacaaccgagtcagtcgcggaagtatttaccttgtgcggctccggagatcgcccactcacttacatgattctcggagaagatgagcgtccttggaatccccctcgaggatatgtctgtatgtatgaagcctacttcagacagtgtcatctttggtttcccattccgtctctgatcatctcctttctaaatcgccgtcgtatggcgttctcccagctcactccggtggcgatctgcaatttcgttgttgctctgaccttcggcgctgaagaaggttatctggtaaacgttcgttgtttcgaggaaatgacaacgttgaaagctatcaggtcgcctggctattgggtggtgaataaccgcccaaagtacaactttcttcccggtcccaaagtcagtaatttcaagaactgggaagaatattacttctacatcagggtcgacctcgagtcgtatgagcgtccgttctcgtggaggaaaaggatgtggacggagtttcctggtagacttcttttaaatagatagggtaaagacatgtcgatcccgattagattctcatagccttttcttttgttgcagatcggtacaggcctagcccggagtttcccatggagttcgagggagttttagaggcaatcttccaagctcaacgtcgtgcgtggaaagacatcacgaggtcgcgcgtcaacaggataaaggggaaggtcaggaagccctttattagctttgctgccgggcttttgaatatgccgcctcctcagctcccatcgaagaggagactcatcctctagacggagaggcggctacgtcgaatcctcccgttagtgctggcccttccggtgttgatcaggtctcccatgagacggtcaatccagattctcaagataggacgcgtcttgaaggggccgacgtcgttccagctcaagagatcgccgagtgcgatcaaagtcaatccgttcaggtcgtcgagcctgaaattcaaaatgttaccagcgaccgctccatcgccgtttatgccgccgtgccagcaggcgaagaggtcaacacgggcctagttatcgttgatcaagacaaggatgaaaccgttgaggagctcgagacttccaggaggtcccgtgaagagaaagggaaaggagtggctaaccaatccaagaagaggtcggcctctgaagccggtttagatgaagttgctgctccgaagacgtttcgcctgtcgcgaggtgaaactcttaattctgaccagttttcgtttaagtattctggtgcgaaattccttgtgagagatcaggaggccgccagtcatctttggcgtaacttgatgctccctgggacgaaggatttccctaatcttgacgacctggttctgaaagagggatatcaaaagtttgccagatcatcacttgaggtacgtgctagttacatgtcttcctgtggcttaatatctttgtattttagctttaaccgtaactctttttccagaccgccgccctggccaatgatctgattgcgacatacgatcgcaagttgaagctgaagctcgccgacagagaggccttcgataacctgaagaaatgcgcagaccaggccaaagccatctacgccaaagacatgaaggaaatggctgcattgagggatgctgccgagattcataaggcggaaatgagctcgttgaacgacgaggtcaagaggctcaatggtcgagaagctgatcttcagaaagagatcagcgatcttcaggtcgcgttggttgctgtgaaagagcacggggagaaggaatgcaacaggctgcggaatgacctagttgctaaggtcgcccgtactacaaagaaagcccaagctcgtcttgataaagtgaaggcttatctcaaggagcaagaggaccttgtcgggccaaaggtggatgttgagaatcaagccaaaggcgctgaggagatagtgggcattctgaactcaacggccttaaggagttaaccaaaagggcgactgacgaagttaatgccttgaacgtcatcgagctcggggatgatgacctgaacatgtccccggatcagctcggttttttgaggcaagcctcccaaattgctcctgtggcggaccatcacagctcaaatgtcgacctcgttagcggaagcgatattcgacgtgtaagcgttgaagaaacgaaccagacgacctgaatcggtcgtccttgtaatttattttgatacattgatcgtggacccaactttcggggggatctcaaaactcatgtttaaccgtggacccactttcggggcggattttaattttaaactctattttcgatgattttccatttttcctgtttccgaggcaaaatagtattttctctatgttttccatttatgagctttggcatttttggaaaaggaaattaggggaagtcaacctgttaatcaagtaaatttccattttcccagttttggagaaaatgcaaatattagtctttcttgggaaaggaaaacgagaatttccagaccgcatttaagcaaattcccaattcgatttctgtatttgcccctataaatacttctctgttgatcaccaattgttttatcggcctttcctccttttgtttgcaagatggagagtgctggatcttcttcttctgttggcaaaaatgttccgactttctcgaacgctgaggcgattgaacgtgggatgccgttcttcaataaccttcgagttccctggactcttctattccaggcgagctcggaggcaagacgtgaagctgaggggtgtttatcatgtgttgaatcaaggcataaggaataccgcgagatgttgaggtattatgatgaacgaaagtctgatattgcccgaaaaatggctatgctggagtcgcatcctcgccattggctcaagaatggttttcagcttctggctccgatgccggacatcattttgtcgtactgtgaggattgtgctcgagatgctgctgccgcctcaaaggagaagaatccaacaatcattgctgatggggacttcattcccaggacgccttctctattctatcttgggccaggtgctactgatgctgataccaacgagtgtcagaacttcgtcaaccaggtaaggattactttgattcgtgtcttcgattttgggatgatttttaagattttcgttgctttggtttcccaggtcagatttctacatcaggatcaatgccgcgagctgtagtacttccgaaccaagaaacgaagagtggattttcgtctcgaggagctcgaaactctgattgctaagctgaagaagaagcgaagaagggtcgtcattcgtctggatgaggtcgaacagacgattagggcactggagattcgctcagaggattgggagaaggttggtctgcagctaatgtggcccatgccagatcgcctccttcaggataatcgcgttgtttctgacagggcgatctgatgtcctatctggccggtagctctgctggatgccaggatgatagaagatgatccttagtggcttttcagatcgtttttccttttgtctttttgttttcgaataaacgcctttgttatggctgccgaccttgtttaattctctaatttattctttgtaatagctcccgatcttgtttggtcgttgattaatataatacaacttttatgaattggcttgtttcccgtgcgacctttgaggtcggcttttgagttctttttggagtaacgcaattttttctgtctaagttcggattagatgttaggtgcgagactgggctcggcttttgagagacaatattcagcgtgtgctggacgcgagacgtctctcggcttatgtccagcaggcctatgcatgttttaaagagggagttctgggctctgtttcaagaataagtgagacggactcagcatattatttggagggcgagatgctgggctcggcttactccccgtagagcatttgttcggcagatcgcgaaatacagggttcggcttatatttctgtccgaaccagagcttaagtgcgagaaaactggtctcggctatccctattagaaaaattccattgatacagagccaattccaatagacttatgtttctaatagggcgtggattatttcaccactgcatccatgtgagacgcgcatcgaacacctggccagggcgccgagagttgacataacagatcttaaagcgaactccgtattgagaatgcaaactttaattttataaagtattatagctgcatccttgcgaaggactgcttacgtacccgatgaagggatcaagccattcgtagtttgtattacataaaggagatcgacagacgatctgcatacatagtatattgttcttttttttttttttttttttttttgagctctacttagctaactcctagcctagtgtagtaccttttgaggtgggctgcattccacggattttccacctctttcagcttcatggtcttcagcagatagactcctggatgaagtaccttggagatcaagtaaggtccttcccatcgagctccgagctttccggcgttcttctcttcggtgttactgtaaacttcctgaagcacgaggtcacctacgttgaagcgacgttctcggatgtttcgattatagtatttcgccgctgcgttctggtaattctggatccggatggcggcttgatcgtgaagttcttaggcaaaatcattgtggtcgcccaaaagctgatcgttcagttcatggtcgtttgacatcatgcttctccgtaaagtcggaactccggcttcgtttggagccattgcctcgatgccgtaagccagggagaaaggggataatgatgtaggtcgccgaggcgtagttctgtacgaccagagcacgccatccagctcgtttgcccagttcccctttttaggaccaagccttttcttaatcccagctatgatcattttgtttgtggcttcggcttgaccattcccttgtgggtatcttggagtcgagttgctcatgcgaatgttccatttggcgaggaagtttctagtaatgagcgagacaaactgcttcccattatctgtaacgatctcataaggaagaccgtgccggcaaataatgttcttccagatgaatgcgacaacatcgcgtgacttgaccttgtggtacgcctgtgcctcgacccatttggtgaagtaatcagtcaggactaacagaaatcttttggatccggaaggaggcatcggtcccacgatatccatggcccatcgcatgaatggatatggcaccgtgaccgaacacagtatctcgggagggacgttcttcatcgggccgtgcctctgacacggctcgcactttgccgcgtagacctcgcaatccgcagcatagtgggccagtaatgaccatcttttttgattttaaggcagagatctcgcccgcctgaatgattaccaccgtctccgtgatgcgtctccttcatgagtgtcagggcttctttttgatccacgcaagtgaggaaagcttttgtcgcacttcgtctgtaaagttcgccatctagcatcatgtagttcgccgctttggtttttagtcggcgagtttcccatcgatctgttggaactatgccgtcggcaatgtacattttgatggggagtcaccaatcggatggttccggatcctcttctatacccggcgcgttgattgcgttgccgtctatgtccatggccgttacggggtctacgatcacgcaggtcgaatttggtggctcgatgctcggttttgctatgctttcgacagggattgttcgccttaaatcggggttggcgcttgaggccagtgcggctagtgcgtctgctgctgagttgtcgtttcgaggaattttgaccagggcgaactggtggaactggctggaaagttcgtggaccagtgagagataagcccgcatcctttcgttcttggcttcgaattccccgctgaactgactgactacgagttgagagtcgcaaaaagctttgatctgtctagctccgagtcctttagcgagtcgaagtcctgcaagaagtgcttcgtattccgcttcgttactcgatgctttaaactggagccaaagtgactgttcgaggatttctccggttggtgactgaagtaaaattccaagaccggagccttgtaatgatgaggagccatccgagtaaagtgtccagttttcgtctagggtaacgtcaatcacatccggggacatttcggtcatgaagtcagctaggacctgagatttgaggctcgggcgagatcgatattccacgtcatattcacttagttcgattgcccattttgcaattcgtccagactagtttaggctgtggagcactatgcgtagtgggtggtcagtgaagactactatggaatgtgactggaagtaaggtcggagtttccgagctgcctttatcaccgctaatgccagcttttaaaaggtcggatacctagtctcggcatcattcagagctttactggtgtagaagataggtttttcgttaccgcgatcatctcttaccagtactccgctcaccgccgaacttgacaccgagacgtagagatacagggtttctctgacctcaggtttggctaagatcgccccactcatgaggtaggatttgagctcttggaaggcgttttcgcatttgtcgtcccagtggaaatccttctttcgctgcttcttctcgattacgtaacacgtctgtgagaccttctggttaccgtacagggtgaagattcctgtgtttatcgggaactttaggcaaaggtggtatgttgagggaattgccttcattgagtagatccaaggacttcccaggatggcattgtagattggttccgagtcgatgacgacgaacttgtttttttgcgtgatgccgcccacttggacctggagttttatctctcctattgacatttttgcttcgccgtcgtatcttatcggtgggcggatcttaggcattattttgctctaagagattcccatttttaaaagggtcttcaagaacatcaggttgaccgagctgccgatatcgattaggactcgttctacgtcgaagtcctccattaccagtttgacgaccaatgcgtcgttgtgaggatgccgaatcccacttgcatcttccgaagtaaagatgatgggttcctggcttaatggctcggcttctggggcgaccctaacgctgcatacttgtcgagctcgcttcttcaaagccgagactgaatcttcatcgtcagatagtccggccataatcatggaaatccttccgcggggatggttcggagctcgttgcggttgctgttctctccatctttttgggggaccggggagttcgttctccgggaccctcacttcttctacattatcgtcctctaggagcaattggtgatccacgtgtggctcttcatgcgttggctcagcctgggactgcttggagtcgctcttgcgtttatttttcccattcttgggatggtagaccgcctctacttctccagatttgtacttcccgaggaggatgttcaaaagatgtttacactcttttgtggaatgtcctccgaactggtgaaacgacagtacgagttcttcgagccattcggtttggccggctgttgaggtcggtcttccgaatcgactgcggcaaagatcgttcctcgcttgttcgcctttggatcatagtgttgacgcggttcttgataatctccccgctctttttccttggcctttggcggttgagatttgcatgccaactttgcgtcttcctctttgaggaaagcatatcatgaagctctatgcagggcgtcgtcgagatatcgcggttctcttattgcgaggtcttttctcagcggggatccttggagtagtcccttcctaaaagcagccaccgcggcttcatctgtgatggtaactctagacagtatttctttgaaacgacctagatagtcgttcagtgtttcgccattttcttgagtcatgctccaaaggtcggaactagaggcacctggttgaataaatacccgatattgtttcaagaaggcagttgacaactgggtgaagttgtcaattgagtttgcctctaatctggaaaaccaggttaaagcgtttccgaagaggccctcgacgaagagctggcagcagccgatatctcggatttcgtccaaaaagtgagctttggcgactgttgtcatgaaggatgtcatgtattgtttaggatcgcttccacccttgtagattggaatcctaagcttcacttgagggattctcgtacgtgtaacccgatatccgtgaaaggagtcttctgggtttcttcgatcattcggtcgatttctggggccaaactgctggctctatggacttgggatccgatttctcggagtttcaaatagatatcatctaactttccatcgtgatctaaggttgcggatctggagacatgacccggcgacgtcaacggaggcataggcggtctgccttcttggttgataggatggagtgatcctgggaacctgggtttcatcctattggattgtgcatccgtgaggtcgaagctaagcccgcgcggatggatgattctcggcagggtcacttcggagctcggacgttgggagattcctttagccagctcgtcgagtcggcgattagtctccatgaccgattcagaaagatctttcgtcacggttgtgaggatggctttgaggtcctccaaggagaaagatggtgggtctataggggtcgccccgtgtgccggttgattcgcggtcgctttggccgctacttccacagtagatggtggatctcctccattgaggagacttgactccgtgccatcatcgttgactggaggaatgacggggtcgatgatgatttgaaccatgcttgctttgattaaaggagcgtagagaaaatttgtttatattcccctacctggcgcgccaattgttgattctgtaatcaaacaatgaatttgtactaagagatttaaacaaattcactcctctcttagctcacaaataatcaaaggaaaataactatgttgcttgaacaaaaagctagggtttgctctgtaatagtagtctcttgtattaggttaaagatggtctcaatggggggggggggggttgacccctctatttatacaatgggtcgaatataccaaaatatgataaacttctaattatcctaggtctaaatcttcattacttctattcttcataagatcctcttctcttaaatggaagttttctctttacacgacctaagaagttggttatggcgatcttgattgtcgacttaagtcttcgggcgagctcatgacttaggcccattaacaggctaaccgggataccccggttcaatcgacttctcgattttattcacattattccttggtttaaattggtattgtcggaggtgttaattcctgcaccaacagtaatcccatctcccatctcaatataagaacttaactctaccctttgcattcatgaatcttttaaacccttgttctaatcattctttccttttctcttaactctaggagaagctttctcaacactttgttacatctagcggatttggatttctttaacaactaaggttcctgtttttaacatttcaaaaccaagggcttttgcccatctccaatagctaacaagaactctttcttttctttacaaatcccaaaacctttactagactttttctgcttctttagcttacttcacctagagtcttttttcttttcttatcaatgaatcaaccccctcttttttttttcttttaaacacatcccaacccaaagtataagcgtccacctagtcctatctagtccgaaaatgcgaactagaactacatgaaacactatctctgtcattacgaacctaacactttttaccaagcttaatcggaataagacctcacaaacactcacaagtgatatagggcttgaaagaaagtctaggtttgggtttgggttaactgctctaataaggagagtcagctacttggattaacaagagtgatcaaaataaataagaaaatccaagtattttagggtaaccatgagttcaaatctgatgcagacatgataattaaagatcagattcaggttcaaattgatagggaatggtatcagatcatgacagtgtggtcgagtagagcaatctaggcatggttcagtgttatttcaaattcattgactacgcaacagacaactagcaacgagggcactgagtttatcaggtaaatcaaaatgcttacaaggctatctcatcatcatcccctatgcatatgcaacaatcctaaatgaaacactctagactcgatcctaaatgtaatgcaactacatgaacactctttttttgtgaaatcattttctgaaaattttcaaaattttttggtttttctatgccttagatgaatgcagactcaaaaatatatacaatgcaacacacactttctgagccctcccccaaacttaaatcacacagtccactgtgcgaataaacttggaagagagtactcaggacaaatccaatcatagaaacaaaaaatgaagaaacaaatcacaacagatgatataatacaatggtgaagtgaggcgcttacctcagttgaagaatgaacgtagttgctcgtcaatggctgcctgtgattgctcccaggccatagacgaaccaccttgttctgtatcagctccaggaagtgggtactcgacctcatcagctctctggcggccagcaccgctctgaggaaactcgacctctctccttctgctgcggccagcaccgcggtcgagtgaccttctcaagtgaatgaggcgtgatctgctgctagatcgagtgagtgtagccttccttcttctcttgtgctcccgggattcgaacgacgaatgcctagccaggacatgtgatactctctgctcgctaagctcaggcctgtgctcaggctcatcaaatctccttgatggcatctccagaggaggctgtccctgtggaatagcagtggtggaggaggaacaactcagcttatctgtcagaagcttgatagtcttgaaacacttggcgagcagcttgtcctgcttcttgcaccacttctacagtttactgttatttttatgagcttcagtcaagctcttgctctgcctcgctggaggtacatgttcaccaaagtgatacatgctagtgtcgaacgccactgccctatcttcatccatcccatccgaagcggcttcttcaagaagatcgtcctcatccaatggcggagcgttctcatagtagaggcgtccaacctcaggcctaaaatcaatgttatctccctctattatccttgtaacctcagggctagggagaaggatgttagctctcctgtctgtagagtgctcaaacctgaacctgtggaaatcgtcaaccattgcaaactccaggaattcgcagtgacgtaggtgctcgatatccattgctcgtggctcgagtccagcagaaaggattgggactccacaagctatcaaaatcggtgtcacaacgccacctatgcacagagcgcctcgtgctctcttgcgattattgctgatagcccagctcttgtatccacacagatggatcagaagaagtatagagagaggtgagtcattgatttcaccctggagggacatgccattcttagtttggcggagagttcccttgagggccattgcgatcatttccatatcagagttagtgacagtccctgtaatctctcgggagtagagtacattggctatagaacgctggaagtacctgatgacagggttgcgtatctgattgctctttgacctggaagtattcaacggtacaaagctgccaatggtgatccacaattctttcaactcttctctttcatacttgggcttagatcccgttccactggggaagccaaacaatccttccaagcgcttgattgataacctatactcatgaccatacacagaaaatcgcaagaatcccaatccttcacaatccaactcatcagaggtcataccttggtagagctgtactcgcagcgtggagaggaattgtattgtctcatcttcatacgctacatacggataagccatcagagtgtccagatgacaactttggtacaggtgctgaacatcttccaacaatccgagttgtgcaagtgaggtcgagcacggatacctcgtgctacagaactcattcagcttgaaaagcctaacatattcctcagcaggcaatacgtcgggcttgtgcagaagtttggtagctctgcgagtctgttcaggcatgtactcgtcttccagatcttcgtctataagctcatacctctctgtcatagctctcttccctcgggctatctcagctttccttctgaagctttcatattctctctgttatctctctggccttgaagatgacgactctgtctcatccatgttgtagtcaggatcaacagaagaactgccactgtaattgctcatgattctcctgtagagatttagaactcaaagctcaaatgtcaataggttagtctcaaagatagcaatgaaaccaaaattattgtcaataggcaatgaaatagattgaattggtcgagtacaattctgtactcgagtaacctgagctgttcctgagcttagacgaattggatcgagtatcttctcagaggtcgagttgtaatgctacagcaggtcgagtgaatcgtggaggtcgagtgagtcgtgaaacctagaggtcgagtaacttctctgaagttggaaggctctactgaattgatgaacaagaagccgagtagattttgcaggggtcgagtgctttctggtggtcgagtgagttgttgaagtcggctagggcgacgtcggtcgaatgccgctatgagaccgggaaacgaggtcgagtagcttcttttgaaagagacggcggttgatgtggatgaattggtcgagtatatcaaaggaatcgaaggaagtggtctggtcgggtgacggagggaatgagctagtgacggcggcgcggaggtcgagtgggtttcagaggtcgagtgaaattctcaggatcgagtagctctttggacggcgattcgtggtgtagagagattagagtgtcggcggtgaaatgaaaagaggaaggtcgagtgaatttcgtgaagtcgagtgatgcttcaaaatgagtggtctaggttgagttttagattctctctccagcttatcctcaacgcgtggtccacactctgttgactgagaaaatttacagaaaacctactgtaaactgcaggaaatttctgcaagtctctgtagcttctgttggtcgagtaaaatgatgatttaaaagtttttgggttttaaacatcacacatactcgaccaatgtactcgagtgcaaggtctccaggtgcaacagaagattttcaaaattttgtactccaacgggctgtacactcgatctccacgtcttctgtagagtaaaagttttgaatttttactctatctccacgttgttctcttgtctctgaaaaaccccaaacacaactaaaacaaataaaaaataacaagaaagtaaaaattatttccaaggatagtcatgggacttcctcccaagtgagcttgtttaaagtcattagcttgactcctttaatcatcaagaagctcctggagatgaaccgatggcacctctggaaggatttggtctgctaagtatttcttgagcctttgaccatttactgtaaaatctccactcttaccagctagagtgactgctccataaggacggacctcagtgatgtagaaggggccagaccatctggatttaagttttcctggaaagagtttcaagcgagagttgaatagcagcacctgatcaccaaccttgaaatccttaatgatgatcttcttgtcatggaaaagcttggttctctccttgtagattttagaactctcataagcttctagacggatctcatcgaggttacttagttggatcaatcgcttctcctcagcagtttttatgtcaaagttcaaaagttttaccgccaacattgctttgtactcgagctcaacgggtagatgacatgattttccatagagaagattgaaaggagttgtacctatgggggtcttgaaggctgtcctgtaagcccataatgcatcatctagctttacagaccagtctttccttgtaatcccaacagtcttttctagaattgtttttatctccctattggagatctcaacctgcccgcttgtctgtggatgatccaaccaaatagcttctgaacttctcaaatgcgaatacaacagctagaagctccttctcagttgttgcatatcttccctgagcgtcatccaacgttcggctggcgtaatatatgacatgaagctttttgtctattttctggcctaaaatagctcctactgcgtaatctgatgcatcacatatgatctcaaatggatagtcccaattaggcgctcgaacaaccggagcagataccaaagcatccttgatggtttgaaaggatttgaggcagtcctcatcgaattcaaattcggtttccttgcacaatagtctggttaacggcttggctatcttggagaagtctttaataaatattctgtagaacccagcatgaccaaggaaaacttttgatgtccttcaccgtttttggtggctgcaactgcatcaccacttcaacttttcctttgtcaacctctatacccttctctgatatcttgtgacccaacactatgccttccttcaccatgaaatgacacttttcccaattgagaacaagattcgtctcttcgcacctggtcaataccctgccaagattcaacaaacatgaggagaaagaggggccatagaccgaaaaatcgtccatgaaaacctcagcatctcctcgattaagtctgaaaatatagaggtcatacacctctgaaatgttgtaggagcattgcataaaccaaatggcattctcttataggcaaaagttccataaggacacgtgaaagtggttttttcttgatcattagggtgaattggtatttgaaagaaaccactgtatccatcaagaaagcaataatatggatgattagccaaacgttcaagcatttggtcaatgaatggtaaaggaaaatgatctttcctagatgcatcattcaacttcctataatcaatgcacattctatgaccagttatatttctagtagggatcagttcatccttttcatttttgacaacagtcattccaccctttttagggacgcaatgcactggagaaacccaagtactatcagagatagggtagatgacaccagcatcaagcagtttcaaaatttcttttttcactacttctttcaaattgggatttaacctcctctgtggttcaatgctagaataggatttgttttcaagatggattctatggttgcataaactaggtgaaattcccttaatgtcagataatgaataaccaatcgctctcctatactttctaagcttagataatagcaggttcacttcatcactatttaactcagcattaatgatcacagggtaagtagagtttggaccaagaaatgcgtaccttagaccttttggaagtggtttgagatcaaccttcggtgccttaagttcagaccagtcatctgaagttggaatgatcggctccctagattcgtcggtagacaaggtcgagtggttgctcgagtacgtcctcgagagtgcaggttgaactcgagttgactcttcttcgctcattaccattacctctgttgctggtccattcaattcctcaaagggttctgattcttccatcgctttatgggagtctaacagcttctggtatcccaatgtttccaaatgtagaaacccatcttcaccacttttggttaaaccactgttaagatgattatcttcttatgccagctcttccagtaactcatcagctaactgatccatttcttcgatccaaaagagttgcctttctatggtaggcttcttcatcgcgtctttgacatcaaaggtcatcctaaagtctttgccaaggtttagatcaatcttccctttcttgacatcaatcatagctcctgtagtggctaagaaaggtctccctagaatcaacaggtccttgggctcttcatccatctccaggactacaaagtcagttggtatctccacaacaccgatcctgattgggaggttttcgagcaaaccatgagggatccttgctgatctgtcagctaggatgagggatatattgcaggacttgtattgagtgaaccccaatcttttggcgacagagagcggcatgagactgactgatgctcctaaatcgcataggcatctattgaaagccaatggacctaaagagcacggtagagtgaatgaaccaggatcactaagcttcaaaggaatgatcttcttctgtatgatagcgatgcattcatgactcaataccaccatcccttgcacttcttgaattctctccacgatcaagtctttcagaaacttgtgagagtctgggattagcgctagagcgtcaacaagaggtatccgcaactcaacctccttaatgttcttggcaaacatagctctatatttgcctgccaacgctttcttgtgacggccaggaaatggaagctgcggtttgtagggaggagggacaaagaccttttctttgtttttgatagcaactggttttggagcagttggtgatgctgctgggatgacagatccagtggttggtcgagtaacgctgtcgagtggcagatcgagtggttgctcgagtgacaggtcgagtggttgctcaagtgacaggtcgagtggttgctcgagacttaaatcctccccatcttgatcttcactgtcctcagtgaccgtctttggttccttcctagttggaagtgcttttccactacgcagtgtgatagcatgagcatattcttttggattctgaactggtttgcctggtagttggcttgtctattttggagctgaagaagatacagaatgtccctctaagtaacggactttggtattcagtgtttccatcttgacattgagatcattgtagctacagtccagcttgttctgtaactcaaatatcttctttgccatctccatggagtcagaggcttgcccgtgaagcagctgttgtagcatttgtttcatttcagcaacaggagcagcaggacatggggcagattcttctcccagatgtgtgctttgtctcccaaggagaatggaaacaaacggagcttgaattcgtcttcactgacaccattgatctttgttaggttgcagaacctatcgaattcatcaaggtggtcgagtggatcctccattggcagaccatggaatttgttcccctgaatcatcaagatgagaccactcttaatctcgaagttgttgttctggatagcaggaggtgcaatttccttcctctgacggtgatcacgtggtgcatctctagcaccaatgttggcaaggccattttgttgattctgttcgtcagccatttcgagtggttgctgaggtacaaggttaactgtggttctcctttttctgagttcgcgagttgtgcggttgatgttgtcgttgaaaatgaggttctgattgcctgttgatcgagttcgcatacagcagaggtatacctggatcaagaagacaacaagtaaaacacacagttagtaactgaaaagaaaattgaaaatgaacttgatctaagcaagtctgaaatctcaaatgtaacaaacaaacacccaattggcaacggcgccaaattgataataggtttttggtcaattatcctaaaacaccaatcatatcgttgtagtattttaggttgtcaatccaaatgggtgtgatgctaacaataaagatgtgatcagaagtcactaagtcaagccaagcaataacaggttttggtgtgttctagcagttctaagtgaacatgcagaaaacagaaaatcaaacagaaacagtaaaacactcgaccaacacagctctttgcagagcactgggtgaggttcgagtgacaggtcgagtaatagacagaaaatgaaacagggatactcgactgcacagtctgttgccagacaactgggtggtcgagtatcaggtcgagtaacagtaaagaaatgcagaaactaaataacagatgacaagatgcagtaaacaacagtagagtaaacaaagaatttaatcagataaagaattcccgaggatggggtaatcgagtagcttcgttttctcagtttacaggtgattgacatgctcaataaattaaccctagacaacaagttcattaaccaaatctaagtgccaccgcaacagagaccctcaagttaacctagtctcagactcaatcactattgacgagagctaacctaacaggcattacgaatcaacaagttaaagccaaaacgctccctgcaaccaataccttggtacagggtcacgaatctctggaattagtggttcagacatttcatcgaacaccttttgggcgcggaaatgtttgggctcaaattccagttgatcagaaagcaataggcattaagaacaactaatccagaagggatctatcaatcaatactcaatcacctagcatactgagaattctacattactctaacccatcctcagaaatctattcactactcagacatcataacagaaagcataaacgttgaacaagttaaaaacatgataacaacagtgtaacagcaggatgataacagaatgaacaacagtaaacgaaatcaagacaaaagctgaatactcaatacttaatagataaagagaaatccggattacaaaaagactagaacacaaggtctgcggaataaaactaggtaaaaacttctttttgcgaaaatgtgaagtacatgctacttatagtcaaatatcccaaaaccctaatactcaaaacgacgaagtattgggacggataaagaactgtactcgacccatgtggtcgaatgggaggtcgagtgagtagttggagtcttctttcctttcctgtgctcgagtgtctggttgagtgcggaatgaagaaggctctgaagcttgtcatcgagtatgcagtcgagtggtgtgatggtgatactcgacttccaggtagagtgatgaggtcgagtagtggtctggcaatgaaggtgaagacactcgacctcgtggtcgagtgaagtgatcgagtgtttgtcaggagatactcgacttccaggttgagtgacgaggtcgagtggttgtctgatgatggaggtgaagacactcgacctcatggtcgagtgatgtgatcgagtgatggagatgagggcacccgacctcgtggtcgagtggtgaagtgaagtggtgatgtcctctactcgacctgggggtcgagtggtctcttgagatcttgaagctcctactcgacctctggtagagtggtttgtcatgatcatgtccgcttcttccagatagctcgtcaacagctccaaatcacctaaaatcaacgcaaatatgcaacatgcatgcaaaactatcctaaacatgtaaagtgatgacaaatgatgtgaaatgttataaaaaaagtgatgatatgatgctaaagtgatgacaaatggatgcttaaaacatgcaaaatacacacttatcaatcctgaatgtttccaagaatgatttgtcacaaagtttttaatgttttattcttggtacccaaacaattattttttaaaatgtaaaagataatcatcaataattatatctatgctaaacatggtcgaaaatattaaatcataagcatagtagtttaacagaaataagtataactataactatacttttatgtaatcgttgcaaactttgataggagtttgtttggagtttctttatgtcatatttgtaaactttgttaggagtttaacaaaaagtaagatagagaaaaatccaacgggaatacaataattaaataggttcaaaacataagcaaagtttaacaaaaaaaacaatttgcaatgacaaagtttggagaaacttaaaagaagttcaaaacataatttaaagaagaataagagctgccaggtcaaactcctaaatattttcaatcacttccatcctttggttctctggaacttcataataatcttcgaaaccgcggctgtaaaagagaaaaataaaaatttttattgattaattgatgttatggttaactaatacaattaaaaaatgttaaaagtcttacatgtaacttcgaatatctatctcagggaaagtggttggattgatgtaaattcttgaacatccaaattcactcatcaaaacattctcacctgttacaaaatttttatttaaagttatataatacaaataaaaatcataagtaaataggattacaatagtattgaaaataactaaccctcaatctcagcaattctccaaaacctcacatgcctctgaactgatacatttcgagaattgtgtaacaaagatttcacagcatcttccaacagcatagcatttcattttctctcccctaaccaatatgataaaacattacactaagcaatacatttttaagctcaattttcagacggaagacacattactaaatatacttataaacactaaaacttacatattacccaaaagatcgaaagagacatatctcgattcatagtcggtttcaccctggcgacaaacaaatgagaatttcttaatagccgagatatttgacactacacccaacattgcatctaagtatagaataatatattaatagagtagttcaaaaaaataataacataaactactaacaaaaattcattctttaaatgagaagaacatagattgactaaaaacttacccgtgatataatcccaatcctcaagacatggatacttaaggtttatgggaaaaatgaaatcaaagaaatctcttcaccagttccggaagaggcaaaacacttgtttcccaaatgaacttgatgtggaaacaaaacgaagaatacctaaccctttcttgaggaacaacgacccgaaagtcagagatgtgaatccatgtgtcaggaattgcatctacacgattattctgaaaaaattcccagataactcaaagattaaataatttaaaatgatctgtttcaataataacaaagtaaacttggattaaaagaacgaaacaatcaaaaatacaaaccttgtcatcatgaagaatcatggttgtaatttcaccatgactgtttggaggatgattccagattgacaggatcttcacgttaatcttccaattagtcgagttatccctcaaatcagtgagtttgtgaacagacatcatgtttatccaaggaagtttttttttttgtttgaaagataagagttaaacctaattgttttaggcttgaggtttttgattttatataattacgaaaagatacaatgatggacagttgatgtgtaaaaaggaaacgaattgtccacaaccaataggatttcttataggttagaacaataatgttgatatttatttcttagcctgttactaaaaaattgtaattatttaaaggagaatgtatgaaaaaataggaataggtttgtttttcaagattctcatgattaatcatatttaataggattgattatttagtgtacaaaatctttcctaattctgattttgttggttttttttgtttaaaatgaccaaaagtgtttatagttctccgtctgattaacattgtaatataaaagaatatgtttcttaatcataaatataactaaaataataaaattgtttaacaaaacgacatataaatgaaattttttttattaattccaaaacaacaaataaaataaagatagtttaaaacctaaaaaatgaaaacaacatcgataactttaagcaaagaaataataatgaagaaaacgatccaagatgaagtagtcattaagcatcattcaccgaagccttcctcaggcatggttatcttagaacacttcttcctacttgtggaagcctgatcatttccatcaacatcatctaaatcttttcgttttgatgatggaatagaggttgatgacaaatccacatcagaaagatcaacaccattagtgagcataagggaaccttatatgaaaatacaaaaaatattttaataagacaaccataaaatataaatataaatgattggaattgtttaatgttattagacaaacctgatcgatagaaactatggatgatggatcaacgtatgcatcagagtcttcctgtatgatttcatcagcaatgttaccggtgtagactctggcaacaatgaatgaatcatatccaccaaatatgttttgcctttgaatacacaatagaaactgaaaagtcatccctttcaaaccattgatcacatcaggcaaaacagttgggtcttcgatctacagaaaaaatctactctattataacatgaacgtagtcattttaatgaaagagtttatttttaaaaaagcgatatacctcatcaaatgaaccatcaagcaatttaggggcagtagtgccaagaatatccattgcatgactatcgaataacatgcatctaacttccctagtttgttccataatatggagatgtaaccaaaacctaagagttaaataggattattatctcttaaacaccgaattataattcataatacattcaatataaaggtttcacaaaagactcacttggcaacaacagattttgcaaaaccattgcatatgtcacaccaaaatcttggcttttgaggtatcttgacatcttaaagtttgataacttcctctttgacaaccttcttgttgtgagcacgacaacaaaaatagtaccacggccaatctgtatcaatggccgaaacagtacaaattgttttgcatttacccaccttcaaatgaatataaagaggatttcacaaactaagttaaaaaaagaaaaaaaaaaagaagaataaaaggttagtagataaaataaattcatgaatagtacataagtagctgtaaggacttccttgattatttgccttggataatcaccatcgtcatccccagttcttggtgcatagagcctcttgtggaaagatccagaactttctaaagtcaacccatcgattggtatgctatatataaaggtaatataccgtgcttaatattataaagaagaaaatatatttagtgaaatagaaatacaattacctttgcttaaaaagacccaactcgtccaatgtagaatcaacgaagacttgtgaaacatcaaatgaattggaaacactcctattatctgtgtataaaaaaggacatgttttaaaaaacaatacatatatgtagtagtacatatcaatataattaccgttgtagagattgatcttcgcaaatcggattaagcaaacaacaataccatcggttaactgctggcaagcttggtcaccgatctcagcatacttcccccaaagtgtacatgccaagcgagtgtcacttaaatgaaaagaataaatttattagtaaatagtaaataaataataaacatctaaataagaaggaatatgaatatagattgttagtactgctgatctctcaaatggaaatcgattttcttggtggacttgttgttagcgttaagatcttggatttcagaccgatcaacaacctataccattacatctatatagacaaagagaataaatctatgaatatatagactatagaagagataatgcatgtatggtcaaaattaatatataaattttaatataaccgtacaagatattagcgttagcggacccagagaggatcacgtcaaacttagcaagggagagaaacaaagcattagagacgctatcacatggagagacaatggttttgaaaacaaaaccaatcttgtattttaagtcagaaatacgatactgaccacttgtaggatttaaagtgatggtcgtaatgatcttccaaacaccctcggttaagcacctttcaaacttcttgatctgctctcttctcaaagcagcatacatcttattaccctataagacaaaaataatcattaataagtgaaaatgatgcttgaccacactataaggctggacaaaatataatgttaaaactataatacgtacagcttcatcaaccaaaatcttttcgatagattcaccggccttaacagaatattacctccaaacatgaagcaatttaggggccgattggtaacgactcttaattttggttgtaaagactttaactgtaaaaatttgagctgtagagaatttagttgtagacactttggctttcaaaactttagctgttaaagtctgattggcaacagaaagctatataagctgtaaattttattatttattattctatattaattacaaacaaatttgatatttaaatattattttttttctaacaaaccaataataatttcaaatgtagattgttatcaattattttcttagtaagtttcaattttttttttttttgttagttattgaatgattcttgatcgattattatcactaataataataaccttttttaaaaagataatatttttgaatgattctttttggttgagtagttgtatagttttaagcagcattaaaatatatttcattaagaacaaaaatagctaacaggaaaaatatttaatgaaataattgaatgacataaataacgactgaattatatatcttatatagagatctttacatatgtatgtatgtatgtaaccattgattcatgctatgtttattatttatgtatatgaattctgaagaatactatttagaccaacaaggatgataaaaataaaatgattatttgttaaatggatctttcatttttaaaagaaagagaaaaaaaaaaaattatccaaaaaattgtgaaacaaaatatatataaatttgtagagattttttaattattatggaagaagaaaaaaacaagttttctacgcatttgttttaacaaccgtgtatttgagggttttaaaaaaaaggagaaataaagaagaaaaattaaaaatggctttaaaaactttaaaaaaaataaagcataaaaagtttgattggtagaaaaaaaaactgtgaggactttagaatactcttaaagtcctggaagtcatgtgccaatcaccccctttaacctgaatacgccaagcgtttttgtaaggcttaagcgatttcaaaggagtaaatggaagaggattagcgagcatcatttaaaaaaaacaaaattagaaatgaatgtatgagtctaagatgagtgagtagattgaaatgaggggtccgatatttataagaataagtggttaagtaaaaaacaaatacgcaaaagatattattcctgaaaatcaagtttattccatatcacaaaatctcataattataggaaaatgtttagcatttaccgtaaaagtgggtatgtatatatggaatacgtgtggaaaatgtaagataattccaaatgaagatccaaatggaatattagatgtgctataattatggagaagtgatatattcgaatgctggaaacgaagatacgcaataaattaaatgaaattaatacgattcgttgcctgatatatagtcagataatttttttgcatgaaactacaaaatcgtacggctagtaattaatctattcaatggctaggattaaacggagaatccgacttttttaaaaaagaataaaaagaaccgcgttttttttttgggaaatacgaaatcgaaaggctaaaaacaactcaattcaatggccaggattaaaggcgagtacccaaatttttaataccaggtaaaatgatccgcgtgttttctaagtgaaactgcgaaagcgaacgactaaaaacaattcaattgaatggccaagattagaagttatgacccattattttaaaatctgggtcaaaaggatccgcgtgttttgtaagtgaaaccccgaaatcgaacagctaaaaacaattcaattaaatgaccaagattagaagttatgacccattattttaaaatttgggtcaaaaggatccgcgcgtttctaaaaaggtttttttcatgacataaaatttttaaccttatggcaaatttattattttagcgaaattcatgcatactttattaaacgtaattatcaaataatagagtagattataattgaatagtataaacatattttcattttatttttgtttttgtttaactaagctcacagcgacacaattccgaatattagcaattggagaaagaataaaagacacagagcaccatattattcttttagcccaaaaatttccacaagtacaaatccggcaaaaacacatacatagaccaatttttggtttactgacgaaattttcagatcagaaaaccggatttgattcaagtgggtccctaaaccgtcggttttaaacaatattttcaacgatgagctttttcaagtcaaactagcgaaacagctatcagacctagacaaaacattagaaacacaatcatgatgattatcttgatcgtctttagatggactattaggcatagatctaagcattcttggtgaatctaagctttttctcaagatctgtctcatcgcagagatcaaatgtcttgtcagattcgatggtgggcttgaggatttgaacttattacacttgttcatgtgtctcgccatagcttcttcttctgttgttaaaaatctttttgttctcatgactttgtacttcacagcttcagaacaaaatccagagatccatttccctatgtaacgctctcttatcatctctgtgtacgattctgtacactcgtcggttaatccgcaacagtcacacgtcaccgaatctagctcatcgctggatatttgtgtcaccggaaccgttgagataattattacatccggtgttgaaattaacattgttggatcactaagtacactatcagacatggtttcttgatttaaaaccctgttgagaaaatttcgatcaacaatctgattcttacttcaacataagaaactataaagaaaccaagaggagaagttttatcagtagcagaagatgagaagataacgcaataagcttgtgatatatcttctttgttttgtctctgtttctgaaacagagaaatggtttttaaaaagggattcttaaaagaaattggaatacatttttttttttttaacgttcgttttgccactctctgtcttctaaattactttcatctccgagaaaaatttcacaaaacaaaaccattgcaaaaacagagtattaaaaatgctttttatctttggcttttcttgaaaacaaatagaaaaagttaccgtttctatttacttcacggaaaaaacattagaagttcataaaaattcactcgaatctctcgttacttcagaagagagaaaaaaaaaagtattgttttggaaatatatgaggaagagaaaatgagagaagaagtagtgcaggcgaaggagaagcaatgtttggtgttttataagagagacgatagtagtaactagtgacgtggaatattgattttaattttttagttttattttatttattgaacattttatcaaaacgccgcgtattagagaggatgccctagtttaatgtcttggtataaaagcctatattttgcatttttcatccgactctctgcgttaggtttcattttagcggcagacgagagagcaaaagcaaggagaaaccctaaccatggcgacacaaccagctactgaatctgtgcaatgcttcggaaggaagaagaccgcagtggccgtcactcactgcaagcgtggatctggtttaattaagctcaacggttgcccaatcgagcttttccagccagagatcctccgattcaagatcttcgagccgattcttctcctcggaaagcaccgtttcgcaggtgtgaacatgaggatccgtgtcaacggtggtggtcacacatcacaggtttacgccatccgtcagagtatcgcgaaggctcttgttgcgtactaccagaagtatgtggatgagcagtcgaagaaggagattaaagatatcttggtgaggtatgataggactctgcttgtggcggatccgaggaggtgtgagccgaagaagtttggtggtcgtggtgctcgttctcgttaccagaagagttaccgttaaacaaagctgggttttttttttttcaatttcgattcatctcaaggtttttggagtttttgattatggacttgtgagactcttagaatttctgttttatgatttattggataactgtgattctccaagaacttatgtcttatatgattttgtcttcatttcgttgcttcttatttcttgcctgtgatgtattgcatctgcatagttggattgaaagttaggttcttgggtttataagaaggctgtgacttgatgttacttagccatagctgatcaaatatcgtctaacaaagtggtctgttactctgttatattggttcgcgtaaattttggttacagtttgtttccgagttggtatctcgtaagtcgtaacgtttgtgtacttattcactggaagcaagttgtattgttgttagtcttttgttacctctcctggtacgattttttttgtttgtgaacaagatcagaaactgggactgtgaatttgaccgataatcaaagaaccaaataacttttgatccaaaaatcgagtaattaataaccgaaaagatctttctactaagttttttcctacttcgacgtgatttttgacttgttgcaaaatgttatgctctttgtgcgttccaccacttccgtagtgaaagctcttgtatccgtaaagcaaaaagtcaacccttttgagtttttgtcatggcaatttctgcacatttttcattgcagccttgccatggagacaccatgtgttcccaagcttcagcgggcaagacgtccgtagaacctttctcagtcaccttctgaaggaattccggaacaagggaatacgcacgttcatggataatgatatcgagagaggccaaatgatcagtcccgagctcatacaagcaatccgagaatctaggtttgcggttgtagtgttgtcgaagacatatgcatcttcaaagtagtgtttggatgagttggtatattctttatacccagtatcatgattcatataggtaaagaaacagagttacacataaatgcgtatacacaaagatatggtgtttgtgctgattttgctctttacttgttgttttcaaacttatgaaaagagatatatcacagagtgtatgaaccataaccgtacatgtcccaaatccaaacaagtcctctatcgagtgtgtttgacgcccaaccatttgattaatgagttgattacgcgatggtgtcttgttagcaatagcaaatatgatcggccagccccaaaaccatctgatattgaaatagtaacggagctgttcacggatggcatcgaattgttgcttcagcggatttcctctccttcctcctcggttgcagatcagacagaagctgcaaaagagcttgccctccaatcctcgaaatttgtccaagtccgtgacttctttatcaaggaactttctgattcgatcaccaggttactcactccgctctctgttttgggcgatgaggtagactcgaatcccgagcttcaagagaatatcgtcacaacattgttcaacatgtcgactttcgaggagaataaaacactacttgctgaaaaccatcaagtgatccctgtgcttgcaaagtttatgaagcagaagtcagttgtgacaagaagaaacgctacattgacttgagtgtcacttttagacattgattctaacaagatcatcatagggaactcagtagcactcaaggctctgatagatcttatcggggagttggatgacttatcagctactcatgaagctctttgcgctgttatatacctctgttgtgatgaaatggagaactggaaaaaggcaatctcgttggggttgactccttttgcagtcagaaatatcaaagcaagaagaaattcgtttgactcgttagttatcttggcattgatttctttacacgaacgcgttatccaggaactggctaatgggttatctatgatctgttaagtatcttgattcttgaggaacaaaagttgcatggtgacttgtgagaacgttgtagtgatcgtaagcaacatgtatgttaaaagcaagaaaggtctattatgaaaatcctggcagaagaggagaatcaacacaagacatttacaaagcttgcaatgcaaggatcacctgttgcggtgatgaaagcacaagggatttacattgtattagggtatttcctgctcggaatgtgccacagagggcttgacagtatcatcaaaaatcaggtcttgttaataccttaatagtttccgcaaagttacatttgatacatatagatgaaagtgtagaaagaaagaattcgagttgaaagtacaagaatttgagacttgtaatctagggattgttgttgcttatattgcttgaaatactatacgaaaaaaatactcaagattgaactttaacttcctccactcttatcttgtttacattacatctttgatgtatatataaaaaaaaaatggaaaaatgtttatgagctacatgaagtataagccaacccatcggcacacatgcaaactttaaaaatgtcttgttagctacacgaaatattgacatcacatacggacatacacgaacaaacataactcatgttgccaacaacaaatattgttcgtgtatgtccctatgtgatgtcaatacttcgtgtagctaacgaaatatttttaaaatttgcatgtgtgcgatgtgttggcttatatttcgtgtagctgataaacattttttcaaaatttttttatatattaactaaccattgataaaaaaaaataaaaaagacattgcatggaattttcaattagagcatatagcttaagaatttttgttaaatcaccgaattataagaccaatcaaagtcgggtgtcaactaaagctagtgagaatgcggatatgtcgcggtagacaggtggcgtaacgtaattaaagataaatagaggaataaaacaaaatcatatcttttttgacattcttttttttacatctaaaaacaaactcatatcatataatagtttcttggcttctctctaaattttaaacagaaaactttccctcctaattcaccaagtttctagggttttcagttctttgtttgggttctttgtgttggtagagatatctccggctgaaatggcggattcgccacggacgagtcaacaaacgccaatactatgcggcgggagttacacaaggtactgccagagatttggtacgacagaggaggcaaagatcacggtgagatagataaggctattagtatcctgacttgtctaaggaaaatagaatcgaagaagccggaatctgatatatctctgataaaagttccaaaagagtttatatgtacactctcgaacaagatcatgattgaagctatgctcatcgcttctcgccaggtttgatctttcttagttttccatgtttttgacgatctcttgtgattcttgcttcatttttcaatatttcatttatacgtataagcatataaagttttagtatcaaagaaaagaaaggtccatccaattctggtgtgttcatttatgtcttatgcaaatacagagttaggatccaagacacatattctctggtgtttactctttttgtttttttattcagacgtttggaaagagctaaatcgtagagtgggtgaagcatgaacgcactacaacaaatatggacattcttatcacgagaaaaatgctataatatgtctttaatagctttttcatgaacgctattttagggcactgttattataagtaccccacattcagtagcgtgagttcagtatgctatgttatagttttataacatagctataaagaacagttgtattatcacgtttaattttcttaaaaaaattatataatatttgactttttgtgctatgttatatatctctaatatagctgttgcgaaatgttgttttatcgtggtttgccttttttcaattggaaaataattagtcaaattatgtgctatgttatgctcttatatcaatttataagctacgaaagatgattaaaacatagcattagtgatatgttaaatattctattacctgtattcttatagcattttctgagatgtgattatagtacacataacacataacctgctttataaaatctcatacattgacctttgattaaacataagtttagatccaaaatacataagaaaagtctcaagcacaaagtaaagcaatacaggagctaagtgcataagttcaggtacttagcattacacaagaaaaccatcagtttaagacataatgaccttgttctctagctaagcaatacaggagctaagtgcatcttccataatctctatctcatctgatggcctccaaacttttacattggccaccttcacaatatctatccacactttaactgcattagaacctaagggagtgtggtgaaccttatgtgctggatcatttgttgcccatcgtccttcagccacaactctattctttccagttaaatccatcaacttgcacttcttattctctttggaaataactttgttaatgcgctgccacgtatacaatataaaccatcagtcatcataattaacaaaaacaacttcataacatatgaaagcacttactggagacttcctgagaggagactatgctggtaaagtattccttattggagaacttggacctgttgcatcatcaataggagattcagaaccagatgcagacttagaagacatagctgcagatttggactctgacgcagcctttgaagctgttgctgaagttttggacccgtctgcagacttcgaagctgtggctgcagacttagccttcgatgcagacctagaaacttctgatgtagaattatgaccggttggagatgagggattttcaaaatcaactttgctcaggggccaggctacaaaagccatcaaacagtcctcaagatatgatatttcagctgtaggtctccatagtgatgtatcaggctgctttactgaatccacaaatactttaactgcttttggtccaagaggaagtccattaaccaatgcacttggttcttgagtctcccaacgcccctctgcaacaatgacttcagcattcttcaaatccaatagtttacatttgtttccttttagaccctatcaaacacaatcagtaaacaaatccaatacaaataatcagatgatacacaggggaaatacattgataacacagtgcaacaaattttaattaccaaaggtgcaatgtcttcaatttggatgtctgtgtctagaagtttacacttatcagctggccatgcgattatatgtccaacagcttctttcatattaaagatcttgtgtgcaggtctccatagaaatgcatctggttgatatgcagtttcaactaacactttcaggtccgtagggcctagacgacaatcattcactatatcatcaggatctgaagaaagaatacgaccctcaccaacattttcatcagtctcagaccaatcaacaaacacacacttacgatgtgattttctgttaacactctgcaaaaaaatctgagaaaataagagtcataaacttaaataagaagaatcatttagatggtatgaaaagaataaggaatatgttactcttgcagctgagttttcacccatttcagcttctggcctctgtaacataaacaaaactaaagtcaacttatataactctaactggttgatgaatattttaaaactcttaaagtatcttacctgattcttgattctgatgatttcatcttccaagtcattgacctgtttttttaatttcacttgcctctcttccatttcagccatacacgtgttcttcacttgtaaacaagctaatttggtcttactcatgcctctccccattaccctcagcctaccaggattgtcaggtcctaaaagcttggcgaggtgatcttcatctggatttgttgaaaatgttggagcatcacttccaacaatttcagctgcttcttgctggaaaacatgaagacagtgtcaggttttactagtcgaagacacactcaatcaacacctctaatttagacttacaatcttttcagctgcattagtatctactggtgtaccatcctttttggtacgagacttgatccaaacctgtagtcttgtcacgctggaaggatctccactttcaagtttctgtacaaaaaacaacatttcagtgactgtcacaacatacaagcaataaccgtataataataagcaaaataaatgaagtagatatcttgccatttcttctgttagtctgacaatccctttacggctagtggtatgaggtatctgtttctttcttcttgctttaaatgtatcactcacagcctaacaatgaaacatgttactaatccccatttaaatacaaaactttatattcacaagtaattaccttgaatgctgaactggttttgagtttgacaaacttttgccactcaacaggattaatattagttggtctcaaattcatcctctcttggttatttgcagccaagttaatagccttcaccctgcgtgacttgtgtgctctccacagatttcccatctggtttatcacagatatcctttgccaatcttcatcaagctcaaaccttgcctgcattcacgaacaatcacaccataattatagaagaaccggatcaattacagacaacttaaaaaaaaacactacttgttacctgaatagatttccacagaactgttttcagatctcgagtcactttcttccagttaacaatgttgatagggacgtgttcccgcatcaatgtacctacatatgatgacaatttaactgaccctggaccaatagcttctcccattagattgtaatcaactttcactctaactgttggatccttagctaggtttttcatctttgttggtcctctttgtcttttacgcggctgctcatgtcctccagaaaattcaacctctccttctggctcttctgaattgggaacatctctctcagtatctatagatggttggtgttcagttggaggttcttcatctatagctggttgcttttcagttggtggttattctgaatgatgatcctctacacgctgttctgtagctacaggttccacaataccaagatactcaggttcatcatctatagacttcttctttctcttttgtccactcttcttctttcctttagccattttaattcacctgcaaaaaaggaataattaattagttataacttgacaattatacaaaagcatatagaagatctataaaaatcacacatcaaccataaacaaaagcatatagaagaccgtatataaatgaatcaagaagttacatttggcacatatatgccttcacaatcagatctagcatattcagcttcatccatttcagtatccatgtcaacgtctactggtaatggaccaattatatctgcatttccatcctcagactcatcgttactatatcttcttgaagcacctctcataacaacagaccaatttgatccttcttcacttgaataaaatacttgctttgcttgtgatgctaggatatatggatcctttagaaagcttacttggctctgattcaagttaacaagagtgaacccatcttccactttaactccattacctcttactgcccattcacatctaaatataggcacatagaacacattgtagtctagcaatatgatgtcaatgattctcccataatatgataccaaatcaactacttgtgaagtatccttagcactagatctacacatagccgttgcctcataataaacaccactattttgactctgcctttcaagtgagcgtgtgtgaaaacgttgtccattaactatataaccagtataggacctagcagtacatcgtggaccatatgctagccatttaactatgtcttcatgttcatcagaagaattagatatctgcaaaataaaaaattatgattcagtcaagtatagatttataaacagactcatcattacaaatataatttacttgcctctccttttaaccaagcagcaaaattcttagcatgcatagaccataaaactgaagcatcacgtctgcatcttgtatttgagtcttgtaaatattgtaaatgcatactaccaaatcataaacaccttgagttagaatcagctagataaatgtaatttgatatggaaaattacacaaggaacttactccacataatgatcaaaggcagctgtattttgaatgacagctagatgggctatatttttgtccatttcagtaagcgtgaatgatgttcctgctgatattggacggccttctaatatagagctgttcacatactctacattcctgtctagcttttcttctacattggttgtctttttcagaaactcattacaaaactgcattcattcttctgcaagataggactcagctatacaaccctctagtcttgctgggtttcgcacaaaatcttttaaaactttcatgtatctgtaaaatgaaaatgtaaggattagcaataataaaacaataactagataatataagtgtttaaattactaatagagataagatttacctctcaaatgggtacatccacctaaaatgaactggtcctcctaatctagcttctcttcctagatgaattgtcaagtgtaccataatatcaaagaaggttggagggaaaaacctcttaaacatacaaagagtttcaacaatttcagtttccaatactgaaataacctcaatgtcaataactctctgacacaaataattgaagaatgcgcatagccgtagtatagctgttctaggaccttttggtaacagtcctctaagtgcaaccggaagaagctgctgcatcatgacatgataatcatgtgatttcagacctgatatcttacactctcctactgacacgcctctagaaatgttagagcagtatccgtctggacctttaaaatcaaatagtcgcttccagaaaatcttcttctcattcttcgacaaggaccaaggtgctgctggaaggtatgttctctttccttgtgtggtaggatgcaaagcgtgtcgtagaccaagatgttgcagatccttacgtgcattaagaccatccttagattttccacaatgcaacaatgtggatacaatactgtgagccacgttcttttctgtatgcattacatccaaattatgccttactggtagatcctacaatatagacatacatatattttagaagtaatcgatgtatcatacttaaacatataaaagctatttaaatctgaaaacaagtaatcatacctcccaataaggcaaagtaaagaagattgatcttttcttccatctatataactcatcctcatctacttctacttcctcatcttcctcggattcactggatacatcatcactatcatagactggttctttatagacagttctctttctcttcatcccagattttttcacatttccaaaatcattcttgaagtttttcagattttgataaacttcatgaccagttaaaattcttgtctttctcccatgttcaacttttccatcaaaccaagtcttcttttccctatatatgtgtgttggagccaaaccttttctatgacacatatagacatgcttcctgctaaacttcaaccacatactatctgtatttttcccacacaaaggacagcccattttccccttaactttacatccagcaaggtttccatacgcaggaaaatcactaatagtccatagaagcattgcctttagagtaaaagtacttttactaaaagcatcatatgttaactctccattcttccacaaattattcaaatcctcaataagaggttctaagtagacatcgatattattacctggttgttgtggaccaggaatcaataatgtcaaaattatattctccttcttcatacaaaggtgaggaggcaaattgtagtttaccaatagcacaggccagcaactataattactattcttcatgttcaatgggttaaatccatctgtagacagccccagcctaatgttcctttcttaagctgcaaatgaaggatacttatcattcatcttatcccatgtaactgaatcaaccggatgacgaagtttttcatccgtgctcttattagtgaaatgccactgtaagtccttggccatttcatctgatctaaacaatctcttcagccttggtataattggaaaatatcttaatactttctgtgggacacctttttttacctcaccagtgtgctgattagtcttccaccgtgaagcattacatttgggacatttttcaagcttcttgaacttctttctaaagaggcagcaatcattaacacatgcgtggatcttttcatatcccatatgaaagctgtttaaaaatttcttgacatcatacaatgatgtgtgaaggacattatcatctggcaacatgcttggcaatgtctgaagcagctcgttgaagctcttgtccgaccagccattatgtgtcttaatcctaaacaaagtcacaatagccgataacttgctgtggtttgaacagtttgggtatagtggggtttcagcgtccaatatctttgcaaggaactcatcttctcgttggtcttcacactctgcaatctcacttaagtcacccaccagattctcacctaagtcacctctacaagccaactcttcatcaaaaaattcagcagctttatataattcaaaaacttcctcattccactgatttagtttgctttgaactttatccactgacttctcatctccatgatgataccaatcactatgcagcttgtatgcctcatccatccctcttctaacaagatgatcaactacaacacagtcagactgccgtactacattacgacagtctttacaaggacatattatcatgtccatgtctcctaacaccgcagcaacatcccgtacaaatttccaagcacctctttcatagccaggatcagctcttcaatggataagtaaagaaaaaaatagaaactctaagtatccaaaccccatatgaaacctaactataattataattccttacctgtttagatgaacccatgccttgtccaacattatatgttataatataaatttaaccctttatagataaaatagagatacagattatacaattttccaattataatccacaataagcaacaattcagacaattccatgtaaatattcaaaccataagcaactttaaaagagtttttcatattagaaatcagtcaatagtacaccaaatcaggcacataagcaattccatgtacataaactaatctcacgataacttaagataattaagcaagtatactaatctcatcacataaacaacaacattaacaagctatatacgaatcagactcaaaggacagaacattgcaatcaactaattttgttgaatgatactaacctgttgtgtgagtacagagaaatgagaagcttcagttccccaacattgcaatcaccagcacttggaaaaaaaaaactcattcaatataagtttacacatgaatcgttacagattgaaacatgaatcgtttatgcaacaaatctgtaaccaaatcagtaccctaatttgtataagtttcacaatcgtttaggaaacaaatcgtttatgaaacaaatcagtcgaaatcataatctaaatttgagtcgaaactattatcacacatagaggtcgaaatcacaatcaaacaggtcgaaatctcaatcaaacaggtcgaaatcacagagatatgaaacagagaatgaaatcacagaggatagaatacatgccttcgatgagagttcaattgagctgagatggagatttagggcttctcacgaacagcgaaattggggcttttcacgaacggcgataatgctggagatttgatagagatttcacttgtacacacagagaatttggaagaagaaattaggttttcacgagagagagaatattgagcttaggttttcacgagagagaagtatcgagagtttttttttttttagaagaaataataattcactaagtattggcggactaagtcactttttttttccgctccataatttttctatcatagcgtttcttaggtgctattataaagtaaccgaaaaaaatcacatcttttatagcaggtacggtaaatgagctatcctcgtctgctatcaatgtccatatttgttgtagtgacgtacatgccctagaaccaaacaagtcctttaccaccgttttatgataccaaaccatttgatcaacgaggttattatggaatgttgtcgaattcgcatttttgattggccaaaaccatctgatgaagtcattgacctgttcagtggtgacattgaatcattgcttcagcgtatttcctctccttcctagattgaagatcagacagaaactgcaaaagagcttaccctcaaggccaagagattttccactgtttgtgtttactttgtcgccaaaatccctgattccattgccaagttgctcacttcgctctctgtttccgctctctatttcaggagacttgaatctcgagtttctagagaacatcgtcatagcattgcgcatattctcgacttttgagaagaataaaacactacttgttgaaaaccctcttgtgctccctgcgcttggaatgtctatgaaggggtggtcagttgtgacgagaagaaacactacattgactttagtgtcactcttagacattgattcttgtaggagctaaaattcgtaaacactacataaaggtaattgaaattgaaactacaaacattaaggaaaaaacatgggaggagtcgagttaatgaactctttccttaaccctttgaatcactcgtagtgtgatgatttctgtgtgattcaaagatcccaggatacaacctctatttactgatttcgcatcattcgaaactcagctctaacgaacatagttactacgatactctcgagacttacttttaacatagagagattgttggagcttttgctattgctatttgtgtgtaacgatcaaatacttcactgtgtctatcaaagacttgaagcgtaggtttatatagagattagattacaaggtttaaatttgtttttcaacaaatcaaatttagtcaaccacaaatctaggagtggacgacgtgaaggagtaaccactctctccatgaatcctattctcaagggatcgtgaaacagaagagaccaattccttcagtgacttgttttctcctttcaaattcgacccgtcatctaccggagctccatcttgagcaaacaaatccattatggcccatttgatattcacattctttgattatactaaacccaattgggcttttgtaaaaatcagctcaacaatcccccacatgaatagaaatgacaaactaaacatatgaaagactcgacaaactttaacaaactaaactagacttgactagaccagacacaatttgactagactagacagactttcgagagtatgcgaaaatataactatatctgaaaggtaacatttttcagctttgaaccaatcatttttaatatatgtcgggtttactcggccaggaggtgaacatgatgtcttgaaccacccaaattttgatgtaaaccgagacaacatatatcgcacatcgacattttctcatagaactttagttctctattgtgttcattttggccttgaacatgcctcgttattcatgagtgaatttggagaatatagcctctcttttattctcctagaaacggccccatttcacactcactaggtgattatccattagctttatttatataaacatcctgcaacactccatgaaatatctcaaagctatggtatcattagaagctaatgcttaacctcaacacttacaagtaacactatttattttatctttaggaactggatatatgcatagtcttacggtgctcaactcttaatcaacttgatttggttttccctttgaacccagattttgggatctccaatctcataagtggggtttccatcaagtttcatatttattcgtaggctttaaactcattcctcttgatagtctaacaacttgatctcatgtcaagcttttaataaaatgcaacctacggtcttaggtccaatggtgactttttcccatcacttaatgcggtattttgttgaagatgtgatttgtagtaagctaaacctccccccacattttctaggctaagcagaattccttcaacattgcattcaacatttccgtaagaattcaattttttattttccgcaactccatatacttccgataaataaggaacagtaagttgatgaataatgccatgttcacaaaatgcattaataaaaagggtaatattaagggatgaccaaatttgacagcattattaagaaaataaccttcatgcagaaaagttgggtaactaaccttttttgggttgcgaaataactattttaccctttatatatgagagaaactctttctttccaacaatagctatctagatgtagggaacaaaaaacattaggaagtaatgattacaccgctacttcttaaaaaatcaaacaatattagacaactaattaaaatcatacccaatatctacaagccttaaaaatgtacatgtagaagaaaacttagttaaaagatagccatttagaaacagttgtgattagaagtgtctaggcccaaatagtgtaatgaaatttaatctataaaatcataaaaatgaaatttttacccgcagtcttagcggaccagcccgttgggcttaccggggcgggcctgaaggtattatttctgcccgcggtctgagcagaccagcccgttgcagtcttaaaaattgaaagctcattgcgggccagcccagatggacgcacgccgacgcacgctgacccgtttgacacctctagttgcgattgagtacagaaatgttgcataggatatttaaagaaatgctatttatttttattacatcaaaacataggtttattgctttgacagtatggtaaatgggcttcaacaaagataagcaaaccacatccgtgttatttatagattacataagattgtatgaatttacatgtgattatagaaaaacacatgaatcatgagtctgtatcctacgtgtgattttagtaaaaagcatggattattagtaaaatgcacattatctttaaaatagttgtcttatcgaaaaaatacaaatgttttaggaaaacttacatgtcaaataaaaaaaataacatgaacttttcaaaaaaagtacatgcaatcatttgaattgagagaaacagatcattgtaattttagtaaagaaaatgtattatttaaaagaatatttgaaaaatacaatgttttataaaaacaatacatgtcaacaaaagtaaatggcgttggtgaagaatacggaagaggcagtggtggtggtgaatacggaggaggtggaagtgtttacagatctggtgatgctaaatacgcaggagacggtggtgttacggatatggtggtggtgggtgtcgtgagagaaaaaacgatggtggaaacgaataataatgcgtgtgataacagatagggtggtggtggttattgccgtaagggaggaggaggttatggaagtttaagtggtaaacgcatcaccaagcttgaattcgtcatctacaaccctgaaaagtaaaaatttggtgattaaatcatgaatcatttatactctaaaacacactccgatgtagaagaaattgggaatgaatatgtgataaataattggcttatctgtaatcgttagtagcttccatgagtatcaaaacttttttcttcaagctgcgctaagagagccaatttctataaaatgtgaaaccttctctcaacgtatttttgtttttattttttaaagttggctatagtattttaattgacaaaaaaaaaaacaaaaaagctatagtactttatgtctctttactctcgagtttgggagtaggatataaaagtaattttctaccaattccgacaagtcatatacatctattgttagtttttctattcttttcaattttatagttagtttatgcatatactctaataaaaattcatcatatttttctcctcttccacttcgaattatcttgaagtttatcaagtattctttgaatttgttttaaaatttgtacttcatagaaaatacagtaatcataaagtctaaaatgactttgatttttcacgaaactcaagtgagtaaaccacagcttaatacttaattattattatttgcaagcaaacaaaactggaagtttcattcacttcacattatttgatttgcatagacataataatattgacaataaacaattgcaattattaaagccaattgttggtcaaagccgttgcaggtcttacgaaccaaactgcaggtttaatataatttttcaaatttttagaatattaaaccgaaccaatgggtcttgatgcagtattaattcactactaccatccaagcacttttacttgatcgtttatattttgcaaagagagttgcggcttctatcacaaactctgaacttagtttcaagttttctactgaaataaactgcaggttctaatctttagacacttagagtaagcatcaatgagtctcaaccacaaattctgagaaatcacattttctcgaaatcaaatataattgcaggtctctacaaatatatcagaatgatgttcaaatgaagcaatctctaaacatcttaaaacatcaatgcactacaggaaaagcaggtattaatagcatcggaaaaacactattgtatcaaacgacatcgttattttaaacgctttatcatcgcccgtgataataggtctccccctttctatagcgtttttccctcttgctattaatattgttttaatgataaagtttcttttaatgcaattgtcgtgtttttaatagctctctatttttgttattaaaaagttcatttatagcaagagatattgtagcattttattataaatacaattgagtatatacaatagcagttttcttttgctcatatagattattttgataacatcttatactatagcagttaaacatcatataagctatagcgtctgattattatgattgtgaaactataattttaaatttattatttttaaaatctgtatttaaatttttattgggaaataaataaattgatatcataaattttaataatttcgtaaattatattattttatttgggttttagataataatttatatattttgggcataaatttaagttttgaattttgttgttgttcttttaaagagcccatcaaatttcttatgttgttggtatctataaaatagcagattagagttttcagacataaacaaatgaaaattttcaattttgtgaaagcccattacactttactttgtctagaaaattacatttaattatttaaaaaaaaaatatgaacacaaagcctctttgtattctttgtagatcctatttcaatggaaacttgatgagtctcccaaaccttattcgtcgtcttcttcggttctactaactacatcatcaaaaacaacaacaatatgagccatatgttttcgttattttttcttcccgagttggaaattagtaattcttacgaccgttctctatattcccagctccgaattcatagaataacttcaggtacatgtatagaggcgacatctccatctgcattctccgaacctgtaaataatatgaattagtgaaaacaaatagagagagttgaataaaatgttgaaatgttagaatcaaaggagatcaaaggaaataatacacggcttatggctctttgttttgaatctgaaaaaaaatcgagagaaaagaagtcgagaagcttcgtcagtcgggtttcaatctgagagaacgaagattagggattttagggattaaattctcaggagctcttcaatgggcaaaaatattctcagatactcctcttataaaaattaaactaatttctatttttttttaatcgacatttgtgaaaaagactttagaatcccttagaaattgagtttattaccgacccaaccaagtataacaaataataaaatattccaaatttaatgtaatcgggtcaaacgttgatagatttttttttccttcttttattgttattttttttttggttcaacttggtataactacataaagaaataaattggtagaattcgtatcgatctatttcttctccaatttaattacgttttatatgtttttcttctatactttttcgtcgattccaatttagcttggtctaatatgttagtttattttcaattttgagtagaattagattgaaattagataaatttgttgtgaatctaattaattttgtttatagtttatgaaagaaagtaatgactcgaacaaataacccaattaataactgagaaaatctttggaaacgaagaagctccttcagaaatagatttttatgcaacaaatccaatctctcacagtgattcgacaatataatctataatcctcagacaactagtagaacttggtttaactatgtttctttcttaactaagaaattttctgataataaaaagtaaaactaagtataattttgtcagatgctctagatacatttacatactttgcttcatgaactgttcttctagatgatatatatcaagtttgataaagctttaaatgtgtgtatatcagccaacatatatttgcagtcgcttggctccactaatagtaagctaatgtgttgggagggtttgagttgattctctttgatatgtgtaactcaaattcatatgtaaaagaaagaggagaagagtagcagcgtcggctaaagtggattcttaagcaacaaattcaatctctaacgacgattcaacgatatgaactttaaactttacacaactagcggcgattccaagtaaatgaggcgttaaaaagctgaaggtggtaaagaagatggcgaaggcgaagacgaatgcgaagccggtgtatcggagccctattctagcaaaaaatgcaaagacaaagacgaagaatgtttaaacacttttaattggttgtttgtttttgaaaactttgtttttcgattttgattatgtgacgtgaatcgggttgttgttttattttggtataactgtgttgttagttgaaaactaggtacaactgttaaacatgtttattgttatttttatatcttcttatgttttctaaaattaggtacaactgttgcatgtttattgttttcttttggtgtatctccttatgtttgtaacactaggtacaactatatgtctttataattgataagaaaaaatatgaacccaaaaaattaggttttctctactacaaacacaacactaattagtcttcattattaaatttatcacatcaaattcaacacatagtcttcataattagatttgaatctgatctaaaaattttctcaacgattccatcgccacaccaacactgctttggaattccaagaacctttaatcttggtcgggcaacggaggttccacacgatttcaaaggtcccgagaggtaactcataattcctagagttttggatcttaaattcatgaaaatatccaacagataaaccaggttgtactatatgaatcttcaatcttaaaatcgtgaatagtcaattgaatatcacaaatctataattgaaacaaaaattgaatgaaaaatgtacccagaaatcgaaaacttactcaaaaccatctcctaatacttccactattctctcttatttgtaataatgaagaaatttaaatttttagttttagggggaagaggaaaacttttgaaaaagaaaaaatgtggtgccgcaaaaaaccgtgagacccataaatgcaggtacactggcacaaaaagatgcatgagtacatcaggtgccgcaaaaaaaccgtagggcccattaaaaaattgcacacagattttcctagtttacaagttgttctcgtatatacacagattgacgtttaggagtttttgtatttaattagatatacttagattaaaacttaacaaatttagttataccaaagatttttgttgttttagatacatttcatatagtttcatacaaaaatatgtttaaaaacacttattttgtgtgttttgcaatgttatgatgataataattataaggtcatcttaaaagtataaggtctttcttctataacaaatgaattgatgaagactcgttttaaaattttgagtaaataattattttatcaatcagtagttttaataaccaacataagtagtataatttgtataagaaacaacattaaactaaattttattgcaatttatgcagatttgttaaattagtcatagttgtaccattagaaatcaagtttaatcaagttttacaaaatcagaaagtacataaaaacacgaatacattaattttgcttggatcttggccacttccctggctgtcactttcgcgatttggaagaaatcagctctctaagtttctttctttcacacgcttttcctttggcgacgttctccaactgatgggtgtctagtttcttgaattcttccatttttaacataagtcaccggaggatatgcaaacaattcttggatttcacttagaataactcactcactcagacttatgcggcacacggaaaatggttctaacctaagccataacccacatctcaagaaagtaatatttttgtgaccaaatcatataaactttgtacctcccgatggaatgtaactcaatttcagcttgaacatagattcatctatcttaatcttcatgcatatcttatccactaactgaaaataagttatctccttcattgatgatgtcctaaacaatataccatacaaacaaactacttttggatttcactgatatgcttctccgatatttgaatagtattcatcataatcaaaatatatatttattggaaggttgctcattctcctgggaaaaaaacattagctgttatctcagaaattccagttgtaccagatataccacttgaaagagttataccacgtttctcacttatacccggatttttatgttctatcaaattgattctcggacccaaaacactaatctgcctaagattaactatgaatcaaccattaccgtacattcaaatgtcttaatcgacccagaatacatcgttaccaacataatctccattaattttaacaccaatttcaaacctatcaaatctaattgaaatctctaaaatacaaacataacaacacaagacttgatgaattaagatgtgaaaagaagaaaaagagaagggtaaagctcactttgaataacagaagaagaataacaacgagattgatcgattggattcgacgatggaggattcgacgatgactgcaaaagggcgtcgtcgattttgtcctgatgaggaaaaagggaaggtatttccaggtatttctgattggttaattttgtttttattttatgaattaaataaatagtattgcattggtttggaaaataaaccgtaatcggtttgttttgttcggttcgttgggtaagggtaaacaaggatttttaaatttcattaagagtatgagagtaaatcagattatagaagagtatttagactcatttttgaagagtagagagtattatagatcattgtccggatatatatttttttttttacagtcgtgtatgaaaggcgaaaggtcgtgtgcaaatgtggtttttatttgttgagtgaagtaattaaaaaaataagataattagttatgccatagatatcgagaatcagatgactatctaatccaatggtctcctaatacgccacctcagctatccgagtgatctcttattattgttgattttttttgttttattttaatcatattttctagactaatgaaaaacaattaattgtagtgtaaatttcgaaagtaatatgtttagaaatctcttatttatgtactttagcattattgaataactttttcaagtttaattagctagtatattacaagtacactaagtttcaaaattgaattctctatacccttaaccctatatcctaaagggtttagagctagtttagggtttagggtatagaaatttcaattataaaaccatttagtaatatatttattagttttaaatttatttgtacttaatattattaaataactttatcaagtttgattagataatttattaataaactaagtttcaacattgaactctctataccctaaactctaaaccctaaacccttcagagtttagagtttagggtatagaaagtacaatagtcaaacatattaagaattatcaatttaaactaattatatatatatatatatatatatatatatatatatatgatctttagatatgattatgtaattatttgattttatttgcttttagtaattaatcaaattaattatttgcaattatttgattttagtaatatataaattaaattaaatgtatataagttaagtttgataaagtatacggtttaatatgtacttgtaattaaatgtactgagtttttttccagaaatattagttcagatttctatgtcatctaatagactttgtttttgttttttgtatgtgcacattttcactagaggaaaaaatggttaaaaaacataattatccaaaaacacagaacttttatttaatttaaggtaagtacttagatgaacaagactttgtcatttggccaagccattgtcattcctattgcatcagaaatgtacacgatttctgaatttggtctccacacacatgcatcaccaatcttagaaacttctacccacactttgctagcattcagacctaatgggacgtgatggataacagcagctgagtcagtggagcatactctgccttctgcaagtttgcggccggagttgttacaggccaacaaaatgcactttttctttgctcctttacttgttcttgtggtgttacttgcactctagcacccaaaatcaacacaaattaattactctcatgacaacaacatcgataccatacacatcaattttttccacagtaccaaaaaagctagtgctcaaaatttaccggagtagatgactttctgcctcattcaggtcgtcttttaactgtgctggttgtgttacttgcactgtagcaccagggaacacaaatattaatatatgcatcagagtgacatagtttttatctaaaggggacttaccatagtagatgatcttctgcctacttcctatacaggttcgtcaacaaagtttgtctattctatgatcaggccatgctatctttgttttaaatgcatcagccatcacaaactttttgggatttggtctccacaaacaagcatcaggtttaaggactatgtcaactttcaggataattgcattcacacccaaaggtatgttattgatcaactcatctttgttgcttgaacagataacaccctcagctataacttcatccattttccaatccaaaactctacatctaccaagttgaccatcatctacaccagtatcctatagtagagtagtatttattattaatcgtttgatggaacaagtgaacatatagttatagttaaaatacattaccttgcctccatttgccgtttccgagtcattctgactctccaatccagcgtccaatgtaactttatcaactagccatgcaattttgactcctaaagcttgttgaagtaagaacacatctggcgttggcctccaaacagatgcttctagaactcatacagacgtgacgattacagctgcgccatattcacccaacggaatacgacctatccgatagttaggttcagcagatcaaaactctccttcaccaacaacaatatctttacttgaataccaatccagtatctaacacctaactcctttgctaacatcactgacctccgagtgagaagtccaagtggagtttttctaattaaaaaaaaatagaattgatgcagtcatatttaactatagacagttaattcaacatagaaaagtgagagaagaacttacattctttccagccatgtcacgaacaatattcttcaagtcttcaacctcgttttgcaattcttcaagtctcgagtctctagcctgattgaaagctagcttggtagcagttatccctctgcccaaccctttgtcacgtcctgatttgtcttttcccaaaacttgactcacaacatcttctcttatgttatcacctaaagtggagtccatttgactatcatgtgattgtatatgttcctcatacaaaacattgagtataatttggttatatagaatgcctttttgattagtgatagggatattaataagataaagactgcttacaagtgtttcagcaaactcaggtctcacgggtctaccataagagtgagtgtgtcctgctatccaaactttactccttgtgatctttttagggtcatcactgttttttctacaagtaatccaaattacttacttatcaggattttggtaccttctattgattgtatctaattcagtacagaaaatatctcaccatttcatgagctaggtgaaacattcccttccgattggttgtgtggggattttgagcctttctcaatttcctaaacttgttgctttttttcctgcaatagcaatgacgttggttgttgagtagactctaatacatactaatagtaggtacacacaatgaaaaaattgaaacaatttcaccttcaaagttgtgctagtccaactcttaatccaagaattccaaactgtaatagatggtatattgcttggtttcagtttcattctctctgtgctactcttaccatctcgcacctgagttaggagcttaggctttgcaaacctccatatacaacccatctgtttgaaaatagcatcttttctaccactcttccttcaagttaaacctcccctataaaaaacatggtatatgttaatcttgatcaaacacgtataatatatgaatttgtaaattgaaattcttaaacctgaatttccagcttcagactgtacttgctcatcaggttagtgacttgtgtgtacatcttctttttcagcaacatcttcctctacaacttctttctcaacagctacatcttcttgatcaccaacaaaaacctctataccatctttctggacattttcctcaccaacccgcaccttaacaactacttcctaagcatctttttcaccttccagaatctcaagattatcttcttgaacatcaatcatcagttctgctatttttgtcttctttgttttcatagtttttggccgctttgtgatctgtctagtctccaagcctccctggcattcactgggatggactaatcctcctcttgtcctcatccatcaagatcctgaaaaccatgaattaacagttaaaaatatttttcaaattcaaaataagaagcaatgtcctactctgccattgtgaacccttcacaatcatgcctaacaaagaaactctcatcatcagaagattgattcccaaatcatcgtctaattggtctgataaaggtacaccaacaaactcttcctttgtctccaactcgtgatagcctctcggaggtgccatcataacaacataccacggtgatgtgtcattctctctagattaaaatacttgtttagcttgtgatgggagaatatagggatcttgcatgtatgacgcttaattcatatggaggttcacaagcgtgaatccatcctcctgcttgacaccatatcatctatcggctcaattgcatctgaataatggtactgtgaacatgtgatactctagaaatattatttctttgaacactccataataggtaactatgtcagcagtttgtctagtatcccgtgttgtagatctacacatgccaaaagcttcataagtcactccactgttctgagttagaagggatctaatgttcatataacaatatcagatacataaattaatttaaaaacatgagaaagagtgttaaagtgacgataaaaaccaaatagatatgtacaaagcttttttttaattcattgggcaactgttttgtatgaaatttccatagcaatgtttcatttctagcgcattgaccatcctgagactataatacttccaaatgcatcctgttttccatagataaagctgttatcttactagtataattactaaagaagctataaacagttcaacttactccacatagggatccacaggtgccatgttcatcaagacatatcaatgtgctatgtgatataggtcaaattaatcataagaccactctctcaaataaagaggtcaattgcagcgcttagggatcgaataacaaagttctcggatcacgcaatagactaacggcaaatcgaattatgctaagtaaaatagtaaataaaataaagagaaacaaaagtatgcaatagcaatcgattggatggttgtgaaacaagataagaaaagcgtcaggcttaggctattctcaggaaatagatgatagtagatctagaaatagctaggttattatcgcaccgttctcgaactcaaactatgattttagagtaacctgtggtgttccgcgaaactctctatacttagagctaagataaccgaagaagccgagaaatcttatactaaaccatgcatttttatcaagaatgattagttcacctagtatctaaactagagcccttctatgagcctatctgttctttcttaaatgcctaggcccatctatgatggatcaaatagcaagtacctatggtggacatacctattatctaatatcaagttctagttagctactctataactagcattaagaacaatcaagataaagaactctacagataacctagcaagggggcaatctactaaatcatctaaatccctaatgagaaaccctaaacctaacaagtgaattactcagacatgatcaaagaaacacaaatcatagtctgaataaggaatcaataatagcaagaaaaagagtaaagaagatcttctccaaagggagtctccacagggttttgctcccgaagtacaaaaaaatagagaatatcctttccaagcttagatctaaacaatgaccctaaaaacctaattatatgtctaaaacacgtgatgggccttcattaaacataggagaaagttctgggccgaatttggaaatcttcaaaacatcaataagttgtgtctcgaaattgccgtcaagtaatggtttcgctcgacacctaagttcattttcgtctccggattgtttctgcagcttaaattctctgttttcctccagaatgttccattatctccaaatgaatccaaacatgtaaagacctgaaaaggactagaaaagactctagaaataacaattagactctaaaacctatatctaaaacatacttaaattaggaaaaatagggatatatcactatgtctctctctttctctgaaaggacaacttcttgacccctatgcaatggtctgccttcaacaacacttccatcagcctcaacatcgtcattacggcttacagcctcttgcactggtataaaattttggaggaactctaagcagaaggcaatgcactctccgactaagtatccttcagccatacacgcttctggtctagcatagtttgttacatatcccttaagtgttttcatgtacctgcaactcatacaatttgtagtcattatgtctgaaagtaacttctgtcaaagaacataatgtaaagatagaaataagaccatacctctcgaatagatacatccaacaaaagtgctttggacctcctaaccgtgtttctcttgctagatgaattgggaggtcgaacatgatatcaaacagagaaggaggaaagtacctctccagttgacacattgtctctacaatttcagactcttaggaaattagattctcagggtcaatggtatgttggcacaatctgttaaagtagttgcagactcgagtcactgcagccctacgtctgcttggcagcaagcctctcaaagcaacatgtaacaaattttggatgagtacatgatgatcatgggactttagacccccaatcacatgagggttgactgagacacaattagcaatattcccacaatagccatcacgacctctaaacttagacaacctctgacaaaatacctttttctcgtccttagacatccagtaggctgctggaggcaaatatatttctttccccgagtctttgggtgcagatgccttcgaattccaatatcatccaggtattttcttccttttaagccatctttagacttagcactttgcatcaatggagacaataaagcatcagacaagttcttctccacatgcatcatatcaatattgtgatgcacgggtaaatcataagacaaagataatcaaagaatcagtttgactatcattttaataactgtaaagtgctacaattaagacttagaaaaatataaaatattaccttctagtatactaactcaaacaatattgaccgcttcttccaccgccacagatcaatgctttcatcacactcttctaacaagtctgatctttttcttttagcttccttatttaaaggtcttccaaaatcattcctgaagtccttcaatatgtcatatatctcactatcagactgaatccttcttgcggtgccttcctcgacagtgttatcaaaccatgatttctgcgtctataaggatgtcctggtctcagtctctttctattacccatatacaaatacttccggcaattcttcaaccatctgcaagatgtatcctttccacatgcattacacgcttgttttcctttcactttatagccagacaaagtgcctaatgtttgatagtcacggattgtccacaacaacatagctctaagggttaacatctctttcaaaaaagcatcgaagacctcaataccctcagcccacaaatctttcaaatcatcaatcaatggtgcaaggtacacatcaatattgttgctcagagttgttggaccaggaatcaacaaagtcaacataatattctcaaccttcatacaaagagatggagctatattgtagttcactaacaagattggccaggtactatacttggtgttctgaatagagaaagggttcatcccatctgtagacagaccaagccgaagatttcttggttccatagcaaaatctggccatttatcatttacttgagcccacattatatagtcaacagggtgtcgcattgtaccatctccacttgcattgctataatgcccctgcaattcctctacaatcctctttgatcaaaacatcctcctaaatttgtccttgattggaaaacatctcaataccttcgctagaatccccttcttttcttcaccactattcttatctgtttaccatcttgaagcactacacctagggcaactttcaatcttatcaaaatattttcgatagaggatacaatcattcttgcatgcatgaatgacatcatattctaacccaaaaatctttaggaatttcttcattgcatcagtagactagcaagggcattctctttaggaagcatgtcagggattaacgtcaatagcagatcaaagtagctttctgagattccactcttcacctttatgtggtatatgcccattattgcagaaaccttggtttaattagagcacgtcgagtacaatagagtttcagcatctctcagtttctgcctaaactcagagtcttctatagtttcaccatccaaattttctcctccaaagttgtttgatggctgtgtatcatcaccattacaataagccgtccttaacaaattataagcctcaaattctaatgttggaccattatcagtaatatcactttctttcaccatgcatactccagcaagaatctctcatgtatttcttaatcatacccttgatcacaagatggtccaatactgtgtctacttcttgatggcaaacattacggtaatcaatgtagggacaaaaaagttcagatggatttcccaatctccttgatgcaacaataacaaaatttgttgctccttccacatactcttggcttgccctatatgtttcatcagacaataaagagttcatatcactttattttgacttagtttatgttattaaaatcaatgaatcaaacaagactcagtatcaacaagactcataccttggaagccacacccatcccttgtccatatcacgacaataggacaacaactccaccaccaattatagattttgtaatgataaattcaaacaataatacactcagctaaatttcattcaaatcaacacatacttggaataaacaaattagtatgaaaataacaacttacagagtaaaacagtcgccaacaacaaaaccttgcagctttgaaaaccgtctgcaaaacaaaatcaatatcatcactaccttaaaattaaaacccaacactttaatgtagttggttcgattaaatccaaaatctcacatacctgtcggttactccctaaactgaactgcaaaaccatatcaaatcatattgagaaattagaaatcgattatcgaaatcaaaacaattaaacctaattcccaaatctgaaatcaaaaccctaatattaccttataacccaaattcgaccagacaacttcgatttagaccgatgaagacgatggcgattaaaaagatttggatctactaaacattcacagagatcgattgatagagagatgtcgtgagaaccaaagtcgaatagtcgggagagaaaggggattttttctgggtaatttttttattttttatcttttaatctgggtagtcaacaatttaattttgcggtcaaacaaaatttattttcgtggttcaccatttgatagcattttcattatgcatatgctatcgaataaccaataattaaagcgggagacaaatacttgttgccgctcaacatagaatagcgtttgttttgaacaaacgctatagaaaaactggtcaaaccaaaactatagcatatacttacaagacgctatcttcaactgctcttaatacccgcttttcctgtagtgatgtcaactatgaaagactcaaatccaataaaagaaaaagaactaaatttttattaattggaacaaaggttacaacttagtcttattcttcttcaaggtcaaagccttggttacatctagttgcgaataacagattcaacaaagccttttccatgatacattccatctagttaaaaagaccatcacaaacaaagccatttccaagatacattccctttttcgtgatgactagcttatctgcatcaatcttgacagcgaagccatttccaagttcttgcgcatgttaggcacatgaaccacgttggttagaatcagctcacgtacagaggtgagctttaagatgactttcccgtcaccttcaatctttgatgtggcggaggcatatgtgcctagtagcattggtatcgaaccaccaagtcatgggatggctttcagcgacgttggcttcagtgccgacagcacacatgtcttcttgagttaggttagcttcattcttatttgaatccttcttactgcgacattcaaaagacttgtggccctccttgccaaacttgtaacacgttccggtgaacttgcttgtgttctctccggactttttttttaacttttgagtattctgcggaccaaccttccctttccccttgttctgccacttttcttttggcgtgttgtgctctgccacatttgcattggggtcaacaatctgcacaccaactcgcatttattttctattcgttgactcgatgtggagtctaacaatgaggtctttgagactcatcctctttctcttcagcttgaggtaatttttgaagtcgttcaagcctggaggaagtttctctatcatacaagctacttggtatgtctcgcatatcctcattccttcagcgtgtatcttgatatggttcaaattaccctaagaactactctctcaaataagagatccattgcggtatttaaggatcgaattccacaaagttcttttcttcaaacaataagttcaatgtcaagattaagctagaagggtatgatcgaaataataagaaaacaaaggaagaaaacagtagattgtttcgttgtaaacgattaaataaaaagctaggaacagggtattctcatgaaactattggttagtagatctaatgaaagctaggttgttatcgaaccattcttaaactcaaactctaattatggaataactggtggtgttccgcaaaactccctataattatagctaagaataaccggagaattcgagagattattaacctaaatatgcattcttaacgagttcgattgttcaccttagtagataggccaatttttattacacacctataaaccaggctcatcaaataatagatccaactacagatacctatggtggacatatctattgtctggattcaagatctagttaattactctagatctagcattaagcataatcaaagatgaagaattctacagataacctagcaaaggggaaaaattactaaaccatatgaatccctagtgagaaaccctattcctaacaagcagattactcagacatattgattgaagcgaacaacataattgtgtatgaaagcataaacacaacaataaaaatgagggaaagaaagtatctcttcactgtattgaaaactgaatgaatctctgaaaacaatgggtgaatagcttatgtctctcagtaacagggttttgcaaaagcttgataatagaaactagggtttagaacaatgtatataaaccctataaaacgtcaagggactaataatgcaaataggaaagtcttttgggcaaatttcctcttctataaacttgtaagcgtcatagacttttgcagggccgaaactggtgtcgatcgacaccaagagtgtgtcgatcgacactcctcttgattcctgggtccaaaatcgtccttagcttccttttccttacctcttgctcgaaatgtctcctcatctccattgttgtcccgttgcatagaatacctgaaaagacactacaaagactcgagaaataacataaagactcaaaatccattaccaaacacatagataaaatcggtgaaaataggatatatcaactccccaagacttagcttttgcttgccctcaagcaaaacacaaaagtcgaacccgtggaagagattttgaaaacaaaggaactcccaacattctctagactattgccatgatcatccaaactaaatccacatgcctagcaagtctaatcaaatcctaaccaacatgtacttctctacaagcttacacaatattctagattccatacctaagttcaacaactatatccactaggctttcatcgctgggtctcatcaaacaatttaacattcaagatccttctagactcactcatgtactataccatgataaatcgaccattctttatatagttttttctttggtgttctttctctcccccagacttattcattttagagagtaaacaaagggaaactcgcatactggatcgacaccctcggcatttttccaagctttgtaattgatcattccaaataatgtataataatggggtcataggaaacattcctacccctatacactatccgaaaatcctgtcaatctctcattatcttttttttttataagggaagagaaacacattctttttatcacattacaagaaaacacggtttttacgactgcaatagtagtcgcaaagtagtcgttaaaggagtagttacgactatgttacgactaattcccgatgtcgggaatccatagtcgctaacccaaatagtcgtaacattagtcgctaaataacgactacgagacgactaatactcgatgtcgtaagatctgtcgtaacatagtcgtataatatgacgactgagttacgactaagttaatattgaatcacatgtatatcgactcgtgtatggactactttgcgacaatttagcgactaaatagtgactaattaacgacagttaagcgactaccgtttcagccaaaaaaaaaaaaaaaagggtgtttgattttgtttgtatccaaattcattccaaaacacataaaaacaagacaaaatcatgattcaaaacaaactaaaaacctgaaaagattcaaaaatcaccaaattcaatatccaactatgattttagagtaaccgatggcgttccgcgaaactccctatgcttatagctaagaataaccggagaagccgagagatctttaacttaaacatgcattattatcaaatttgattagttcacctagtatctaaaccagagcccttatatgagcctacctgttctttcttaaatgcctaggctcatctatgatagatcaaatagcaaatacctatggtgggcatacctattatctaatatcaagttctagttagctactctagaactaccaataagaacaattaagatgaagaatcatatagataacctagcaaggggcaatctactaaatcatctaaatctctaatgagaaaccctaaacctaacaagtggattactaagacatgatcaaagaaacacaaatcatattctgaataagaaataaatgatgaaaataacaagagaaaagagtaagaaagatccaaaagggagttttcacaggtttttgctctccaaagtacaaaagagatccagggaatagcctcccaaagcttacgggtctaaaacaatgacctaaaaactatatatatgtcttaaaaacatgatgggccttaattaaacataggagaaagttctgggccgaatttggaaatcttcaaaacatcaataagttgcgtctcgaaattgcagtcaggtattagtgttgctcgacactaggggtggtgtcgttcgacacccacgtgcattttcgtctccagattgcttctgcagcttaagttgtctattgatctccagaatactccataatctccaaatgcatcctaaacatataaagacctaaaaagaactagaaaagactctagaaataacaattagactctaaaacctatacctaaatcgtagctaaaatcggtaaaaatagggttatatcagaatttcatgagagttataaagtagggaacttaaaactgagatggtgaagattagataggatcggttgtggttgcttcagatgaatgagtagccataaaggtgagaaagtctggatcagtttggcgtaaatacttttccaccaaggccaagtgatccagcttgtctttctgttcagccacagctcggacttgctctgcctcacgtctagcatgatgagcagcctgctcttcgatcttctgttgagcttctttcagttgctcttgcaatgacacaaaggaggtagagtctgctgcatgtttgccctttccagtgactagatccggaagattatctttgaggcttccaactacataatagttccctcttgaatttgtctctgtggcctatgaaaaaaatagccataccattaataaagagtttgagaaaatgcagacaatatgcaagtgaaaatgtaaactttacctccagaaagatgactgtatgatcatctattctgaactcccgaggtcttgattccccgtctgaaacatttgaagtctctgtctccatttcagacaacttcttgcagcttcttctcataatttttaacaatctgctctgcctttttgtcgacataagtaccatctggtttggtatgagtcttgatgaaaatctcacgaacactcaccgtccttcctaactctttttcctgtgatgttaaaaatgaacaaggcttaatacaacatctgaaattaagacagagacacattaaaaaaaaaacagagatagaagttaataaccagttcatgtttgatattttgatatgactttggccctcacaaatggatgtgaggaccgagcccattacggtcagacaagcgtgctttggaatatatatgacttctcgctattgcttcttcagtatcccaatactcacacatcgctttccagatataagaatcgatgatccatttagggcactctcgactagtccttatcgtgctaaccatgtctttcatccttcgtttacagatttcttcaaaataccattgaactgtacctgttatcaaaggatcccaatggtgtgttttatacaaataaaaaagagaagatgttaatgaaaacaaagcagcttaacttaatactctgaaggcaagaggaaggaaaactataccacaaactcgagaaaatatttttctcgtctatcctgaggaacacatgaccagctatagaacagaccatcaaatttgtttgtccatactttagtagtcttcctaaccaggcttgaatttgtgtcccgagtaaacctgcaagcaatacacaagacacttaatacaatcaaaaccaatacacatgagactcaaaaccacaataactaatcatcacaaacacataagactcaaaaccacagacaactaatcataacaaacacttaagacacttaagacacatctaattcaaacataaaaacacacgcttaagacacagacacattcactcatcaaaacaagacacttaataagttgtgtttggcatcagactctaatcaatacatcaaaaccagccatgtcatacaaacgatatgtcatatactcattactcagtccacataatcaaagacaagaatcatgatgaattatgcaacaagattgatctagacatcaaaacacaatacacatataagtcacacaacataaaaactaattaatacacaagacacatctaattcacacatcaaaacaaacacttaagacacatctaatacaatcaatacaaaacaatccaatcaatacacttaagacacatctaattcagactctaatcaaaacactcacacaacaaccaataccttcaggttccaatcaatacaccaatcaacatttaattcagactctaatcacaatccaatcaatacacaagacacatctatactagacactcgcacgactacactcaatacactcacacaacaaaccaatacacatgagactcaaatccggacaactaaccaagacacatctaagaacttaccaagttgtttttggcatcagtgtgggagaaagcacggtggtccacgcctcacgaccaggcacttgaagcacatcatttagagccctcaaactgtcctcccggagttccggtaacacatcagccacaggttcgtggaagttgttgccttgggaagatggataacttgcatgagagttctgaagtggagaacttgaaggatcctgttgtggaatcggtcgattagatgcctcgttctggacttcttctgacaaaagaggtacagggacttcacgattagaggagttctggaaaagggcttgcggaggtggatagtcagagactcggggagtgaatgacctagcttgttggggttgaacccggactcgctcttgggatgactgaggtggaggattgttgtctgccggcgtaaagttgtattgaggaggtagagggtttattcttttccccattgggttccatttttctcttccttcctcgcttagctagaggcatcaaatcgaacttgtttgcaaaccatagaggagacgattcaatgaaagtgagagagatccgagagattcgaagaagaagatagcagaaggagaacaattgatgaagatttagaggaaggattgaagaaacgaaagagagagatgaagattctttagggtgaatcgaagaaacgagagagagagagaggcggaagacaaatgaattagggttcttcattctcgttcttcatcactcgctaatcaacacaaaaattgggctttgtttgggcctcgttaattttggcccgcgatagttttctcgggttttaattcagcccaatgttttgattgtagtcgctaattagtcgttaagcagtcgcagcgtatattaatttttttaataatcataggttttcataactttggtctatatccaaaacaaagttatttatgtgattaacccttcataccaaaaaaaatgttcaatcactatatatgcattaatatatatccttttttaattaattaatgagagtgatatatatactttgtacaattttttaattaaagatagtgcatttttaaacaaaatcataagttttaattatttatgtgattaacccttcataccaaaataatgttcaatcactatatattcattgatctatatcccttttaattaattaattagagtgatatatatactttggacaattgtttaaagaatgcatttttaaaataaagctttgaactgaaatatgttataatttttacttatatcttgacaattacaaaactaatagtctaattttagcatatctaattttacttagtatacacaaaattataataatataaaaattctttgattattgttacaattttaacgatttattagcgactcttaattctctgacttacttatagtcgtaacgtagtcgttacctgacgactatttggacgactatttataacagtcgtcatttagcgactactgaacgtcccttttattttagtcgtagatctgtcgttgaatagtcatttaatagtcgctaaatgttacgactacttatacagtctccagatgtagtcgtaaaaaccgtgttttcttgtagtaatattaggtctgaacaaagagtcaagatctatgaatactaaccatttgaagaggtaaaaggaagagcaatgacattagctccagccttagtggttttgttggaaactaggatatcctcaagtctgttggtttgccatctagattttccaatagttggataggctcgcaccgtagcactcattaatcaggcaataatcaagaggaaatatagatcacgattcttaactaaactaaagaaaacattttttttttagggaaagaaaatgactcaataaattcaaaaacgaaaaataataagaattaaaaataaaaacataattagtaagaacctcctccagacttaaacgacattgtcccctgttgcattcaaatccagagaaaacgggaaaaataaatcaaaaataaaagaaagtaaacgaaagggaaagaaaaatcaaaccaatgggttgtctcccactaagcgcttgtttttagtcaatagcttgacttggtggagttcaggatgtaggtggagtggtggaggattgctgctgcctgctcgccttccaagacacccagtggtgtgtcgatagacactcatctattcacctgcaagaacaacaggagaaacaagctttcgaagaactctaggcttgttatctagtgaagcagacttcaaagaagctaaagaattaatcgaaggtaaagcaagagaagagatagaagagaacttttcacataggtcctcaaatggtgtgggctgaagagattgtgtagaaccctctgtctgtgaatcccgagggtgtcgattgacaggagtggtggtgtcgatcgacaccgttgctctgcaactctcattggcgagttgagctgatgggagcgtcgtgtgaggctctttcaggggatttctgagtagtcagaggaggtgtgtctatgctagaggcaatactactaatatgcttattaagctctgaaccatccatgccaaactccatctccaaatcacaaacctttagagagattctacctctctacacatcaaacctagcaccagctgtagctaggaatgctctttcaagaataagaggatccttggattccttctcatagtccaggaccacgaaatcagcagggattatggagttaccaactttaacaggaacatcttcaagaattccttcagggattcgtttggaacgatccgcgaagaggagagtgattcgagtcggcctgtagtgagtcatgcctactctctcagcaacagacttaggcatgaggttgatacttgatcccagatcactcaaagagcggctgaacctacttgtggagataaagcaatcaagaacaaagctacctggatctggaaccttctcagtggtctggtctggagagatagtgtagatgtactcaacaatgtccactggttgtgccttctctttcttgaccttaggcagcatgatggcactgatgtcccgtgtcagcagcttagcttcatcggagctaataccattgtcaacaagtcgcttggcatacctgttgagtggagaagaacatgtctcagatgcatctttagggagagaagtgaggatcttctccatatagtatctccaatcaactcctcttaaaaaggtaccaagaagttgtacctcactgaaaccatgatgttggtaatcccgttgatactccttgaaacgaacccaagcagccttgaaagcttcagctggaccttgtgtgaaggtagacagcttgtttcttaactcctcagacttagcatcatcgtagaaattgttcaagaaggctatcttgatgcttctccaagtcttgagggaacctgctttaagttgtttcagccaagaagcgccttccccgacaagtgaataaggtaagagcttgcacagtaggtagtcctctgagactccattagctttgatgctcagaacaaggtcctcaaaacgctcgatatggtccattggctgctaatgagataagccatggaaaggatgttggccaactaaagcaaagtagccaggcttcagctcatagtcgctcctcttgaagggtgggggtacgatcgctgatcgattagcatagaatagatctggcctattgaaatcctgagagtacgacgtggttccgcagctagaggaatagctgcaggaatctgggattgatgtcgatcgacacctctgttgtgtcgttcgacaccaatctcgtcttcattctactcctgaaggtgtcaattgacacctctgttctgtcgatcgacagcaagccctgctccgtctctggtagctaattgcgcattgaggcgcgcctgatcttcattggcgtcctcaggtaggatgagtccatgatcatccaatctctgaccagcctcattgtaggcttgcccattctcatctctaaaactccttctgcatcagctgtgatgactctgtcagccattgctaatctctgagtttttcggttggttcgttcaagttttcccaagtctaagaccgacaagttgataagctccttctgtattgaaaactgaatgaatctctgaaaacgttggataaatagcttatgtctctcagtaacagggttttccaaagagcttgataatagaaactagggtctagaacaatgtatataaacaatataaaacgtcagggactaataatgaaaataggaaagtcttctggggcaaatttcctcttctgtaaaattgaaagcgtcatggacttttgctgggctgaaactggtgtcgatcgaaaccaagagtgtgtcgatcgacactcctcttgattcacggatccaaaatcgtccttagcttccttttccttatctattgctccaaaatgtctcctcatatccattgatgtcccattgcatagatacctgaaaagacacttaaaagactcgagaaataacataaagactcaaaatccattacctaaaacatagataaaatcagcgaaaatagggatatatcatatatcatggaagagacaggtcagctcctcaacttgcaccatcataggccgtgagtccaccattttgtagtctagaaactttgccgcggcatatttctgtgatccagcatctttggtttggtacttcttatcaagagaatcccacagctcgttagaggtctcgacattagagtacacattgtacagcggatcggagaggcggctttggatatatcccttacacatgaaatcaccgtgttcccacgcatgaacactcgcaagcgcacgagggtccatgttgtccgctgggaggattggtttctcttcctgcgtgtactggctcagcttcagtgttgtcaagtagaaattctgccacatcttaaatgagctcccatcgaactttttgggaaggaggcctgctgaatttgccgcagtgtactggctcagcttcagtgttttcaactatgttttaggtataggttttagagtctatttgttatttctagagtcttttctagtttttttcaggtttttacatgtttgagattcatttgaagattatggaacattctggagcaaaacagaaagcttaagctgcagaagcaatccggagacgaaaatgcatgtaggtgtcgaacgacaccacccctggtgttgagcgacacgaatacctaatagtaattttgggatgcaacttattgaagttttgaaaatttacagattcggcccagaagtttctcctatttttaaataaagcccaacacgtttttagaacctatatatatagtttttaggtcattgtttggaagtaagctttgggaggctattccctttttctattttgttcttgggagcataaccgtgtggaaacttcctttagagaagatttttctaaattcttttctcttgttattttcttataagatttctattctaatcatgttgtgtgctacaatctccatgtttgagtagttttcttgttaggtttagggtttctcattagggatttagatgatttagtagattgcccccttgctaggttatctgttaggattcttcatctttaattgttcttaatgctagttctagattagctaactagaacttgaatgcagacaatagatatacccgctataggtatctatagttggatctattatttgatgagcctggtttataggtgtgtaataaaaatcggcctatctactaaggtgaacaattgaacttgattagaatgcatgtttaagtataagatctctcggcttctccggttattcttagctataggcacagggagtttcgtggaacgccaccggttattccaaaattagagtttgagtttaagaacggttcgataacaacctagctatcactatatctactaatcatctatctcccaagaataccctaaacttgactctttcccatcttatttacatcttaatacttattgcttttctttatttcttattttataatctattggtctagcttaattgaaatcatcataagtctattgtgtgaacatcgagggttcaatggaattcgagctttaagtgctaatgacgatctcttattttagggagtaagcttaaggcaatttgagctatatcacctcccaaaattttcttaccaaaaaccaaaaccttaacacaaatgacacaatttctgatatatagagttagatcgtcgactcttgtgagtgatgcttttttttcgtttgagtgttctcattttgaaatgtttagtgaagataacgaataaagatatgattgtatataactatatatggtggaaacattattcacttgtcatttatactctatacatatttccaaatatgtccaaaacttgaataagctaacgtatatacagataaagacaaacaccatctcaaacccaataaaattagtctgtttacacgcattcatccagaagattatgccactgcgaatgacaatactttaaaccttttgatttgtgaatgacaacactcttgctactttcacgatttccaaagatttatcttatagtcaaattttcataatataatgctagcgtgtaaattattttggatcaatataaaatagagtattcaagcttgataagtgtgcattttacacgttttgagcatccatttgtcatcactttagcatcatatcaccactgttttataccatttctcatcatttgtcatcactttgcatggttaggatagttttgcatgcatattgcatatttgtgttgtgttcaggtaatttggagctgctgccgagctaatttgaagaggtggacctgatcaaatcaacatactcgaccacgagctcgagtaccgtcatcctggagatcctgaaatactcggccacaacttccacaacaaatcactcgaccgcgacactctatccaccactcgaccacgaggtcgagtagatgacttccccacttcacaacaccactcgaccccctggtcgagtagctaccttcaccgcttcgattcaccactcgactacatggtcgagtcccaccatcatcattcactcgaccaatcactctaccaacaggtcgagtatcaccatcatcattcactcgaccaatcactctaccaacaggtgcagtatcaccatcatcattcactcgaccaatcactctaccaacaagtcgagttccaccatcatccaccactcgacatcatactcgattgccagcagagtcagaacaaaccttttgttccctacaatcaaggctttgctcccgaacagcaatttcaggagaactaccagcaaacaccacccaggtttgccccacagcaacaccaaggtccttctgcacctgatgctgacatgaaacaaatgctacaacagctgctccaaggacaagcatctggctccatggagattgctaagaagatatctgaattacaccataagcgacattgtagctacaatgatctgaaagcaaaagtggaggccttgaattccaaagtccgatacttggagggctaatcaacatctacctctactcccaaagttacaggactttcagggaggtcaatacagaatccaaaggagtatgtcacagctcatgttatccctatctgccatgatcgagagctgccaactcgacatatccctacctccatcactgaggacagttaaattcaagaaggggaggatttttgtcagaatgaagctttagttgaaaacgcaacagacaagcccccactcgaccacactactcgatcactagctcctgttgaagaaccagatgttgctaataatatggaaaaagtctttgttactcctccttacaagcccccacttccatttcctggtcgacacaagaaagagttagcagataagtacagagctatctttgccaagaacataaaacaagttgaagccaggatacctcttgttgatgctctcacgcatatcccaaattcccaaaaattcctgaaagacttgatcatggagaaaattcaagaagtttagaaaacaacaattatgagccatgagtgcagtgccatcatacaggagaaggatataccagagaagctaggagaccctggttcattcactctaccatgctccttagattcattgacttttaataaatgcctttgtgacctaggagcatcagtaagtctcatgccactctcagtagctaagaggttgggtttcaacaaatataaatattgcaatatctccttaatcttggatgatgggtcttttagacaacctcatgggttattagaagatttgcctatcaagattggaaatgtggaaggtgcctatagacttcatagtgctgaacatggatgaagaaccaaaagatccctttatcttaggaaggtcctttttggctacagctagagcaatcataggtgttaagcaaggaaagattgatcttaatatggggaaggattttaaaattaagtttgacatcaatgatgctatgaagaagccgacaatagaagcacagaccttcttagttggggaaaggatcggctagttgatgaactgctagtggaacttgaagaagcaaataactcaaaaactgttttaatcaagagtggtaaagctgggtatctccctaatgaaactttgaattctgaaaagtcattagactcacacaaggcagcagttggttcagaggtttacaagggcttgatggggtctaaaccaaatgatatgagagctaatgaagtaagttcaacacatactcgaccaactgattccaccaacaactcgaagaagcctccaactttccctgagagctcatgcttgaccgaacagctcaaggcaagcactcgaacgtcagatgattggttagaactcaaggagagatctaaatggcaggacaaagccatacaagagctaacatatattgtgaaagagatgaaggatcgaatcaaggagctcaatggaaaagctaaccaagtaccactcaacatcaaggacgtcccagattatggagccactattctggtcagcaaagaaagatgtgaattcacgttggaatggtctagtggagaagactatcctgataaaaaagaagcttacttcgaggacatggccactaagttctcaattgcagacctgtcaagaaacactaatgagtacgatgatcaccctactcaagaaggagaggagacctcatctcctctctgcaacccagcctaagccaaatgagtatgagaagtcaagcttggagacttaaaacaagctcacttgggaggaagtcccatgtctgtctttgtacaaatatctatttttccttgttatttttgatgcatgttattagtgttttcaggagataagtatgtagagctgagtaaagtggattctggctttgagagtacaacagtgtactcgaccatagacaaagaaaaatactcgaccatagacaatgaaaaatactcgaccttattttggcttaatcacgccagaagatcactcgaccgcggtgctgactgtagtagaagaagaggggtcgagtatacttgtggcggtgctggccgtagcagaggcgatgagctcgagtaccctcagggagctggagctgagacagaacagggagacacttcaatgggctgggagaattcacatgcatccattgatgaccaactccattaaaacttgactgaggtaagcgcctcacttcaccattgtactataccatctcctgtttttattttgtttctgtgatgtggtttgtcatgagtactctcttccaaatttggttacacagtggactgtgtgatttaagtttaggggagggctcaggaagtgtgtgttacattgtatatactcttgagtctgcattcatctaaagcatagaaaaaccaaaaaagttttgaaacatttcagaaaaatatttcacaaaaacagagtgttcatatagttgcattgcatttaggattgaatgtagaatgtttcatataggattgttgcatatgcataggggataatgaggagataaccttgtaagcatgatgattcactaaatgagttattagttctcttatgcatttgaatgactttgaagtaaaaccgcaccatgttctatagaaaccactcgttgcatgtcatgacaccttttcctgtcaatttgaacttgaatctgacttataattatcatgttagcatcgattttaaactcatggctagaacacatatttggattttctttaatttattcatcactcttgctaatccaagtagttgcttctattattggagtagttccccctcccttaaccaacccttctttcaagccatgttattgtgagagcatatgaggcctattttcaggattgagtttggtagaacgtgttaggtttcagccgacaagagtagtatcccatgtagtttgagtctgcgttttcggacttggtaggagtaggtgggaacttatttgcagattgagattgagtgtgaaaagaaaaaaaaaaagaaaactggttagaatctttaggagaaggaagctgagaatcatattgaggtctagtgaatgtttgggaagcatagaattgataagatataccctaaaaaaaatggcaataaaaacagaaaggaaaagagaaaaaacaaaaatcataagagccattagagtttaagtaaaaccaattcactagattagactcatagactttaagaaaaacttctccttaagagcaagagcaaaaaaaaagaaaaggaaatgagttgatccaagaaagaatcgaaatatgcctttagtgcaaaagggtagacttaggatcatcattgggtttagagataggaccatctacttgttattcacggtttacgtcattgggtagatggggtgctattcttgtatgcataggttggtacttatctttagcattcttctaaagcccaatcctttttcattaagagttccctgttattaaaatctgaaccaccttaaagagaccatctttgtctcataacctgtccttagccaaatgagttcactagcgacgcatatcttgattcatgttcatgaacttaatgaatgttaaagggattggtcgatcttgacatattgtgcaactgagtgtgaatttggatcataacagagaatggctatagtttttaagtagaagtcgatcacctcgcatcttagaactgttagcttatacattaatcttaattgtcatatctcatgctttgcttgtgagtccccgctttcaaaactcacctctagcttgttcttaattgtttgcttgagggcaagcaaagactaagtttgggggagtagataagtgtgcaatttacacgttttgagcatccatttgtcatcactttgcatgtttaggatagttttgcatgcatattgcatatttgtgttgttttcaggtgatttggagctgctggcgagctaattggaagaggtggacctgatcaaatcaacatactcgaccacgagcttgagtaccatcatcctggagttcctaaaatactcggccacaacttctacagcaaatcactcgaccgcgacactctatccaccactcgaccacgaggtcgagtagatgacttcaccacttcacaacaccactcgaccccctggtcgagtagttaccttcaccgcttcgattcaccactcgactacatggtcgagtaccaccatcatcattcactcgaccaatcactctaccaacaggtcaagtatcaccatcatcattcactcgaccaatcactctaccaacaagtgcagtatcaccatcatcattcactcgaccaatcactctaccaccaagtcgagttccaccatcatccaccattcgacatcatactcgactgccagcttaagagtcttctcgattccgcactcaaccagacaatctagcataaggaagaaaagaagactccagcaaatcactcgaccaatcactggaccacctaggtcgagtatcgttcttaatccgtcccaatactgcgtcgttttgagtattagggtttcagaacattttgctataagtagcttgtactttatattttcgagaaaaaagttttcttccgcagacactgtgtgttattgatattttgtaatccagatttctcttaatttattcagtatttgctttcattttgtttactaagttgttcatcctgttatcatcttgctattactctgttgctatcatgttttcattcttaccatcgtttatgctttctacaatgatgtctgattagtgactaggtttctgaggatgggttagagtagtttagaattctcagtatgctaggtggttgagtttgatttatagatcccttctacattagttgttcttaatgcttattgctttctgatccactggaatttgagcccagccatttccgcacccaaaaggtgttagatgaaatgtctgaaccactaattccagagatttgtggctatgtaccaaggtattggttacatggagcgttttggctttaactttttgattcgtaatgcctgttaggttagctctcgtcaatggtgatagagtttgggacgtgtttaacttgagggtctctgttgcggtggcacttagatttagttatcgaacttgttgtctagggataatttattgagcatgtcaatcacttgtaaactgaggaaacgaaactactcaattaccccatcctcgggaattcctcatctaattgatttctttgtttactctgctattatttactgcatcttgctgcttgttgtttagttcttgcattttatgcgtgttactcgacctgatactcgaccacccaattgtctagaaacagtctgtgcaatcgagtatccttgttatattttctgtctgttactcgatttgtcactcgaccaaatcctgtgcttggtaacaagctgtgttggtcgagtgttttaatgtttctgcttgaatttctgtttcctgcatgttcacttaggactgctagaaaccccaaaacctgttattgctcggcttgactttgtgaactctgattgcatcttgattgctagcatcacacccatttggattgagaacctaaaatactacaacgacatgattggtgtttagaataattgattaaaaacttattatcaaatctcttgtggttatcgtggtaaaaatgaaatccaataattattctataaaataatatttcgatataagatcgatacattaaattaaaactccaataaattaattcagaaaacaataaacagttacaataatttaaaaagggataatagaaccccatgtatattacaaacattttatccataaaatataacactttaaacactaaaataattcgacatttttcgatatctataaccactcaatcatcctatacaagatttccaaaaagaaatgttaattaccaatattcgacatagcttagagaatttcacatattctcgatttcttacatacgatgaaacataacgtacttattacaaatgatttatacatcaattgtaacgcataaaaatatcaaagttataacatattttggtagcgttatccataaccactcaataatccaagtgtaatcatcaaaaaaagataaaaagtttccaacataatgatcgtatataaacttgcaaattatatatgcgcatttttcaagatcaaatctttaacatcaaagaataattctacaacatcattcaacgaaacaatgcaaataactttgtaataactataactttgatcatcctttgaagtatttaagtattttacatacaaatttgtaatttaaagggtttacaaacgaaataaaaaaacaaataaagatttataaacgaatttgcaattttaaagaggtctaaacagaagaaatataaataataatgatatggtttaaagtttttttgtccacacaatgagttgaatgtcaagattaagctagtagagattgattgtaataagaagtaaacaaagtaaaaagacaacggattgattggttgtaaacgataaaataaagaggtaggaacaaggtattctcaggagactattggttagtagatctaatgaaagctaggttgttatcgaaccattattaaacacaaattttaattatggaataaccggtggtgttctgcaaaacttttgtgcctatagctaagaataaccgcagaagccgagagatctttaacctaaacatgcattctaaacgagttcaattgttcaccttagtatataggccgattcttattacacacctataaaccagactcatcaaataatagatccaactacatatacctatggtgggtatatctagtgtctggattcaagatctagttaattactctagatctagcattaagattaattctacacataatttagcaagggggtgatctactaaaccatatgaatccctaatgaaaaactcaattcctaacaagaaactactcagacagattgattgaaacaaacaacataaatgaataagaaagcataaacacaacaaataaaattagggaatgaaaggatctcttcactgtaatgagaactgaatgaatctctgaagaacaacggatgattagcttatgtctctctgaaaatagggattaaaaacttgataaaaggaacttaggtctaaacaatgacctttaaaactatatataaaccctataaaacgtccagggactaataatgcaaatagggaagtcttttggggcaaatttccacttttgtaaacttgaaagcgtattggacttttctgggccgaaactggtgtcgatctctgaatctgaaatctgaaatcatccttagctccctttccttagcttttgctccaaaatgtctcctcatctccattgttgtcccactgcatagaatacctgaaaagactctaaaaagactcgagaaataacaaaaagactcaaaatcctaaacctaaaacatagataaaatcaataaaaacagggttatatcaactcccccagacttagcttttgcttgccctcaagcaaatcacaaaaacagaacccgtggaagaggttttgaaaacaaaggaacttccaacattctctagcctattgtcatgatcatccaaactaagtccaaatgcttaacaagtttaatcaaatcctaaccaacatgtacttctctgcaagcttacacaactttctaaattccatacctaagttccacaactatatccaccagggtttcatcgttgggtctcatcaaacaagctaacattcaagatccttctatactcattcttgtactataccatgatgaatcgaccattctttatatatatatttttcattggtgttttttctctccccagacttattcgttttagagagtaaacaaaggagaactcgcatactggatcgacaacctcggtattttccaacctttgcaattgatcattccaaataatgtataataatggcgtcataggaaacattcctacccctatacactatatgaaaatcctgtcaatctctcattttctatttttataaggggagagacacattctttttatcacattggtctcaatatcaggtatgaacaaggagtcaagatctatgaatactaaccgtttgaataggtgaaagaaagagcagtaagattagctccagccttggtggttatgttggaaactaggatatcctcaagtctgtttgtttgccatctagactttccaatagtcggactgagtcgaacctgtagcactcatcaaccagacaataattaagagaaatatagatcatgattcctaactaaaataaagaaaaatgtatttttttaaaagaatgaaagaaatgactcaataaactgaaaaacgaaataataagaataaaaaataaacgcataattaataagaacctcctccagacttaaacgacattgtccccagtggcattcaaatccgaaaaagcgagaaaaataaatcaaaaataaaagaaaataaaagaaagaaaaagaaaaatcaaacccgtgggttgcctcccactaagcgcttgtttagagtcaatagcttgacttggcggagttcaggatgtgggtggagtggtggaagacttttgctgcctccttgccttccaaggcggtgtgtaaacaaatcctgtctgggcagctgcaggtgttgatcaaaaatcatggtggtgtcgatcgacactctcctcgtttcctgcaatatcaaaaggagaaacaagctttcgaagaattctaggcttgttaacttgtgaagaagacttcaaagaatctaaagaattaatcaaaggtaaagcaggagaagagatagaagagaacttagaacaaaggtgcacaatgggtgtaggttgtagagagtttgcagaatcttctgtctgtgaaacctgagggtgtcaatcgacatgagggatggtgtcgatcgacaccgattctctgcagttctcattggcgagctgagctgatgggagcattgtgtgtagctttgtttggggattctgagcagtctaaggagatgtgtcatggctggaggcaatgctactgatagccctagtgatctctgaaccatccataccaaattccatctccaaatcacaaatgttaagagagatctttcctctcttcacatcaatcctagcaccagctgtagttaggaaagctcgcccaaggataagaggatctttaggttcctttccataatccaagaccacaaaatcagcagggattaaggaattaccaaccttaacaggaacatcctcaaggattccttcagggatttgtttggaacaatccgcgaagacgagagtgattctagtcggcgtgtagttagtcatgcctaatctttcagcagtggtctgatcaggagtgatagtgcaacgtccactctctgtgccttctctttcttggcctttggtagcatctttttttattttttcttatttatttttttttaattttaaatttccattaaaaagttacatggcaacagcccaacaaggcacacatgcacaaaagaaaaagaaaaataaaaaaggaaagaaaacttacaagcccaaaggccaacaaagcacacaggcccaaaaacaaagaaaggaggaagcctagaacagaaagcagcggatggcttgagaccgaagaaaaagcacctgaaacagagaacgaagaagaagaaccaaaacagagaagcggtgactaatcaactttggaacacagcaaaccaagtcatcagaagcgagtcacccacaagaccctgacccatcctcctagaaagtggatcaagacgggcccttacaatgagctggatttccttaatgagctgagtatgattcaaaaatgaggatgtgtgaatccgagagttgcgctccctcaacaacagataaatggaagcctaaaagaggagcttgattataagtgataggttctttgacgtcgaagccgtcttcaaccagaggagagaagccatgaaggacgttggaggagatagtccaacacacctagtgaaataagtccagacagcgctgctatacgggtagttgaagaagaggtgttctctagactcatcccctgagttacagagcacacacactgcaggaatagagaaaccccaacttttcagcctatcccttgtatgcaaacggttccaagccacaacccaagagatgaaagcatgcttggggacccgatccttgaaccaaattgatctatgccaattaacctggacacccggagggtgaagagccatccaagtctttgaagcagagaacgagtttgaaggagcatgagcatcgacttttcacagataaacatcatctttagtacactcagccatactccccacaaccggtaagcagggctttaaaagaagaatggaggggttacgactcctactagcagacagccatcaaacaccacctcttaagccatcttttacctccgtattcagaggcaaaccaactaagataggtccagtaggccccgtcagattaatgagaagaccaagactcgttcaattgtcttgccagaaacttgcagtttcacctgaaccaacatcacacatcaagaagggtctcgctaaaggtggtatcttacaaagcttcctccaaatctaactaccagaggaagacggattcaaatcccaaaagcatttgtgtctaatgagattaattctgacccacgaaacccacaaggaccctgcagctgtaaacaataaccaaatgagtttgagagccataaccttgttccaatctatcaaacgtcgaagacccaacccgccacactccttaggggaacaaactgtttcccaagcaatttttgctcctcaaacggagtttggagctgctttccataaaaaagcattacacatctcctctagctttgtgagacattgggtaggcagcaggaagatcgaaacccaaaagttaattgttgaataaattacagacttgagtaactgtaatctgcccgtaaaggaaagatgcctagtagttcaagtagagaacttaaatttgatcctatccaaaagaggctgataatcatgttttttttcatcttttgggccattaggggcactcctaaatatctgactgggagggctccttgtttcatccgaaaggtagccgctaaagaagaagacctggcatagtctcctccatctagcataagagcggttttggacttgttaatgcctagtccagacccaagcttaaacgcctccagaatgttgagaatccctgcaactgggctcatggacccatcaaagaaaaccaaaacgtcgtctacaaaactgagatgagtaataaagggagccacacacctggggtgaagattgaataggccattgatagcacccctatccagtaatttagcaagaatatccattacaagcacgaacaggtgagatgacattgtgatctccctgtctaataacctttttactacaagaaaacagacaaataacgactacaaaaagcgacaacagatgtcgtcgtcatttttggcgactacttgacgacagtgttacgacaactatacgacaacctgaacattagtagtcaaatagtcgttattttacgactaacttcgttagtcggcaactactcgtctattaacgactatttaactattatattattgaagggagacgtttgtcgttacatagtcgccaatgcacgactacaatttccgactacgatagttagtcgcctgattggcgactaaaataatacacatttctgcaatcgtaaaatagtcgcaacttagtcgcagagtagtcgacttaagcagttggaaaacgttttcgcattgccaagtaggtacacctaatttgtttgttgtagtcgtaaattagtcataaaaattcgtatatataatcaaaattcaggacactcttctttcaccaagaaatcaaaacaacaatcaaaaggaaaaaaaaaacgattgaaacgaaaaaaaatagaaatttagtttattctataatggcggaaaactacaattacagcggtagtggcagtttctatcgagattggatgtacaagagattcgatgaagtgacggagaatttgtcagccgaatacgtcgcaggagttgaggaattcatgacattcgctaatagtcagcctatagtacagagtagtcgaggtaaatttcattgtccttgtagtgtatgcaagaatgaaaaacacatcatctcaggtagaagagttagtagtcatttgtttagtcaaggatttatgcctgattattatgtttggtataagcatgcatggagaagaattgaatatggatatcggaactagttatacgaataggacgtattttagagagaatcatgaagaagtgggtaatattgtagaagatccatatgtggatatggtgaacgatgcatttaattttaacgtgggttatgatgataacgtggggtatgatgataactatcatcatgatggtagttataagaatgtagaagagccagtccgtaaccattcaaataagttctacgacttgttagaaggtgcaaataatacattgtacgattattgtcgtgaagggcagtcgcagttatcattagcatctcgactcatgcacaacaaagcggggtataatatgagtgaaaagttggtggactccgtttgcaaaatgtttacaaattttttaccataaggaaaccaggctaccacttcacattaccagaccgagaagttgatgcgcaatttaggacttccatatcatacgattgatgtttgccagaacaattgtatgttattttggaaagaagacgaaaaagaagatcaatgtcgattttgtggcgcacaaagatggaagcctaaggacgaccgtcgaagaaccaaagtaccatatagtcgtatgtggtatctacaagacagctgcggctatgcgatggcatgctgagcaccaatcaaaggagggagaaatgaatcatccttcagatgcggcagagtggagatatttccaagagttacatacctggtttgctaaagaaccccgtaacgtttatctcgggttgtgtattgatggctttaatccatttggcatatctcgtaatcattcattgtggcctgtgatcctaacttcatataatttacctcctggtatgtgcatgaatacaaagtacttatttcttaccattctgaattctggaccaaatcatcctcgagctagtcttgatgtcttcctccaacctcttattgaggagctaaaagagttgtggtgtactggagtcgatacgtacgatgtttcattaagtcagaattttaatctaaaagcagtactactgtgggcgataagcgactttccggcgtatagcatgttatcgggatggactactcatggtaaattgtcttgtccagtttgcatggaaagtacaaagtctttttatctacccaatggacggaagacatgctggtttgattgtcaccgtagatttcttcctcatagtcatccatctcgtaggaacaaaaaagactttctcaaaggaagagacgcttctagagagtatccacccggatctttgacaggggagcaagtttattacgagcggttggctagtgtaaatccacccaaaacgaaagatgttggtgggaacggtcatgaaaagaagatgcgaggctatgggaaggaacataattgggacaaagaaagcatattgtaggagttgtcttactggaaggacctcaatcttcgacaaaatattgatgttatgcatacagagaagaattttcttaacaacatcatgaacactctcttgagtgttcaaggtaaatcaaaagacaatatcatgtcaagattggatattgagaaattttgttctcggccaggcttacatattgatagtacgggtaaaactccttttccagcgtatacattgatagaagaagggaaacagagtttatttcaatttgtgaaacatgatgttagatttccagatggtcattcttcagatttggctagttgtgtagatttggagaatggtaagttttcaggcatgaagagtcatgattgtcatgtttttatggagcgactacttccatttatctttgctgaacttcttgaccggaatgtccaccttgcattatcaggtacaatactaacatgtttttatgtaattatttaacttgcacatatattttaggaattggagcatttttccgggacctatgttcgagaactttacagataagtcgcgttcaaattctcaaacagaacatagttttaatcatctgtaacttggaaaagatctttccaccatcatttttgatgttatggaacatttacctatccatctcccatacgaagctgaattgggtggccctgtccaatataggtggatatatccatttgagaggtttttcaaaaagttgaaaggaaaagcaaagaacaaaagatatgctgcaggttcaattgttgagtcatatatcaatgacgagattgcttatttttcagagcactactttgccgatcatatacaaacaaaatcaaggtaaatacctttatttatttaacaatttgctatactacttcgatcttaattaaattatatgtatcaggttaacaagattcgatgaaggtgaagttcctgtatatcatgtccctggagtacctaacatatttatgcaggtcggccgtccaagtggttcaatgcatgtagaatggcttttagagaaagattaccaaaatgcacatgcatatattttaggaaattgtgactattttaaaccatttgagaggtatttttaatcactttgatttattcataggtaagatcactttgatttatttgtctttttttgttgagactgtatgttcgagaattatctttctgcgaaatatccatccttggccgaaaaagaactctacgtcagaagagctgaagaatatcatctatgggttaaagaatatgcaagtctacattaattttggttcatgtaactatttgtctgttttcttgtagctagtgaatatgtaagtctacattaattttggttcatgtaactatttgtctgttttcttgtagctagtgaatatgtaaatctacattaattttggttcatgtaactatttgtctgttttcttgtagctagtgaatatgtaagtctacattaattttggttcattccgggacctatgtccgagaactttacagacacactagatgattatacagccatctttctcgaggtaagatgttgtagtctaattatgactttaagagtccaattaatattctgtcactaatgagcttctcctctatttcttgcagtccacagaaagggattcaagaggcaatccttatggacttggatgtctaaaagacactctaggcagtgccaaccgccaacactccggttcctcatcatcctttcaagccctagaagaatggctgcagaaagctcaaaggaaaatagaagagcaggctgcatataatgagaagagagatgctgagatgcccgagaagctgagtcagcccgagtcacagctgagcaaaatgacaagctcgagcaattgtctttagtcgagaagtatctccgccaaaccgatccgcagttcttggacttcatggccactcactctaccacaaccacagaacgtctaccaagtcctccacctaatgatccttagattatctttgcccaaacactacttgaacttatgtttatttgaataagttgtttgtgtaataaataagataattgtatgtgtatttgaacttgattttctatatatacaagtatgtcttttcatcttttatagcatttcaaataaaaaacgagaacaaaccataactttaaacaacaaacaagaaacccaacaatcgatgaccaaattcttattcggacaaaaccagtagtcgcacaatagtcgtatttaggtagcaaattagacgtaaaatagtcgtataatagtcacaacagttaccgattattatcagactaaccaacctagtcacaatataatagtccattagacgtataatagtcgtaaaacattatacgactattatatgacaacgagaattatttccttacattgatcgaattagtcgtccagtagtcgtcaaatcgtcataaacacttatacgactattatacgactacgtgtttcacacgctctgtacaggacaatgaatcgtgcaatggtcgttaaatagtcgccaatcttatacgactatacaacgacgattttgtactgattgggtttttgtcgtaatatagtcgtcgatcaacgactaattcacgactaccttactcagcgactatgtaataatgactagcatctttagtcgccgattagtcgtattatcattttttacgactactatgcgactgctgtgtaagtcgtttatcacctgttttcctgtagtgtttcccttggaagaacccaattagctcctccctgaaagcaatactatatgatggagtttggacgcaaaccttaatccaactgatgaaggcagcatgtaagtccaaagcaataagaatgttgatgaggaattcccaattgacattgtcaaaggctttagagagatcaatttgcaaacagccacaggtaactttcccatctgcctgaaagttctcaaccaactctgaggctagtaaaacattttcacataaaagacgacctttgataaaaccaacctgattcccctagactgcttgagaaatgaagagctttaacctcttggaaatcagtctagtaattaccttgtagattgttttacaacaagaaacagggcgaaactttgagagcacatcagcaccaatttccttaggaataggagtgatagccgtggtattaaactttttgagaaggtgccctgtagtaaagaactctctaattgccgcaacagtgctttccttcactactgaccaagaatcccaatagaactcagccgggaacccatccggaccaggagccttgtttttaggcatagagaaaagggtctgagtgatttcctcgtctgatggaatggcaatgagcttttcagcaagagtagagtcacactaaaaggggtaaatttcccagagagtctccaccgagtaaggggtagaagttgagctctccgttcccaaaagatgggtgtaataagtcacaatcatgtccttaacatggtcaacattttccactctcaacccatcttccctcctaagataacgaatgatgtttctagcttggtgaggaaggacaactctatggaagaactgggtgttggcatccccttcttcgagccacttaattctggacttttgtctgaaaaaaagactccaataccttagcaaaaaaattccagtttttcctcgcaacgtgctcagccctgaagagcgaatcaaccggagcaaacaacaactaggactgaatctcttccaatttagcaagggcctctgtcgttctctattgtaagttactgaaaccttccctcttcaaaacccgataagctttctttgcaaccttaagatgttccccaagagaaaacatgtaagagccaactgtaatctcacctacccatgcagccaaaatacgagaaaaaaactgagagtggatagacagaaaggagaagtacttaaaggatttttttatctttccggctggacttcgatagaatgatacaaggaccatggtcagagtcccccggagggtcaaacactgccatagaactatggtaggaggccagccacaggtcattcacaattgctctctcgagtttcctgataataggattctcggcttgatgattgaaccacgtgtaaaacacccttttgcttggaagatcaatcaactgagtaatgctcacctatggaagcaatctgattgaaatctcctgccgcaatcaaggagaattactaagcggagacgaaatggcaagagtgcacaaatcagaccagagctctcttctttccacctcacagttgcgaccatacacgaacataacaccaaaagtctgattaatattgggaagctttatagcgcactaaaggggaagcagcaaagcagtttactcggccctttactctatcaacaccagaggggaagcagcaaagcagtttactcgaccagtcactctatcaaggcagctacagaggaagcaacagacaaccactcgaccccctactcgattctctactcgaccagttactcgatcaagggcaacatactctacaagacttgttgatcgttcaaagcgtcttctgatcctcctcattccccactcaaccagacatctgagcataagaataggagaggaagaagcaactactcgaccaattgatcactcagagcatggaggcaaaggcgcagactttgcaacaccctctttactcgatccccaagatcgagcatccatccaaaccgcctcaagtctcttatcttctagtgaatctagggtttttgagattttagtagaaataggttctttggggtttgtccaaaggatcaagcttttatctcttagtttttctttgtgtttctgaatcttgaaaccttaattactcttaatctattttgtttttgcatttagttctttgagtaaagttgtttagcttgtttagatctatattttgatatgatttcagtaatttctgggtttgtgttcttagttatgttacttgagtagtgattagtgttcttgaggatggattagattagggtaatatctaggttagtcaggttgttaagattaggttagatcccttctggattcgttggcccctatgcggttttcgttggctaatgtagaaatttgaccataggtatccaacgttcaaaagacgttcaaatggatgcctaatctacgaattccagagatttgtagactttagacctagagattggttagactgcttattgactttggtagttgatatagctcaaattgccttaagcttactccctcaattaagagatcgtcgttagcacttaagggtcgaattccattgagctctcgatgttcacacaatagacttatgatattgtttaataagctaaatgaagtaattgaatattaaaggcaaataagcaagtaaatgagttgtagattcaagtgattaaagcgtcaggtctaaggaattatctcgggagatagataaattgtagatctagataatatcaggattgttatcgcaccgttctcatactcaaactataattctagagtaatcagtggcgttccgcaaaactctctatacttacaactaagataaccggagaagccgagaaatcctatgctaaagcatgcattgttaataagcttgaatagttcacctagtatctaaaccagagcccttctatgaacctacctgttttttcttaaatgcctaggctcatctatgatggttcaaataacaaatacctatggcgggaatacctattatctaatatcaagttctaggtgatcaatctaaaactagcattaagaataatcaagatgaagaactataagaataatcctaaggggttttcgatctactaatccatctaaatccctattgagactccgtagacccaacaaggtgattactcaaacattacaatagaaacacaaatcataatctgaatagttttcattgatgaattaagaataatagcaaaggagttcagaatcctctctttttagggattggattcttttctctaaagtgtaacaaaagctcaagaacaaaaactaggtctaacaatgaccaaactattaggtatttaactctaaaaacgtgcagggactattttgaaaataaggaaaacttcagggcttctcaaagacttggtgtaaaatgaatattctcctggcagcgacaagagtgtcgatcgacacaggtgtggtgtcgatcgacaccagcttctgaaagacgtccttcaagatctttattgctgaaaagcttccaaaattccttattgtgctccatgtttcccagatgtgtgagtgtacctggaatgacttaaatcgtacgaaaaagactagagagatctctaaaaattattctgaaactgtgttagaaatcagtaaaaaccgggacatatcaattcccctaaactgtgttagaaaggttgaatctgcgaaagaggtttgaaaaacatagaaactcccaatctctctggtttattaccttgatcatacaaaccaaatccatgaaataaacagttctaatcaaatcctgaccaccatgtaattctctgctagcccacacaacatcctaaattccataccaaagcactcaactatatcaactaggctatcatcgctgggtctcatcaatcaagtgaatgcttaagaaccttctagactcattcctgaactataccatggtaaatcgaccattcttttatttttttctttggtgttctttctctcccccaaacttattcttcttagagactaaacaaaggggaactcgcatactggatcgacaccctcggcattttccaacttttgtaattgatcgttccaaataatgtataataatggggtcatacgaaacattcctacccctatacactatctgaaagtcttctcaatctttctttatttattatcttctttttcttttttttggggagtggaacactttctttttaacatattagtcgatctatcgggtacgaacaaggagtcaagtcctatgagcactaatcgttttgatgaggtaaaaggaagagccgtgagattagctccagcttttgtggattatgttgggaatggatgtccttaagtttgttgattggccttctgggattttcattagtcggattgatttgaatctgcagtacttaaacaatccagggaataaactcgagagatagatcataatttcagacaaaagttttgactcaataaaatgactatctaagttaaaatgacacaactgactcataagaaaagaaaagatgaagttagtaactgactcccccagacttaggtaacattgtccccagagttattaagctagaggaatcgaaagagaaatagtcaaaagttaaaaagtcagtaaatgtgagttgccacctgagagtggtgtcgatcgataccatgatggtgtcgatcgacactctggtcatttcacattgctttgtgaattctgctcattgttgtagagccttggttagtgttttcacatggatcctccagttagactgttaaatcactaaaacacacatcaatagttccaacaaagcataagaaaataagtgcaacaagttttaaaacaaataaccaatagtctgaaataaagcagaaacaaagttagaaaataaaacacgataaggagggtggctagtcctcatgctctgagccggaggtgggtgtgggagagcgacgacgacgacgactgggggcaacacaaccgcagcgagaaagtgtagctatggcgttccagacggtcttgaagctgtcaacgacgtactgctgaaagacctgtggctccatcgggatgggtggaggaaccaagtgatgagcgaacacagcaccaaagttgacattacggtcaacttgctcaaatccaaggctttcaggaaagaagtcatgaagagcgtgatagagcagtaacaactcagagagtctcatcttgccaggcttcatcttgcacaacagtgtgctactaatcagcctaaccaaataccgtagaacagggtggcggatctctgagtgaactgcgtccttggaatcataaatttcattaccaaaactgctctagaaaatctgagaatccttaaactgaccaggcagggaaactccattgagatcattgtcaaacccatatatgtcacccaaatctcgcagtggtaaactgtatctgacaccgcaaatgaagaagataagagctccttcctgaccgttgcgtttcctgtcatgcaaataagaaaccctaacagaggccatgatacagatcgtactgcctacaacagatggttcccaaacttacgtcatctagcagccctaaaactgatttctctatctgcaaacgctgcatcaaaccgaaatccgcaaatcgagtaggcaaaatttatacattcatccaggcattatagaatagagtatcataatcatcccaatctggagaaaagggcgattgatatagtcacctttagtgaattccttgttgatatctttctcccaacccctttgagaaggaattc

SEQ ID NO: 193 - DNA, 102331 bp, Arabidopsis thaliana
aagcttgaatagttcacctagtatctaaaccagagcccttctatgaacctacctgttttttcttaaatgcctaggctcatctatgatggttcaaataacaaatacctatggcgggaatacctattatctaatatcaagttctaggtgatcaatctaaaactagcattaagaataatcaagatgaagaactataagaataatcctaaggggttttcgatctactaatccatctaaatccctattgagactccgtagacccaacaaggtgattactcaaacattacaatagaaacacaaatcataatctgaatagttttcattgatgaattaagaataatagcaaaggagttcagaatcctctctttttagggattggattcttttctctaaagtgtaacaaaagctcaagaacaaaaactaggtctaacaatgaccaaactattaggtatttaactctaaaaacgtgcagggactattttgaaaataaggaaaacttcagggcttctcaaagacttggtgtaaaatgaatattctcctggcagcgacaagagtgtcgatcgacacaggtgtggtgtcgatcgacaccagcttctgaaagacgtccttcaagatctttattgctgaaaagcttccaaaattccttattgtgctccatgtttcccagatgtgtgagtgtacctggaatgacttaaatcgtacgaaaaagactagagagatctctaaaaattattctgaaactgtgttagaaatcagtaaaaaccgggacatatcaattcccctaaactgtgttagaaaggttgaatctgcgaaagaggtttgaaaaacatagaaactcccaatctctctggtttattaccttgatcatacaaaccaaatccatgaaataaacagttctaatcaaatcctgaccaccatgtaattctctgctagcccacacaacatcctaaattccataccaaagcactcaactatatcaactaggctatcatcgctgggtctcatcaatcaagtgaatgcttaagaaccttctagactcattcctgaactataccatggtaaatcgaccattcttttatttttttctttggtgttctttctctcccccaaacttattcttcttagagactaaacaaaggggaactcgcatactggatcgacaccctcggcattttccaacttttgtaattgatcgttccaaataatgtataataatggggtcatacgaaacattcctacccctatacactatctgaaagtcttctcaatctttctttatttattatcttctttttcttttttttggggagtggaacactttctttttaacatattagtcgatctatcgggtacgaacaaggagtcaagtcctatgagcactaatcgttttgatgaggtaaaaggaagagccgtgagattagctccagcttttgtggattatgttgggaatggatgtccttaagtttgttgattggccttctgggattttcattagtcggattgatttgaatctgcagtacttaaacaatccagggaataaactcgagagatagatcataatttcagacaaaagttttgactcaataaaatgactatctaagttaaaatgacacaactgactcataagaaaagaaaagatgaagttagtaactgactcccccagacttaggtaacattgtccccagagttattaagctagaggaatcgaaagagaaatagtcaaaagttaaaaagtcagtaaatgtgagttgccacctgagagtggtgtcgatcgataccatgatggtgtcgatcgacactctggtcatttcacattgctttgtgaattctgctcattgttgtagagccttggttagtgttttcacatggatcctccagttagactgttaaatcactaaaacacacatcaatagttccaacaaagcataagaaaataagtgcaacaagttttaaaacaaataaccaatagtctgaaataaagcagaaacaaagttagaaaataaaacacgataaggagggtggctagtcctcatgctctgagccggaggtgggtgtgggagagcgacgacgacgacgactgggggcaacacaaccgcagcgagaaagtgtagctatggcgttccagacggtcttgaagctgtcaacgacgtactgctgaaagacctgtggctccatcgggatgggtggaggaaccaagtgatgagcgaacacagcaccaaagttgacattacggtcaacttgctcaaatccaaggctttcaggaaagaagtcatgaagagcgtgatagagcagtaacaactcagagagtctcatcttgccaggcttcatcttgcacaacagtgtgctactaatcagcctaaccaaataccgtagaacagggtggcggatctctgagtgaactgcgtccttggaatcataaatttcattaccaaaactgctctagaaaatctgagaatccttaaactgaccaggcagggaaactccattgagatcattgtcaaacccatatatgtcacccaaatctcgcagtggtaaactgtatctgacaccgcaaatgaagaagataagagctccttcctgaccgttgcgtttcctgtcatgcaaataagaaaccctaacagaggccatgatacagatcgtactgcctacaacagatggttcccaaacttacgtcatctagcagccctaaaactgatttctctatctgcaaacgctgcatcaaaccgaaatccgcaaatcgagtaggcaaaatttatacattcatccaggcattatagaatagagtatcataatcatcccaatctggagaaaagggcgattgatatagtcacctttagtgaattccttgttgatatctttctcccaacccctttgagaaggaattctctcttttggatgctttggccatggaaatcgatgaataggaggttgaggggctgcagcttcggattccggttgagaagggctgcgaccgacggcggtggagaagcgtcggcggtgtggagggacggtggaggaggaggaaggtccgacgctcttcctagccttctttttctggcctgtcatcttgtagatcgatggaattgatacttggggaagatagagggtgagattctattgagtttagagcctgaaatcacgagaaatggtgaagaatcgaaggatctatggaggttttagtgaattcggcggttttgagaaaaatgaaatgaagaagatgaagttttaggttaaaacgacttacctgaaaaatgagggtgtctatcgacaccatcgcgtttttggtcgacacgctttttttatttttttttaatctgaatatttctataaaataaaaaaaatcctaagttagaaatcaaatgaatgaaatgaataaaaggagaaatacttaccagtgggttgcctcccactaagcgcttgtttatagtcaatagcttgacattgcagttgcttaattaacaggtgggtcctgaagatccaaaggcttttctactggaatctctgtccattcacagcaaatggtttgccattgttatttttgagaatgattgttccatatgacctaaccgagtgaactgtgaggggacctgtccaacgagaagacaatttgccaggaaataatgtcaatttagaatcataaagaagtacctggtcattaggctcaaaggtccgagtaaggatcttcttgtcgtggtagccttttgttcgttccttgtagagcttcgagttgtcataagcgtgaattcgtatttcatcaagctcattcagctgatttgatgtcgaaattcatcatcttgactgcccaagctgcttgctctaattccactggaagatgacaagctttaccatatagaagatgaaaaggtgtgcttccaagcggagttttgaaagctgtcctgtaggcccacagtgcatcatctaacttgtaggatcactcctttttcgctttacccactgttttctcaagaatctctttgatttgcctgttagaaactacaacttggccgcttgtttgtggatggtagggggtagcaacccgatgctagactccatactgtaaaagcaatttcgcaagaatcttgttaatgaaatgcttacctccatcactaatgactatgcgtggaactccaaaacgagggaagatgatagatttgaagagtttcatgacaaccgttgaatcgttcttcggactagctatagctttctacccatttggagacataatccacagctactaggatgtagagattcttgttggaaggtgggaatggtcccatgaaatctataccccaacaatcgaatacttcgacttcgagtataaatttctgaggcatctcattacgcttggtgatctttccccttctctgacaagggtcctattgtgaccagagtatcccgaaacattgtaggccaccaaaagcctgcttgaagaactttggatactgttttgaaagttgcaaaatgaccaccatagctagagctgtgacaatacgatagtatatcagggacctctgttgcagcaatgcatctcctgtaaattccatcagaacaatgcttatatagataaggctcatcccaatgatatcgcctaatctctcgtaggaatctattcttgttgtaatctgtaaaattatcaggctgcacatctgcagctaggtaattaacaatgtcagcataccatgggtaatctttctcgaccgttgtgacggtgcaattctcggttggtgaccaatttcttgtcgatttagaagggtgtcgatcgacaggtgcaagggtgtcgatcgacaccatcgcgcaactacaaatatcaacttcctctgaaatatgagtgtcgatcgtcataatgggtgtgtcgttcgacactgaagcacgatcctgcaacctgtcacgtttgtagtcatcgtcttcagctgtatcaatcatgtatatgttctcttcaggcaagaaatcatttatagggacatcatcatcgatcctaatgcgtgacaaatgatcagatacaccattctcaactcttttcttatctctaacttctatgtcaaattcttgaagaagcaaaatccatctcaaaagtcttggcttagcatccttgttttgcatcaaatacttcaaggcagcatgatctgtgtgaacaataaccttggatccaacgagataagatctgaatttttcgaaagcaaacaccacagctaacaactctttctctgtagttgtataattcctttgagcatcatcaagagttctactttcatagtagattgcatgaagtttcttatccttcctctgtcctagaatagctccaactgcaaaatcacttgcatcacacattacctcaaaaggtaaatcccaatctggtggctgaacaattggtgtgttgatcaaggcctgttttatctgctgaaatgcatcatgacacttctgtgtaaactcgaatttgacttctttacagagtaaagcagtcaatggtcttgcgattctgctgaagtctttgatgaatctcctataaaaaccagcatgtccaaggaaattcctcactgctttgacattatccagcgcttgaagactcgtcatgacctcaatcttagctctatcaacttctataccatgctcagaaatcatgtgtcctagaactattccatcctgtaccatgaagtgacatttctcccaaatcaaaactagatgtttctcctcacatcttgctaacactttgcagagattctctaaacaatcctcaaatgatgatccataaactgaaaagtcatccatgaaaacctccatgatatcctcgatcatatctgtgaagatagacatcattcctctctgaaatgtcgcaggagcattacaaagaccgaagggcattctccgataaacaaatgtaccataggggcaggtgaaagtcgttttctcctggtcatctggatgaatcgggatttgaaagaatccggagtatccatcaaggaagcaatagtacttatgatttgctaacctctccaacatctgaccaataaatggtaaggcgaaatggtctttcctggtagcagcattcagctttctgtaatcaatgcacatccgatgtcatgtgattgtccgagtaggaattagctcgtctttctcattcttgactactgtgacacctccctttttagaaaccacatgaactggactaacccaactcctatctgagattggatagataatccctgcttccaacagtttcataatctctttcgtgaccatttctttcagattcggattcaaccttctcttatgttcgactgaagacttagactcatcctcaaggtgaatcctatgcatgcatacatcttgggatatacctgcaatgtcatcaagagagtagccaagagctttgcaatgattgcgcagcttgcttaggaataaggtgagctctgcgggattaagagaaacattcacaataacaagataagtagaattttcactaagaaaagcgtaccttagccctgctggaagtggtttcaattcgattttaggagctttggctggatcccaatctgaagtaggagtcggcgttgaagtcaaagatggaagagcttcttcaactgtaagttgcatcacatgttcggtctcatctagcagcttagtatatgttgaagtttcacagtccaaatctgcactatcctctatggaagagaccaaaactcgcactagtggtttttttaattccatctctcaaatactatctgaaactgaggaggtgaaaggatctgttaagaaggttttcccttctatgatcggtttcttgaccaaagtgttcatatcgaattgcatagttagatcaccaacattcagccctatgctcccttgtcgaacatctatgattgctccagctgtgtgcaacaaggatctccctaggattaatggatccttagagcaggtccattgggagggccttaacagatccttaaccaaaatctttgagtaattttgagaaaaaataaataaaaattttgattaaatgttaggatcgcacctaattttaggatttttgatgatgttaaggatcggatacgtggcatgttttcattggttgagcttttttgacaaaacaagtttttttcttctttgcctttttttttcatttatcgatttctctctctctcttgaactcggctgtgcaattgaacgattgattatcgccggaagatcttcatgcttttatatgatcaaatcggaagagattatcgcccggaagtcgtctctaatccactgtgctcatcatctcaaccgacggtgctcaacgtcgacgagtttggtgaacctaatcggagaggattgtgaatcatatcggagtcttgtttgaaaccatggtccagtctcatgataaaggtatgattctatctttaagtttgtgtatgattctatctttaatttgggttggtagatgttattgaaattagagtttcgtgaattgggaattcaagcaaaataaattagggctatttgatgtaaacgaattagggtttgtaagaatgcataatcagtctctttcttggttattagtgatgattgaagacgatttataggctgtagattgtttgttcacactcgattatgagatcaattttttatatgttttgtatgtagaatgtatttgtcatatgtctatcaattgaaatctctgaatattatgtctatgaattgtagttcgtacatctgaatttgagatgtgtttggattgtttttatttgaattaattgttaaggttttttatgttcctgtttctttatagtgaatgaattatttttatcttggtttggtcacaccgcattctttacttggtatgaaatcaggctcatcttggtttgacgtgtgagattgtcaaggtatgaaatgcataatttaaatttacatgcttcagctttatgtactttttttttccaggtcatatgtgctctgattctcatctttttcacaacattctttactttcataatactaaggtaacttttattttccttgttcagatagtcttgtttttgatagaattctttcagttttgagtttttgaattagagaatgctttggattatggaatgctttgtatttacatgtttttttcttttagctgtaggtcgtcgacgacaacacttatagaagaccaacattatctcttttggtttgtcattgcaaatgtattttgatttgagagcacataacaatattcggacaacaacttctatgcaaatgaattattgtctttcatttttttttagaaacctacttttagaacttaccattggacaagaaaaaagtttaggattgtacaaaaattctaaacttcaaatttttcaaaatttattactaaaaaaatataaggattccattattaggactccttgatgggcatgctcttaggttccttctcataaggcaagacgacaaagtttgtaggaatcatgctctttccaatcatcacgggaacatcaataagaattccatctggaattcgggtagaacgatcagctaacacaagagtgataaaggtaggctcaagattggaatacccaagacgcatagcaactgaacgaggcatcagattcacactagaaccgagatcacataaagctcttgggaaggaatcctgattaatggtgacactaagtacaaaagttccaggatcaggtagcttcctcgggattcattcctgaataatgtcgcttccttgctatgaaatcatcataacaatgcattctttcgtcaaattcttagtaaccattgtcttaacataccttatgattgtatgagatagatgaatagcttcaactagagacatctcaacaatcagcttatcaatcatagccttgcatctaacatcatctaaggcttgtcttgactttttaggactcttggggaagggaattcgccgatttgctgaattggttgcagttagaatttgcacattgtctaatcgaaccgggtgtcgatcgacaccatcgggaattgtttcctcttcctccgcgaaattgtcgattccactcgacaaaggaaaaacagagtcgtcaagagtaattggtgtcgatcgacaccctggtgtatcgatcgacactgatttgttttctgcaattggagaagattgatagtaggattttagtcaattaatcctaaaacactatcctgtcgttgtagtattttaggatgtcaatccaatccggtgtgatgcaaacagatgagatatgatcagaaagctctaagtcaagccaacaagttcatggggttatcgaatagtgtggtctccttaatctattcaggcggttgacaaaacttcatagaagcgatccctagacaacaagttcaacaacagattaattcactcccgtgatagaaatcctcaagcaaagctagacactgacctaaatccctttagccatctctaactaagcaggcattattgaatcaacatgttaaagccaataccctatctacagccaatcccttggggtagagtgagatatctctggaattaataggatccaacgcccatgaaacgccttctgagcgctggacgtcgagactcatattccacattagctagtgaaacaagcaataagcgcaactaatccagaagggattctagtattctaaactcaaccacctaaaacgaccaagtaaaccacaactaatctatcccatcctcagaaatatagttcactactcagacataatcaaagacaatagcaaagcaacgattgagaacatgataacagaaatgatgaaagacttagacgaaaactgaatatcaaatacttgaaagtgaaaatacaaagtcgcaggagaaacactgcgactatcaaagttgcaaaaatgtaaaagcgagataataacagataatagcgaatgccctaggaaaaaccttaagaggcagtttatataggcgagaaatgaaacaattaaggaaactaaatatatagcgaatcttcacgtcatgatcctagaccgaatgtgtcattggcatctgacgggctgaaatgagctccctgtgatcgagtatgtcattgatcaaactgggcttcaggggctccgccttgcgatcgagtgagatgcagtgaagtcgagattgaatggtccagcgaccctgtgatcgagtgcgatcgagtggatgtcatgaggtggtgatcgagtgattgcttcggcttctattctcttcttcgttcttagcttgtctggttgagtgcagaacgagcagataggccttctggtgatcgagtggtgatcgagtggttctgatggggtgattcctccggctttgcgattgagtgaaactgaggtgctggcttctccggggttgcgatagagtgatttgccttggcagggctccgaggctacgatagagtagttttgctaaaggcgtcattgggcattctgactttcttttctgtttctcctttgtttgaactccaaaagcatccaaagtacctgaaaacaaccaaatatgcaatgcacatgcaatcctaatgcaaattcgtcctaagtatgcaaaacacactaaaacgactcctaatgagatgaaatgtggatgaaacaatgacaaagtggtgaagaatgaatgcctaaatcatgcaaattatagacatatcaactcccccaaacttagtctttgcttgccctcaagcaaacaagaagacataagcggaaggagaggtttgaagttggggattcagaaccaaagcatgagatatgacaattaagatcaatgtaccaactaacagttctaagatgttaggtgatcgacttctacttaaaaactttagccatgctctattatgatccaaacctacactcaaatgcacaatgcgtcaagatcaaccaatccctttaacattcattaagtttgaaaacatgaatcaagatatgcatcgctagtgaactcatttggctaatgacaggttatgagacaaagatggtcccttttaagtggttcagactttaatagcaggggactttcaatgaaaaaggactgagctttagaagaatgctaaaggtaagtgccaacctatgcatacaagaatagcaccccatctacccaatgacataaaccgtgaataacaagtagatagtcctatctctaaacccaatgatgatcataagtctactcttttgcactaaaggcatattttgattttttcttggatcaatgtttccttttcttttctttggctcttgttcttaaggagaagcttttcttaaagtctatgagtctaatctagtgaattggttttacttaaactctaatggctcttatgatttttgtttttttctcttttcctttctgtttttattgccattttttctagagtatatcttatcaattctatgcttgccaaacattcactagacctcgatatgattctcagcttccttctcctaaagattctaaccagttttcgtttttttttcttttcacactcaatctcaatctgcaaataagttcccacctactcctaccaagtccgaaaacgcggattggaactacatgagatactactcttgtcggctcaaacataacatgttctaccaagctcaatcctgaaaataggccttacatgctctcacaaaataacatggcttgaaagaagggtttgttaagggtgggggaactactccaataatagaagcagctacttggattaacaagagtggtgaataagtgaaagaaaatccaaatatgtattctatctacgagttcaaaaacgatgcaaacatgatcattataagtcagattcaagttcaaattgacaggaaacggtgtcatgacatgcatcgagtggtttctataaaacatggtgcggttttacttcaaagtcgttcaaatgcctcagagaactaataactcattttagtgaatcatcatgcttacaaggctattttctcattatcccctatgcatatgcaacaatcctatatgaaacactctatacttgatcctaaatgtaatgcaactaaatgatcactctgtttttgtggaattcattttcaaaaatattcaaattttttttgttttttttctatgacttagatgatatgcagactcaaatgatattcacaaaaaacaagtcaaatacgtcttgaaccctcccccaaacttcaattacacagtcccttgtgtaatcaaaatttgtgaaagaattcaagataaacacagaaacaaaaacaaaagcggtatttacaaagggttttggtgtgttacctcagtagaatgtcctagagatgtagtcatccatatctgcttgagtgtactcagcaggcatgaccggttcttaatgtggctccgccatctcctcgtcattgtgctcgatcgcaaccccagcaggttgtgcagcacgacgctcatgtgttctccgacccgacatttctgacccttgcttgatgaatgtacagttctagcactcttcctcctcttgtgttccattggctcatgagacgagtgccttgcgggaacttgcagaatggtgtgatccctttgttgataggtgaattgccttggtgggagaatgtcgtggcagctggatggcatgtcttcaggcgggttgtcattgaagttctgtcgggcattttcacctctccttgcgattgagtggtttgggcaattccactaggagaccactcgatcacaccacttccatgttgcgatcgagtggtttgacattgtcgttgagaaagatgttgtcccaaaaccactagatcgcactcccgagcttttactctcgtcttgcgatagagtgattcatcaaaaatttgaatttttttatttgaacactcggttgcatcactgctgttgctctagctgttatttatttcctgagaatcaaagccaaaaccaaaacaaatcaaaagtaacaaaataaaattaaaactatatacagggataggcatgggacttcctcccaagtgagcttgttttaaatctctagcttgactcctcacactcattaggctcaaggagggtgatagagtagaattgacgtctcctctccttccttagtagatacaacatcaaattcagcatgctctcgtgacaagtctgtaattgagtactcaatgcccctttcttggtaagctcctttttcatcatctggatagtcgtcttctctagactgttctaatgtgaattcacatccttctttactaaccataggaataacttcatcatttgggacgtccttgatgtcgagtggtgcttggttggctttcccatagagatccttgacttgatccttcagctctttcatagtgtgtgttagctctctaatagctttgtcgtgccatttagacctctccttgagttccaaccaatcatttgatgccctcatgcttgactttagctgtttggttgagcactctagtcgagtatcaattgagacttcctcgttcaatgcaacatcctctctttctaacgcaatgacacctttaaagatctctgatcctggtactttgttgtgtgagtctaatgacatctcatagctcaaggtctcactggagagaaatccagcttcattacttttggtcaaagcagtttgaaggggatctttgtcagtaagttcctctagcagttcattagctggttgacccatttcttcaactaagaaggtttgtccttctattgttggcttcttcataatgtccctgatttcaaacttcattttgaaatcctcccctagattaagattaatttttctttgcttaacatctatgactgctccagctgaagccaagaaaggtcttcctaagattagaggatctttagattcttcatttatctcaagcacaacaaaatcagtagggacctctactccattaatcattacttgcacatcctctaacaggccaaaatgtctccttgaagtcctatcagcaagaatcaaggttaggtcacaaggcttgtactgaacgaatccgagcttccttgccatagagagtggcattatgctgactgaggctcctatatcacatagacaattgctgaaagtcaattgcctaatggagcatggtagggtaaaagatcctggatcttccaacttttcttgaataatcttctgctgagtgatggcactgcactcatgacttaatagcaccattccttggacttctttgatcttttctgtaatcaggtctttcacgtacttgtgctcgtcaggcatatcctttatgtgtttttccaggaggactctgtattttgcaaccaaaactttcttaaaacgaccagagaatggatggggaggtttgtaaggcggtggcacgaagactgtgtctttggtctttgcagcttcggatttttcaacaaagcgagtaggtgggggagcttgtggttgagtgggttgactggtgagtttgagctcttcgattgtgttgtcagccaaacaatcatcttgataaaaatcctccccctctagaattacactgtcctcagtgtttgatgtagggacatatcgagttggcagctctcgatcatgtctgatagtgatggcatgggcagtggcatactcctttggattctggattgctttctctggaagctggcataggttgttgttaacagatggtgaaacgaggatgccttccacacatctcatcctagtgctcattgattcgaacttgctgttaagttcgacgccttgtcggtcgactttgttgtttacttcggacaacttcttagcgattttcattgctcttgtggcttgtccttgaatgagctactggagcatagtcattatgtctgaattctgaggcacaggtgcttgttgttgctgtggtgtgaaaccaggttgttgttgttgttgttgatatcctccttaaaactactgctttggaatgaacccttggctttgtttgtaaggaacaaacagtttgggttggttctactgctgttgctgctgaggatagacttggtcctgagggttggcgacattggtgcttctgtttgacagatttggatagggtttgtaattgttttaccccatgttgtagccaccttgattctgaacatagctgatttcagcacactcatcattctctccctcttttacttggaatggttcatcttcagagataaagtgaacatgtttcttctgcacttggaggattttgtcaagtttgtcattgagagctttcatatctctgtggtgcttgtcatcagtgtcagaattggtgtggatacttctgtcatagtcttcattgtaattgccatccgaatgagaaaagttttcaactagctcccatccttcttcaacatccttcttcaaaaaattcccatttgaagcggtgtcaagcagcatccttatcttaggcaagacgcctctatagagtgtgttgagaagagaagcttgcttaaatccgtgatgagggcatttggtttgataacccttaaagcgctcccaagcttcacagaagctttcattttgcttctgagtgaatccggatatctcattccggagtcttgtagtcctgatgttggagaagaattttgccaagaaggcatttttgcagtcatcccaggtcgtgattgaattcttgggtagcgtcttttcccacagatgggctttatctccaagtgagaatggaaacaagcgaagcttgaaaccatcttcactaactccattgaatttagtgaggccatagagcctttcaaactagtcaagatgatctagcggatcctccattggcaggccatgaaacttgttcccctgaaccattgcaatgagatcgctttagatctcaaagttgttgttttgtattggaggtggaacaattccatgacggtggttgtggttgtgagggaagtcaccagcaccaatgttggtaggttgctcttgctcatctacaatgtcagccattgtgtcggtttctgtctgttctatcagttggcgagcaatacggtcgatgttatcgttgaataggaggttctgatttccttgtgatcgtgtatgtatggcaacggcgccaaattgatagtaggattttagtcaattaatcctaaaacactatcctgtcgttgtagtattttaggatgtcaatccaatccggtgtgatgcaaacagatgagatatgattagaaagctctaagtcaatccaagcagaaagttggttggttttaacagtcctagtatgcaataacagaaatgaaatgaaactaaaagcagaaatggcaatagcaggcaggtgaataacaaagcagaaatgataacaggcaatcaaatggataaacgattcctaaggatggggttatcgaatagtgtggtctcattaatctatttaggcggttggcaaaacttcatagaagctatccctagacaacaagtttaacaacagattaattcactcccgtgatagaaatcctcaagcaaagctagacactgacctaaatccctttagcgatctctaactaagcaggcattatcgaatcaacatgttaaagccaataccctatctacagccaatcccttggggtagagtcagatatctctggaattaataggatccaacgcccattaaacgccttctgagcgctggacatctggactcatattccacattagccagtgaaacaaggaataagcgcaactaatccaaaagggattctagtattctaaactcaaccacctaaaacgaccaagtaaaccacaactaatttatcccatcctcagaaatacagttcactactcagacataatcaaagacaatagcaaagcaacgattgaaaacatgataacagaaatgatgaaagacttagacgaaaactgaatatcaaatacttgaaagtaaaaatacaaagtcgcaggagaaacactgcggctatcaaagttgcgaaaatgtaaaagcgagataataacggataataccggatgccctagggaaaaccctaagaggcagtttatataggcgagaaatgaaacaaataagaaaactaaatatatagcgaatcttcacgtcatgatcctacgaccgaatgtgtcattggcatctgacgcgctgaaatgagcttccctgtgatcgagtatgtcattgatcaaactgggcttcaggggctccgccttgcgatcgagtgagatgcagtgaagtcgagattgaatggtccagcgaccctgtgatcgagtgcgatcgagtggatgtcatgaggtggtgatcgagtgattgcttcggcttctattctcttcttcgttctcagcttgtctggttgagtgcagaacgagcagataggccttctggtgatcgagtggtgatcgagtagttctgatggggtgattcctccggctttgcgattgagtgaaactgagctgctggcttctccggggttgcgatagagtgatttgccctggcagtgctccgaggctgcaatagagtacttttgccgaaggcgtcattgggcattctgactttcttttctgtttctcctttgtttgaactccaaaagcatccaaagtacctgaaaacaaccaaatatgcaatgcacatgcaatcctaatgcaaattcgtcctaagtatgcaaaacacactaaaacgactcctaatgagatgaaatgtggatgaaacaatgacaaagtggtgaagaatgaatgcctaaatcatgcaaattatagacatatcaaagatgaaggctgagcctattgttcgcgctgaagtattgagttgagctgctttccgcagcgtagtgtaattgcattgatagaagcggatgtaggtgaaagattggagcagtgagagcgtagattgtcaaaccctgtggatagagaatcatatttggtatggagatcggttgagagagagtcatattggcttttaagctctgtttggcctgcaagaagctgggcaaacatgaactccattctggtttctaatgacggttgagggggggggggctaggataggagcagataagtcctgaatcggagccaagatgctctaagggattctgctggagcttgggtgaacgaagaaatttgcaaacgaattgcctctgtcacggactcatcaaagaaatgattcgtgaatgcattctttgtatcagtccaattggttagggaacctggtttcagttgacgcaaccatgatgttcctctgctcgcgagagagtgggggaagagtttgcaaagaaggtaatcagctggtacaccttctgctttaatagaggaaacaatgtcttcgaagacttccaaatgattcaatggtgattcatcgggagctcctctaaaccttcctctagatacaagatcatagtaggcagggtgtatagcaaagtcatctctttcaaaagaaggtagcttgaatgctgatcggtttgtgtagaagagataagttctgttaaaatcgcctattgtacctgtctggttctacacagggtgtcgatcgacaccagagttgtgtcggtcgacaccgtcgtggaaatctaccatgaaaacgtgagtctcaatctgaaggtacctgaaaaacaagagaccaatagacaaagaaatacgtgaataggtggtagaaaagttgaatttagacttaaaaggacacctagtctaatggtgaactaaaagagaacttcgccaacggggccaaatttgatatagctcaaattgccttaagcttactccgtcaattaagagatcatcgttagcacttaaggatcgaattccattgagctctcgatgttcacacaatagacttatgatgttgtttaataagctaaatgaagtaattgaatattaaaggcaaataagcaagtaaatgagttgtacattcaagtgattaaagagtcaggtctaaggaattgtctcgcgagatagataaattgtagatctagataatatcaggattgttatcgcaccgttctcaaactcaaactataattctagagtaacagtggcgttccgcgaaactctctatgcttacaactaagataaccggagaagccgagaaatccgatgctaaagcatgcattgttaataagcttgattagttcacctagtatctaaaccagagcccttctatgagcctacctgttctttcttaaatgtctaggctcatctatgatggttcaaataacaaatacctatggcgggaatacctattatctaatataaagttctaggtgatcaatctaaaactagctataagaataatcaagatgaagaactctaagaataatcctaaggggttttcgatctactaatccatctaaatccctattgagactccctagacccaacaaggtgattactcggacatgacaatagaaacacaaatcataatatgaatagttttcattgatgaattgagaataatagcaaaggagttcagaatcctctatttttagggattggattcttttctctaaagtgtaacaaaagctcaagaacaaaaactaggtctaacaatgaccaaacaattaggtatttaactctcaaaacgtgcaggtactattttgcaaataaggaaaacttcagggcttctcaaagacttggtgtaaaacgaatattctcttggcagcgacaagagtgtcgatcgacacaggtgtggtgtcaataaatccgactcatatgctcgacctacacatgttttcaaatctaccaatccctttaacattcattagttctggaacgtgaatcaagcaatgcatcatcaatgaactcatttggctaaggtaaaaggtcaagagactaagatggtcccttacagaataggctttagtaacaggggatctctcaaaaaatgattaagctttaaaagaatgctaaaggtaaatcccaagctatgcatacagagataagatcccatctacctagagtatatcaaatgaagctctaatggtaatcccatctccaatcccaatataagaacctaactctaccctttgcattcatgaatcttttaagccctttttctaatcattcttttcttttctcttaactctaggagaagcgttctcaacactttgatacatctagcggatttggatttctttaacaactaaggttcctgtttttaacattttaaaaccgagggcttttgcccatcttcaatagctaacaagaactctttcttttctttacaaatctcaaaatctttactagactttttctgcttctttagcttacttcacctagagtcttttacctttcctcatcaatgaatcaaccctttttttttcctttaaacacatcccaacccaaagtataagcgcccacctagtcatatctagtccgaaaaatgcgaactagaactacatgagacactatctctgtcgttacgaacctaacactttctaccaagcttaatcggaatatgaccacacaaacacttacaagtgatatagggcttgaaagaaagtctaggtttgggttcgggttaactactctaataaggagagtcagctacttggattgacaagagtgatcaaaatgaataagaaaatccaagtattttagggtatccatgacttcaaatttgatgcagacatgataattaaagatcaaattcaggttcaaattgataaggaatgatatcagatcatgacagtgtggtcgcgtagagcaatctaggcatggttcagttttacttcaatttcattgactacgcaacagacaactagcaacgagggcactgagtttatccggtgaaccaaaattcttacaaggatatctcatcattatcccctatgcatatgcaacaatcctaaatgaaacactatagactcgatcctaaatgtaatgcaactacatgaacattctgtttttgtgaattcattttctgaaatttttcaaaattgtttttggtttttctatgcattagatgaatgcagactcaagaatataaacaatgcaacacacacttcctgagctctcccccaaacttaaatcacatagtccactgtgtgaataaacttggaagagagtactcaggacaaatccaatcacagaaacaaaataaagaacaaatcataagagatgatataatacaatggtaaagtgaggcgcttctctcaatcgaagaatgaacgaagttggtcgtcaatggctgcctgtaattgctctcaggccatagacgagccgccctgttctgtatcagctccagcaggtgggtactctacctcatcaggtctatggcggctagcaccgctctgaggatactcgacctctcttcttctgctgcggccagcaccgcggtcgcataaactacgagactgtagaagtcgtctactcctgctgctagatcgagtgagtgtggtcctcctcttcctcccagattcacgaggctcgaatgatgaatgcctcgtagggacatgcaaaatctccagctctctaggctcaggcctgcgccgacttggctcaggtgcggcatatctcctcgagggcatgtcctgagggagctgtcccttcggaatatctgtagtggaagaggagcagctgagcttggccttctgaagcttgatagctctgaggcacttggcgagtaacttatcctgtttcttgcaccacttctgcaacttgctgttgttcctgtgagcttcgctcaaactcttgctttccctcgttggaggtatatgctcacggaaatgatacatgctcgtgtcaaactccgcctcatctatttcatctgtctcatcagcatcttctgttgtagctccttcggtgtgactaatcacctcagttggcggactgccctcgaaataaagatcttcaagtgcaggcttgaagtcaatgttccttccctcgagaatcctagtagtgtcaattcaggggagaagaatgttgacgattctaatcgatgaatgctcgaatttgtagcggtcgaagtcgccaaccatgtcatactccaagaactcacatcggcgcaaatgatccaagtccatcattctaggtgctacacctggttccttgagcggtactccacaagcttccagaattggtgtcacaatgccacccacgcatagtgctcttctcaccttgttcttgccgtttgtcaacgcccacttcttgtatccacacatgtggatcagtagaggcattactggtggtgcgttgttgagatcgcctctcaagacattctttccctttgtacggcgaagaatctttgtaagcgaggaatctatcatctccatgtctatggaatctatcatctccatgtccgtgttagacacggtgcctgtagactccctggagtaaaaaacattggcaaccgagcgctgaaagtagcgaatcacaggactctggatttggttgctcttggactgcgtagagtttagcggtacattgttcccaatagtaacccacaaatccttaagctcttccctgtcaaacctaggtttggttccctttccactagggaaaccaaacagttcttccaacttcttgatcgaaagctgataccgctgttcatccactgagaacgtcaagaaccctaatcccatggtatccagctcaaagtccgtgagaccctgatacatttctacttgcagtgtggaaagaaactcgatcgtctcctccttataggcagcgtaagggtaagacatgagtgtcttcagatgacacttctcgaacagatgctgcacgtcctccagtaaccccagctagacgaaagtctcatagcagggatacctcgttccccagaagtcgttcatctcaaagaatctgatatactcctccattgtaacctcgtcgggtttattcagtagcttcgtctccttgcgccatgactctggctcatactcagtttcgatgtccttatcaatcagctcatatctactcgacatcgctctctttcctctagcaattttagctcttctctgatcacgtcgagctgcggagcgttcaaattcatccctgaagctctcgtaaacatgttcctctctctccggtctagtggaccaagactcagcttcatccacattataatcaggatccataggggattctccactgtagttactcatgatgaaacctggagacagatgaaactcaaagataaacgttaatacgttagtaacagcaaaaccaaaaacacaatctaaccagtgtaccggtcgagcgaaactagtttcgtggttagagtgaggcggtggtcgagtggtgaggttgaagaggaggagagcagctgcggtttgaccgtggaaataaaggagtggtcgagtgaactgtgaggtgaaagcgggcttgtggccgagtggtgttgctttggcggtgaatcgatgaagctgtgagggagcaacggtcgagtaactagtggattataaatgagctgcggcggtgattccttggtggcaagcgatcgagtgataaagcgatggagagatggtgtggttaggcaaagtcgagtgatgaatggacttgagagatgagagaaatgaagtcgagttaatgaggtggtgaggaggagatgacgaggtcgagtaaaggagatgatgaagatgatgacgagagatcgagtgattgtgagaggcaagagaggtgcggtcgagtgttgttgctgtgtcgagtgaaacggctatgaatgagaggtggtgatgatctttcgtggggattggagcagcggcgaagttgtcgagtgaggtcgcgaggtcgagtatatggagagatggtgatgagagcgatgaagccgagtaagtgagagagcaggcgttgatgtgagctttgagaactgagttgtggtcgagtgagagtggtgaggaagagagttggcgaattgttgtgtcctttggttgcaagaatgagaagaagaggtcgagtatatgaagagagaaggtgatgggatcgagtggtggtggttggatgatgatggcgttgaagacgagtgatggagagaagaaggggatggatttcgttatcaccttgtagggagcgtgggagacatggccgcagcagtgggtctctcatctgtctctttgttctgaatcattactctatcttcattgggaaaatcttaggaaatctcccaatcttctataaacttgataaactccctgtaagattctgtagcttctgttggtcgcgtaaaatgatgattttcaattttttgggttttaaacatccctcgtactcgaccaatgtactcgatctctaggccgtctgtagagtaaaagttttgaatttttactctagcttcacgttattcctctattcctgagaaccataaacacaactaaaacaaataaaagataacaagaaagtaaaaattatttacaaggataatcatgggacttcctcccaagtgagcttgtttaaagtctctagcttgactcctcacacttatcaagaagaaaatgaatgatagagagggtctacatagtcctctttgatatcatcatcatactcagcgtcctccctggagaggtctgcagtagaatactccattcccctctcttcaaaatatgcttctttctcttccggagtataatctatctcttcagaccatcttgaagtgaacatctttttcgggatagtgtcaatcccgtctttaggttgagcttccttctacaacttattcagcttacttctaagttcctcaacagagtgggctagcctctctatagtttcttcttgcttatcatacctctttttaagctcttttactctctcagtctcgtatctttctcctgggatctctctatcatctccagaggttttttcatcttcttttgactattgtggagttttgttgatgtcgaactgcaacttgatttccaaggttgagacttattttcccttccctgacatctatcactgctcccactgaggctaggaagggtcttccaatgattaagggattcttatgctctacttccatatctagcaccacgaagtttgtaggcacttccactcaattaatcatgactggtagatccttcagcatgccgaagggttttcttgaagatctatctacaaggatcaaagtcaggtcacaaggtttgtactgaataaattccaacattcttgccacagagtgtagcattaagctgatagaggctccgagatcgcacaggcaatcgctgaaagctaattctccaatggaacatggtagagtaaaagatccaggatcttctaacttttcttgaataatctttctatcagcagctcgagatggaaaagcatcacattcatcatctgagtcgtgatacatcttgatcctttccagtatcagatttctcacatctttgtgaggatcaggaatgaggttgagaacttccatcagtggcatcactgcttcaatctcgtctagctgtttcgctgcaacagatctctccatccacgttttcctaatggtccatggaagagcacgtgagggtaatggagtaggtttgaatcgttttaccattctgtcgattatggcggccttctcttccgaggtggattgaatgagatggcgagaaccagcagaatgattgaattcaacaacaaagcagtgaagcctccccctcttgaacatcactgtccccagtgattaaataagggacaggtcgagttggcagctctcgatcatggcagatagtgatggcatgagcagttgcatactcctttggattctgtattgacttcccaggaagtcatgtgactttaggtgcagaggtagatgctgattgtccttccaagtatctgagtttggtattcaatgcctccactttggcattcaggtcattgtagctgcagtccagcttatggtgcaatttagataacttcttagcaatttccatggagcaacatgcttgtccttgtagcagctgttgtaccatctgtttcatttcagcatcaggagcagcaagaccttggttttgctgaggtgcggacccaagtggtggttgcggctggtagttcccctgaaattgctgctttggaacaaaaccttggttgtagggaacaaaaggtttgttctgaccttgttgttgctgtggaggatacacctgatcctgaggattagcaacgttggtgctgcggtaggagaggttggggatgttggttttgaagttgttataccctttgtagccactttggttgttgttgatgtagctgacttcttccaactggttaccctccccatcttggacttgatacttctcgtcatcaacaaggaagtgcacatgcttctactggctaagaagaatcatgtccagcttgtcattcagcgcttggatctccttcctgtgtttgtcatcagagtcagttgtgcttctgacggtcctatcgcagtcctcgttgtaattaccatttgattgagccaggttctcaaccaattcccagccttcttcaacatctttgttatgcaaattcccattgtttgtggtatccagtagcattctaatgcgtggtagaagtcctctataaagagtgctgagaagagagaatttcgtgaagccatgatgagggcattggtaggtataacccttgaaacgctcccatgcttcacagaagctttcaccagtcttctgtgaaaaaccagaaatctcatttctgtggcttgcagttatggcgttggagaagaactttgatagaaaagccttcttgcaatcatcccaggtggtgattgagtcatggggcagattcttctcccagatgtgtgatttgtcgcccaaggagaatggaaacaaacggagcttgaatcctttttcactgacactattgatttttgttaggttgaagagcctatcaaattcatcaaggtggtcgagtggatcctccatgggcagaccatggaatttgttcccctgaatcatcgagatgagaccgctcttactctcgaagttgttgttctggatagcaggaggtgcaattcctttcctctgacgatggtcccgtggtgcatctccagcaccaatgttggcaggaccactctgttgattctgttcgtcagccatttcgagtggttgttggggtaaaaggttgactgtgtttctcctttctctgagttcgcgagctatgcggtcgatgttatcgttgaaaaggaggttctggttgcctgttgatcgagtttgcatatagcagaggtgaaccttgatcaagaagacaacaaaaaaacacactgttagtaagtgaaatgaaaattgaaaaagaacttgatctaagcaagtctgaaatcttaaatgtaacaaacatacacccaattggcaacggcgccaaattgataatagggtttttagtcaattatcgttgtcgttgtagtattttaggttgtcaatccaaatgggtgggatgcgaacaatcaagatgtgatcagaagtcactaagtcaagccaagcaataacaggttttggtgtgttctagcagtcctaagtgaacatgcagaaaacagaaaatcaagtagaaacagcaaaacactcgaccaacacagctcgttgcagagcattgggtgtggtcgagtaacaggcagtaagcgaaataaagacactcgactgcacagtcggttaccagacaactgggtggttgagtatcaggtcgagtaacaggaaagaattatagaaactaagcaacagatgacaagatgtagtaaacaacagtagagtaaacaataaaatcaatcagataaagaattcccgaggatgaggtaattgagtagtttcgtttcctcagtttataggtgattgatatgctcaataaattatccctagacaacaagttcattaaccaaatataagtgccaccgttacagagaccctcaagttaacctagtcccagactcaatgaccattgaagagagctaacctaacaggcattacgaatcaataagtcaaagccaaaacgctctctgcaaccaataccttggtacaggccaacaaatctctggaattagtggttcagacatttcatcgaacaccttttgggcgcggaaatgtctgggctcaaattcaagttgattggaaagcaataggcattaagaacaactaatccagaagggatctatcaatcaaactcaaccacctagcataatgagaattctaaactactctaacccatcctcagaaacctattcactactcaggttaagaacaaatactgaatactgaatactaaatagataaagagaaatccggattacaaaaggtcaagaacacagtgtctacggaataaaacctagaaaaacttgttctcgaaaatgtaaagtacatgctacttatagcaaaatatcccgaaaccctaatactcaaaacaacgcattattgggacgaattaagaactgtactcgacccaagtggttgagtgagtggtcgagtgataagctagagtcttcttttcttccttgtgctcgagtgtcttgttgagtgcagaatggagaagactctgaagcttgccatcgagtatgtagtcgagtggtggtgatggtgatactcaactaccaggtagagtgatgtgatcgagtgatggtcaggtggtggaggtgaagatactcgaccagggggtcgagtgatgtgatcgagtgtctcccttggctgtactcgaccagggggtcgagtggtgacgtgaagtgctgaggtcttctactcgaccaagaggtcgagtggtctgttgaagtcgtgaagcatctactcgaccagggagtcgaggggtttgacatgatcaggtccgcttcttccagttagctcgtcaacagcaccaaatcacctgaaatcaacacaaatatgcaacatgcatgcaaaactatcctaaacatgcaaagtgataacaaatgatgagaaatgatataaaactgtgatgatatgatgctaaagtgatgacaaattgatgctcaaaacatgcaaaatacacacttatcaactcctcaaacttagtctttgctttcccacaagcaaacaattaagaacaagttggaggtgaggtttgaaagcggggacttagagccaaaacaccaaataaaccagatgaaatcaatgtcgaagttgatagttctaagctgcgatatgatcgaattctactcaaaaacgttagccatgccttattatcaattaatccgactcatatgctcgaccgacacatgttttcaaatctaccaatccctttaacattcattagctctggaacgtgaataaagcaatgcatcctcaaggaactcatttggctaagtaaaaggtcaagagacaaagatggtcccatacagaataggcttcaataacaggggatctctcaaaaaatgattaagctttagtagaatgttaaaggtaagtcccaagctatgcatacaaagataagatcccatctacccagagtatatctgatgaagctctaatggtaatcccatctccaatcttaatataagaacttaattctaccctttgcattcatgaatcttttaagccctttttctaatcattcttttcttttctcttaactttaggagaaggtttctcaacactttgatacatctagcggatttggatttctttaacaactaaggttcctgtttttaacattttaaaaccgagagctttttcccatcttcaatagctaacaaaaactctttcttttctttaaaaatcccaaaacctttactagactttttctgcttctttagcttacttcacctagagtcttttaccttttctcatcaatgaatcaacccattttttttattttaaacacaccccaacccaaagtataagtgcccaccaagttctatctagtccaaaaaatgcaaactagaactacatgagacactatctctgtcgttacgaacctaacactttctaccaagcttaatcggaataagacctcacaaacactcacaagtgatatagggcttgaaagaatgtctaggtttgggttcgggttaactgctctaataaggagagtcagctacgtggattaacaagagtgatcaaaatgaataagaaaatccaagtattttagggtaaccatgagttcaaatttgatgctgacatgataattaaagatcaaattcaggttcaaattgatagggaatggtatcagatcatgacagtgtggtagagtagagcaatctaggcatggttcagttttaattaaaatataggctcatccaatctcctcgatggcatctctagaggaggctgtccttgtggaatagttgtagtggaggaggaacagctcagcttatctgtccgaaacttgatagtctttaagcacttggcgagtagcttgtcctgcttcttgcaccacttctgcagattactgttgttcctatgagcttcactcaagctcttgcgctccctcgctggaggtacatgttcaccaaagtgatacatgctagtgtcgaattctactgctctgtcttcatccatcccatcctcagcagcttcttctataagatcatcctcatccaatggcggagcgttctcacagtagaggcttccaagctcaggctgaaaatcaatgttatctccctctattatccgtgtaacctcagggctggggagaaggatgctagctctcttatctgtagagtgctcaaacctgaaccgatgcaagtcgccaaccattgcgaactccagaaaatcgtagtgacgtagatgctcgatatccattgcccgtggcttgagtccatcagatgtgattgggactccacaagcgatcagaatcggtgtcacaacaccacctcacaccgcctcgtgctctcttgtggttattgctgacagcccagctcttatatccacacagatggatcagaagaagtacagagaaattgcgttattgatttcaccttggagagacaagttgttcttgtttggcggagagggcctttgagagccatagcgatcatttccatattagaattggtaacagtccctgtgatctctctggagttgaggacattggctatagaacgctgaaagtacctgttgacagggttgagtatctgaatgctctttgacctggaagaattcagcggtgtagagctgccaatggtgatccataagtctttcaactcttctctgtcatacttgggcttagttcacgttccactgggaaaccaagcaatccttccaagtgcttgattgataacctgtactcatgaccatacacagagaatctcaagaatcccaatccttcgcaatccaattcatcagaggtcataccttggtaaagctccacttgcagtgtagagagtgataagcaggtttttcaggtctgcttatgtgttgaatgcgtgttcagttcaattcccctaaaacacaaacatgtcgatgcagttaaagagggtgtcaatccagtccagtgtattgctagcaatcaagatgtgcacagaaacaactaagtcaagcaagattataatgatggtgggtttctagtaacaatcctaggtcaggattaaaacaagtaaaaatgagaacttaagagcctactcgatcattgggtcgagtagaaccaacatgtgacaaaattaagaactaaaatgcaatcaacaggggatacaaataaatctaatagaagttctaaggatggattcattgataagggcaactctagggttcatcaaatggctaataggcgaaaggtagatacccatgacgatagattcaaaaactaggtcaatccactctcgtgacagagacccctataactctaccacttcctaatctcaactttcgttgatgaaacatagcagagcagggtttaagaaataatctaccaaagccaataggcagacaagccaatcccttggtcgagtttacatatctttggaatttgtaggtcatacatccatttgaacgtcttttggacgctagacgtctatgatcgaatttccacattagccagcgaaaaccgcataggggccaagcgaatccagaagggtataaacctaatactaaccacctaactaacatagagattaccctaatctaatctatcctcaagaaccctaatcactactcatgcaacattctcaagaacacaaacccagaaattactaaaatcataccaaaggtagatctaaacaagctaaacaactttacttaaacaatcaaatgcaaaaacgaaatagattaagagtacttaaagtttcaagattcataaacacaaagaaaaactgaaagataaaaacatagatcttttggacaaaccccaaaatgttctatttatactaaaatgttggaaacccaagattcactagaagacaagagacttgaggcggtttgggcgaatactcgatcttggggatcgagtaaagaggatgctgcaaagtttgcgcctttgtgtttatgctccgagtgatcaattggtcgagtagatgcttcatcctctcctatccgtatgctcagatgtctggttgagtggggaatgaggaggatccgaagacgctttgatagctcaacaagtcttgtagagatggtcacccttggtcgagtaaatggatcgagtagtggatcgagtaggaggggcgagtagattagtctgcttcttcttctgaggttgccttgatcgagtaaatggatcgagtagagtccttttaagctccttttgcacctgaaaacacaccaaaacatgcaatgcgaatgcaaagtgatcctagatgcctaagtatgcaaaacaacctaaaaatgtgcaaaatgatatgatacaatgagcaaatgcaaagctaaatgatgataaacatacacctaaaatgagtaaaatacagtgttatcagagaggaattgaattgtctcttcttcatatgctacataagggtaacctaagctgttctcgagttacactaactcgaattggatcgattagagtagaaaccgttggtcgagtaaactctctgaagttgaatggctctgttgattgcaagaacaagaggtcgagtggatacttgagatcgagtagtctctgagccttcgacggtgaacgaagcggagtactcgattgcggcggcgcaaagatggtcgagtgttgcgagaacaaagtgatggcgaacggcaaggtgaaaaggtcgagtgacagaggaaatgaactcggtgacggcggcgcggaggtcgagttctttttggaggtcgattaaacagaagggtcgagtaaatcttggtgagagatagcgatacgtggtcgaatgagtcgtggaactcagctgaggcggcggagtagttctgtcacgcggaggtcgagtgcggcaagggtttatgaggtcgagttgtttcttgatatcgagtggtggaaaatagaagatagtatggtcgagtgaaattttaaaaggagtggtggagattgagtttgagattctctctccatcttatcctcagcgcgtggtccacactcagttgactgggaaaactgcatgaaatctactgtaaacttgataaactccctgtaagactctgtagcttctgttggtcgagtaaaatattgattcaaattttgtttgggttttaaacatcacacatactcgaccaatgtactcgaccaatgtccaggttcaacagaagaatttcaaaattttgtactccaacgggctatacactcgatctccaagtcttctgtaaagtaaaagttttgaatttttactctatctccacgttgttcctttgttcctgaaaaccacaaacacaactaagacaaatcaaaaataacaagaaaagaaaaatttatttacagaaatagtcatgggactttctcccaagtgagcttgtttaaagtcgttagcttgactctttactcctttaatcatcaagaagttcttggagattaaccgacgtcacctctggaaggatttgatatgctaagtatttcttgagcctttgaccatttactgtgaagtctccactcttaccagctagagtgacttctccggacctcagtgatacagaaggggccagaccatctggatttaagctttcctggaaagagtttcaaacgagagttgaatagcagcacctgatcaccaacctgaaaatccttggtgatgatctttttgtcatggaaaagcttagttctctccttgtagattttagagctctcataagcttctaaacagatctcgtcaaggtcactgagttggatcaatcgcttctcctcagcagtttttatgtcaaagttcagaagttttaccacccacattgctttgtactcgagctcaacaggtaggtgacatgatttccaatagagaagattgaaaggagttgtaccaatgggggtcttgatggttgtcctgtaagcccataatgcgtcatcgagctttgtagaccagtctttccttgtaatcccaacagtcttttccagaattgtttctatctccctgttggagatctcaacctgcccgctcgtctgtggatgatacggagtggcgaccttgtgctttactccatgcttcttcaggaggttctcaatgaccttgttgatgaaatgcttccaaccatcactgattactaccctcggaactccaaatctcgggaagattacggtcttgaacagcttcagcacaacttttgcatcgttggtaggactagcaatagcttcgacccactttgatacgtagtctacggcgaccagtatatacttgttaccgtatgaagatgggaatggacccataaaatcaattccccatacatcaaagatctcgacttcaaagatcggattctgaggcatctcatttcttatgctgatgttgccttttctctcgcatgaatcacattttgaaacaaactcctgagcgtccttaaacattgttggccaccgaattttaatcgttgaagaatttttgacattgtcttgaacgtcgcaaagtgaccaccatatgctgagccatggcaatgcagcaggataccttctacttcattttctgagacgcatctcctgtagatcttatctttacagagagtgtaaagataaggctcatcccagtagtaatggtggatgtctctgaaaaatttcttcctttcataactggtcaggttgggaggctctactcatcatgccaagtaattgacgtgatcagcataccatggagatcctccttcaacaacattcagttggtggatctctttcccactgtagctctttccgaagaactctataaccatgagctgctcttctggcattgaatcgtctatcggaaggggttcttcaattctcatccttgacagatggtcagctgcaccatttccaatgcctttcttatctactatctccttgtcaaactcttgcaatagaagtatccatctcaacagtcttggtttagtatccttcttggcatacagatgcctcaaagctgcatggtttgtatagacaatgacctttgatccagccaaatagcttctgaacttctcaaatgccaatacaacagctagaagctccttctcaattgttgcatatcttccttgagcttcatccaacgttcggctggcgtaatatatgacatgaagcttcttgtctattttatggcctaaaacagctcctactgcgtaatctgatgcatcacacataatctcaaatggatagtcccaattaggcgctcgaacaacaggagtagataccaaagcattcttgatggtgtgaaaggatttgaggcagtcctcattgaaatcaaactcggtctcctttgcacagaagtctggttaactccctggctatcttggagaagtctttaataaatcttctgtagaacccagcatgaccaaggaaacttctgatgtccttcaccgtttttggtggctgcaactgcatcatcactttaatttttcctttgtcaacctctatacccttctctgatatcttgtgacccaacactatgccttccttcaccatgaaatgacacttttcccaattggaataaggttcttcccctcgcacctggtcaataccctgccaagattcaaaaacatgaggagaaagaggggccatagaccgaaaaatcgtccatggagacctccaccatctcctcgattaaatctgaaaatatagaggtcatacacctctgaaatgttgcaggagcattgcataaaccaaatgacattcttttataagcaaaagttccataaggacatgtgaaagtagttttctcttgatcattagggtaaattggtatttgaaagaaaccactatttccatcaagaaagcaatattatgggtgattagctaagcattcaagcatttgatcaatgaatggtaaaggaaaatgatcttttctagatgcagcatttaactttctataatcgatacacattctatgaccagttatagttctagtagggatcaattcatcattttcatttttaacaacagtcattccaccctttttagggacgcaatgctctggagaaacccaagtactatcagagatagggtagatgacaccagcatcaagcagtttcaaaatgtccttttcactacttctttcaagtttggatttaacctcctctgtggttcaatgctagagtaggattcgttttcaaggtggatcctatggttgcataaactaggtgaaattcccttaatgtcagataatgaataaccaatcgctctcctatactttctaagttcagctaatagcacgttcacttcatcatcatttaactcagcattaatgatcacaaggtaagtagagtttggaccaaggaatgcgtaccttagacctttaggaagtggtttgagatcaacctttggtgccttgagttcaaacaagtcatctaaagttggaatgatcagctctccagagtcgttggcagtcgaggtcgagtcattggtcgagtatgctctcgagtgtgcaggttgaactcgtgttgacccttcttcgctcattaccattacctctgttgctggtccattcaattcctcaaaaggttctgattcttccatcgctttatgggagtctaacagcttctggtatcccaatgtttccaaatgtagaaacccatcttcaccactttttgttaaagcactgttgagattgatagtaggatttttctcaattaatcctaaaacactatcctgtcgttgtagtattttaggatgtcaatccaatccggtgtgatgcaaacagatgagatatgatcagaaagctttaagtcaagccaagcagagagttggttggttctaacagtcctagtatgcaataacagaaatgaaatgaaactaagactagaaatggcaatagcaggcaggtgaataacaaagcagaaatgataactggcaatcaaatggataaacgattcctaaggatggggtaatcgaatagtgtggtctccttaatctattcaagcggttgacaaaacttcacagaagctatccctagacaacaagttcaacaacagattaattcactcccgtgatagaaatcctcaagcaaagctagacactgacctaaatccctttagcgatctctaactaagcaggcattatcgaatcaacatgttaaagccaataccctctctacagtcaatcccttggggtagagtcagatatctctggaattaatatgatccaacgcccattaaacgccttctgagcgctggacgtctggactcatattccacattagccaatgaaacaagcaataagcgcaactaatccagaagggattctagtattctaaactcaaccacctaaaacgacgaagtaaaccacaactaatctatcccatcctcagaaatacagttcactactcagacataatcaaagacaatagcaaagcaacgattaaaaacatgataatagatatgatgaaagactagacgaaaactgaaaatcaaatacttgaaagtgaaaatacaaagttgcaggagaaacactgcggctatgaaagttgcgaaaatataaaagcgagataaaaacggatgccctagggaaaaccctaagaggcagtttatataagcgagaaacgaaacaaataaggaaactaaatattaagcgaatcttcacgtcatgacccctcgactgaatgtgtcattggcatctgacgggctgaaatgagcttcccagtgatcgagtatgtcattgatcaaactgggctttaggggcttcgtcttgcgatcgagtgagatgcagtgaagtcgagattcaatggtccagtgaccctgtgatcgagtgcgatcgagtggatgtcaggaggtggtgatcgagtggtttcttcggcttctcttctcttctttgttctcaacttgtctggttgagtgcagaacgagcacataggtttcttggtggtcgagtggtgatcgagtagttctgatggggtgattcctccggcttcgcgattgagtgaaactgagctacttgcttctaccctggcagggctccgaggctgcgatagagtcttttgctgaaggcgtcattgggcattctgacttcatgttctgtttttcctctgtttgaactccaaaagcatccaaagtacctgaaaacaaccaaatatgccatgcacatgcaatcctaatgcaaaatcgtcctaactatgtaaaacacactaaaacgacatctaatgagatgaaatgtggatgaaacaatgacaaagtggtgaagaatgaatgcctaaatcatgcaaattatagacatatcagagatgatcttcttctgcaagctcttccagtaactcatcagctaactgatccatttctttgatccaaaagagtagcccttctatggtaggcttcttcatcgcgtctttgacatcaaaggtcatcctaaagtctttgccatggtttagatcaatcttccctttcttgacatcaatcatagcttctgcagttgctaagaaaggtctccctagaatcaaagggtctttgggttcttcatccatctccaggactacaaagtcagttggtatctccacagctccaatcttgattggtagattttcaagcaaaccatgagggatccttactgacctgtcagctaggatgagggatatattgcaagatttgtattgagtaaaccccaatcttctggcgacagagagcggcatgagactgactgatgctcctaaatcacataggaatctgttgaaagccaatggacctaaaaagcatggtagactgaatgaaccaggatcactaagcttcttaggaatgatcttcttctgtatgatagcactgcatttatgactcaataccaccatcccttgcacttcttgaattctctccacgatcaagtctttcagaaacctgtgagagtctggtattagcgctggagcgtcaacaagaggtatctgcaactcaacttccttgatgttcttggcgaacatagctctatacttatctgctaatgctttcttgtgatggccaggaaatggaagttgtggtttgtattgaggaggaacaaagaccttttctttgttcttgacaacaactggttttggagcggatggtgatgctgctgggaagataggtcgtgaagcaaagtcgagtggttgctcgagaggttgctcgagtgtctggtcgagtggctgcccgagtagtttttcagctcgatctttaccgacactgaaatcctccccatcttgaccttcactgtcctcagtgactgtttttggttcctctcttgttggaagttcttttccactacgcaaagtgatagcatgagcatattcttttggattctaaattgctttgcctggaagttggcttatatattttggagcagatgaagatacagaatgtccttctaattatctgactttggtattcagtgtttccaccttgacattcagatcattgtagctacagtccagcttgttatgtaacttagatatcttctttgccatctccatggagccaaaggcttgcccgtgaagcagctattgtagcgtttgtttcatgtcaacatcaggagcaacaggacattggttttgaggaggtagaaatccaggtggtggttgctgctggtagttcccctgaaattgctgtttgagaacaaaaacttgattgtaaggaacaaaaggtttgttttgaccttgttgttgctgtggaggatagacttggtcttgtggattagcaacgttggtgttgcggtaggagaggttggggttgttggttttgaagttgttgtaccctttttagccactctggttgttgttgatgtagctgacttcttccaactggttaccctccccatcatggaattgatactgctcgtcatcaacaaggaaatgcacatgcttctgctggctaagaagaatcctgtccagcttgtcattcagcgctttgatctccttcctgtgtttgtcatcagagtcaggtgtgcttctgacggtcctatcacagtcctcgttgtaattaccatctgattgagctaagttctcaaccaattcccagccttcttcaacatctttgttctggaaattcccatctttgaccagaagcattctaatgcgtgatagaactcctctgtaaagagtgctgagaagagaggctttagtgaagccatgatgagggcattggttggtataacccttgaaacgcttccatgcttcacagaagctttcacgagtcttctgtgaaaaaccagaaatctcatttctgagtcttgaagttctggagttgaagaaaaactttgataggaaagccttcttgcaatcatcccaggtggtgattgagtcatgaggcatattcttctcccacatgtgtgctttgtcgcccaaggagaatggaaacaaatggagcttgaatccgtctttactgacaccattgatttttgttaggttacagagcctatcgaattcatcaaggtggtcgagtggatcctccattggcagaccatggaatttgttcccctgaatcatcgagatgagatcactcttaatctcgaagttgttgttctcgatagcaggaggtgcaattcctttccgctgacggtgatcttgtggtgcatctcgagctccaatgttggcagggccattttgttgattctgttcgtcagccatttcgagtggttgctgaggtacaaggttgactgtgtttctcctttctcttagttcgcgagctatgcggtcgatgttatcattgaaaaggaggttctgattgcctgttgatcgagtttgcatacagtagaggtgtacctggatcaagaagacaacaagaaaaacacacagttagcaatcgatttgaaaattgaaaaagaatttgatctaagcaagtctgaaatctcaaatgtaacaaacaaacacccaattggcaacgacaccaaattgataataggtttttaagatcaattaatcctaaagcactatcatgtcgttgtaatactgaaggttgtcaatccaaatgggtgtgatgctaacaatcaagatgtgatcagaagtcactaagtcaagccaagcattaacaggttttggtgtgttctagtagtactaagtgaacatgcagaaaacagaaaatcaaaaagaaacagtaaaacactcgaccaacacagctcattgcagagcgctgggtgaggtcgagtaacagacagtgaattaaacaaagatactcgactgcatagtctgttgcgagacaactgggtgattgagtatcaggtcgagtaacaagaaagaattgtagaaactaagcaacagatgacaagatgcggtaaacaaaagtaaagtaaacaataaattcaatcagataaagaattcccgaggatggggtaatttattagtttcgttttcctcagtttacgggtgattgacatgctcaataaattatccatagacaacaaattcattaaccaaatataagtgccaccacaatagagaccctcaagttaacctagtcccaaactcaatcaccattgacgagagctaaactaacaggcattacgaatcaacaagttaaagccaaaacgctccctgcaaccaataccttgttacaggcccacaaatctctggaattagtggttcagacatttcatcgaacaccttttgggcgcggaaatgtctgggctcaaattccagttgattagaaagcaataggcattaagaacaactaatccagaagggatctatcaatcaaactcaaccacctagcataatcaaaattctaaactactctaacccatcctcagaaacctattcactactcatacatcattgcagaaaacataaacggtgaatggaatgaaaccatgataacaacagagtaaaaccgggatggtaataggatgagcaacagtaaacggaatcaagaacaaatactgaatactaaatactgaatatttaaagagaaatctggattacaaaaggtcaagaacacagtgtctacggaataaaacctagaaagaacttgttctcgaaaatgtaaagtacatgctacttatagcaaaatattccgaaaccctaatactcaaaacgacgcagtattgggacggattaagaactgtacttgacccaggtggtcgagtgagtggtcgagtgataagcgggagtattcttttcttccttgtgctcgagtgtctggttgagtgcacaagggagaagactctgaagcttgccatcgagtatgtagtcgagtggtggtgatggtgatatcgactaccaggtagagtgatgtgatcgagtgatggtcaggtggtggagttgaagatactcgaccatggggtcaagtgatgtgatcgagtgtctcccttggctgtactcgaccagggggtcgagtggtgacgtgaagtgctgaggtcttctactcgaccaagaggtcgagtggtctgttgaagtcgtgaagcatctactcgaccagggggtcgagtggtttgacatgatcaggtccacttcttctagttagctcgtcaacagctccaaatcacctgaaatcaacacaaatatgcaacatgcatgcaaaactatcttaaacatgcaaagtgatgacaaatgatgagaattggtataaaatagtgatgatatgatgctaaagtgatgacaaattgatgctcaaaacatgcaaaatacacacttatcatggtttacccatctcgaaccagattcgatcagtaacttaagcgaattgtcatccatattcttgaaaccatattccatccttatggataaaagcattttggacaccgatctttggaatttgtcacaagggtcgaacgactcacttcgggcttttatcaccaagttcaagaatgtactttcgaggctaccaaggaactcgcaacagtcggctttatcatccttgcggaaaggattatggcatgattcaagattcaaagaagatttaatactccataagccggacacaattcaagatgcattattctgagcgaacaactggatggaagtcgaagacgaaaaagaaagtttcgcaaaaagaaataagcaagcaaaaccggcggtcactttcccagacaagaagttcgaacctcggaagaacaaaggaccaaggaagttcggttcacaacctttcaataataacgttgggaaacagttccaggggaaagggaagtcaaacacttgggtccgagatgaaagtctgtattgtgacatacaccgagtaactgggcatctaacaaaggactgcagcgtccttaaaaggtatctcggggaactatgggcaagcatggatctttccaagttcaacatagatgatttcgtgaagcaatatcacgaagcaagggataactctgaaagtcaaaactctaaaaggccaaggctgactaacgaagaggaaccaagaagttcgaatgaaaaatcaccgtgattcttggaggttccaaactttgccatgattccgttagcgctattaaaaagcataggcggaatgttctacttaaatcaagtttgagtgaagaggtaaattaccaaggcgctttaatatcatttgatgtgaaggaaacacagcacctcaaaagacctcacgatgatgctctagtcattacgctagacgtggctaacttcgaagtatcaagaattctcgtcgatacgggtagttcagttgatttgatctttctaagcactttggaaagaatgggaatcagcagggtggatgtagtaggacctccgtctcctttggtactttcacgagcgagacagcaatgtctcttggaataatcaagttaccagttttagcgggaaagatgtcgaagattgtggatttatcgtttttgacaaaccagcagcttacaacatcatcctcggaactccttggatctaccaaatgatagcggtcccctctacgtatcatcaatgcctcaaatttccaactcaaacggagtgcaaacaattcggggagaccaagaagctttgagaacatgttatttagctagccactgtttgtagatccaatagcaattaacgaagcccgcaaagaaagggatagtcccaagatttcctagtgggcagaaggtgtacgatgtcgtgatcgaggtaatattagaagaagacaaaccagatcggaaagtttgaattggagccactttgtttgacaagataaaagaagctttggtttaactcttaaggaagaacaaagcatcgtttgcatggtcggcagcagacatgccttgcatagatccaagcataatctgccacaagctgaacgtggatccaagcttcaaaccagtgaaacaaaaaagaaggaaactcagagtggaacaaactaaagcagttaacgacgtagtggataagcttttaaagataggatctataagggaggtccaatacccggattgggtggcaaataccattgtggtcaagaagaagaatggaaaagatagggtgtgcatcaattacaaccacaaaggtatgcaacaggagcatcactatcaaacgctacaccgtcgtgtagacactcggccagggtagctagtcccgtctctccgagttcttcgcagctcatggcgatcaagtaacatcgttacaagaccccatgatagcacggttcactacgaagaccctaaagtttaagatattatgaaacatacggttaaatcaacacataaaatcatcaatatctcagcacaacctctcgaccataaacaatagcataagaatctaaagatcacatatgcaatctaatataaccattcacacaattcatataactcatgaaatcaatcaagaatgcatgagaatatgattatgaaacttaaaccattatccagaactcattcacacaattctcggctatgggaccctaacttggatcggacggacggtttaaactcggcagcctctcactcccgctcaatttctcttcacaaatcaaatggggtcgagttgggcttttataggcaagggaatggcgagtcagcctgtccagaaggattagatggtccgtcttcatcctctgcgtttcctggttcgaatcatatcttctatggttcggatggtcgttttagtttgccagtcagtttctggatgaaatgtcgtgctcatgtgaacattagttcctaaaacacgttggatgtcttgccaaaatatggatgagaacttaggatctcgatcggatactatattagcaggtaccccatggagtcttaagatttcatcgatatacttttcatttacaccaaataagccatcttggtcaagcgatccgcgactacccatatagcatcattgctacgtcctggtcttgttggcaatccagtgataaaatccatcgagattcactcccatttccatgcaggaattggtagattatgcaataaacctgctggcacttgatgttccactttaactctttggcatgaatcacattggcttacccattttgccactgatctcttcatcccaggccaatggtaatacttccttatatccttgtacatttttgtacttcccggatgaatgctcaataaagaactatgtaccgtcttcaaaatttcttgtcgtaaacctttacgatcaggcactgtaattctctcattgagtaataaagtgccgtcatcagctagatggtagccactggcatttggttcatctaatgtttttaattcctccacgattttctgcaacttttcatcttgcacttgttcttctcggattcggcgaagtaggtttgcttgagtcacagcttgtaaacccaagggctcaatagattcaccttctagagctaacaaagtcactttctttaattcatcagttaacgactctagatccttttcaacatccacttctactttccggcgacttaaggcgtctgctaccacattagcctttcctgagtgatactgaatcttcaaaactgcatccatctccgttgtcgtagattcagatctggctgtgtgaataagtatttaagactttggtggtctgtaaatactcgtaccgtttccccatacaggtatgatctccatacctttaatgcaaatactacagcggccatttctaaatcgtgagtgggataattctcctcatgtcatcttaattgctatgatgcataggcaattaccttttcgtcttgcataaggacacatcccaagccaactctcgaagcatccgtgtaaatatcttatggtttaattggctccgacaatgctagaattggagcggttgttaatgcctttttcaacttaacaaaggcctcctcaacatctttattccatatgaagggtacacctttaccagtaagtcaggtcaacggcttagtaatcgacgagaatcccttgacaaacttacggtaatagcctgccaatcctaaaaagctccgtacttctgtaacagatgtaggttgcggccattgctgtgttactgcaatcttttcaggatctgccgtaacttcttgtcctgaaattcggtggccaagaaatctaatttctcgttgccaaaacttacacttgctaaacttagcaaacaaccgttgttccctaagtctgtccattactttccatagatgttcaggatgctcttccgcactttgtgaatataccaagatatcatctataaatatgataaagaagctatccagataatcatggaatacctcgttcataagtctcatgaaagctacgggcgcatttgtaagtccaaatggcatgactacaaattcatattgcccataccttgtctgaacgacagtctttattatatccgggtccgagattgaaatttgatgatacctcgaacccagatcaatgttttaatcaacttgctcccctcaactgatccaatagctcatcaactcgcggcaatgggtacttgtccttaatagtcatgttgttaagacctcggtagtctatacataatcgcatacttccatctttcttcttaacaaacaataccggagctccccatggcgatgagcttggacgaataatcccttttcaagtagatcctccaattgtttcttaagttctgcaagctcggctggcgccatcctatatggtgcccttgcaattggagttgccccaggttcaagattaatggtaaatgagtgattcctcggcggaggtaatccttccaagggcttgaacacatcttcaaattcgttcaatacagggatctcttcaatccttgagtcactttcaacttctccaccaatagctgttaaagtgacaaggtagacttctccttttcttagtaaactctcaaccttcaatgctgacacgaacgaagcaatcttacttggtttgattccacagtaagtgagttgtggtcgattccttaattcgaacactactctgctctgcccgcaatccaaatgggcatgatatcctgataaccaatccatcctaaggataacttcgaacctttccatcggcatcaccaaaaggtttgccggtaggattgtatcctggataactactggaactcctactaacaaaatttgggtttgcaaaggtggctggtttcctgcggtatgtaccacaacattcacttcccttctctcatacccgtggcctaacttatcggccacgtcagaacttacaaaactatttgtcgctcccgaatcgaacaatacatgtgtggggttaccaccaacaagtaatgtccctaatgcatatgaaaatgatgtatgcaatatttaaactagtaaactatgcatacaacaatcaatcactcaaacatacataaataagaaaagttggaacccatactaacctgttatgggaccttcttcgggtcctgaaggtttggtaggttctacatctaaggcataaacatttgctggagtagcttgcttttttactggtggtcccttagctttctgaactggcggtgggtggttaaccatttggttatactgctttatttgcctgttcgggcatgcgttagcataatgccttggatctccacaaatgaaacaagctcccacttggttactctgtagtcccccttgtttcttcgggcatgcattggacacatgtcccaactccccacaagtgtaacaagtaacaaatgccagatttggtactttagtctatacgaccgttgagcaatctcgtgcaaaatgtcccggctttccgcacatatagcaggctcttggatcgtaagtggtcattacacgtcctccttggttaccaactttaggctttccacgatcattattctggtttcttcctcccgactgattagtccttaaaactccaggctgaaattctcgattattccctttcttgccttcgaactttttgttctctcgtaacttctctcccttctctaactcaatccattcttcaacattcacgaccctttcctttaattcactcacgttggtataagtcacaggctgaagacgtccccaaatctcaggccttagtcctctcaggaatcttcgtaccatcatagcttcatcatctgttccgttgtacaaatatctccgaagtcttgtcaaaatttgctcatacgcctggacactcttttgcccttgttccagcctcataaactgaagctctagacaatcacgtgcctccggtggaaaatacttagactcaaactccttcttaaacatttcccaggtgataggctggtcgcggtatcgtgaaacaacactatcccaccatgctcgaccatcctcatccaaaaagtttacctctatctggcccttaaagtcttccgatcacctggaagtttcaaaattcatttccagattcctcaaccatttatctgctaaaacagtattctgctctcctttaaacttccgaacacctaaatccttcatcatcataaccagctttaagaacttggccgaaggagattcgacacgatggctttcgaggatctgttgttggtgttgttgttgttgaatcatatgagtcaacaaggtctgaatcattcccaacgtctgttgagtctctagcacactttgaatattacgacctcccccatttccttcattaacttctcttggcagcgatggatttgggtgtgcagtgggttgattcacaggaacatgtggtctcgtccctgagtgggaccctttggatgtgctatagtgcacagaccttggaaaggagtattctggtttggttccaggaacatcccaatcaggcgctgcatacatattggggtaatagtatccctcatctccttcccctccagcgtatgttattccctcataaactggtgagaaattcatcgactcactcctctccactctttgaccagacatctgcatccattcaaccaaggtcaacttaacccatctacctaataatggtgaacagaccgaattaccctaaatgccttttgcgcgagtcctgctagcatcattaaccatgctttaataccacaaattgtaacgcccccgagacgctctatgaccggacaagtcacgggcgcctcgaaaacgccacattgagattgatcatcaatatccaactgaggttcgggaacccatcccaacccttggccggtgtattgacgaccactctcccacttaaacatcgtttaggcttgccaaccctcgcgatatttaaatgttgtgccgactcggactaagtcattatcaatcattactcgcaatttgtacaagaaaacccaatttatttcataagtataaatattacacaacatgttaccaaacatttataagtttcatggccagggcctagcgccaaaagcacgatacataatagaaacatacttgttttacaaaaggcacaaaactacttcaggtttcctaatgtccaccacgccctctatttcccactacgggtttcctgcaaaacaagtagaatcatgagtaatctaagattactaagtgagctcgggattccctgcagcaaacattagtttaccccaacccaaatacccaacatgaaacacgcagcatagaatggcaacgaaatgtagcttgccgaagcaactacataaatatgcaatgcattaagactccagttttattaaatcttttaaatagggcccgatatgctgccttcaaatctaataccaaacacacactcccgtgatctcccgcgttacaaccacaaaggtatgcaaccggagcatcactaccaaacgctacaccgtcgtgtagacactcggccagggatagcataagaatctaaagatcacatatgcaatctaatataaccattaacacaattcatataactcatgaaatcaatcaagaatgcatgagaatatgattatgaaacttaaaccattatccagaactcactcagtaaccaacagaaagcttctaacgattcgggcagagttctcgactatgggaccctaacatggatcggacggacggtttaaactcggcagcctctcactcccgctaaatttctcttcacaaatcaaatggggtcgagttgggcttttaaaggcaagggaatggcgagtcagcatgtccacgtgtcaagagtacgagcgagttaccaatccacatgtcatctacccacgatgacacgcttgctactcaagcggatgagtgacacgtggcctcctaaaattcggctccaagcaactaaaattcggctccaagcaactttgcttgagccccaagttagccgagccacccgtccttggcgcggtcaatggtcggtcaacgcccggcggaacaagctttcgctcgtggcacgcccgttcttgcccaaacttgcccattcgtgcatattcttgcccaaacttgcacattaatattcaatttggttttgggcacctaaggtcaattggccatgcattcaggcaaattgcaaaaattcggactcttgccggtggccgatgtccttacgggggtcattacactcaccctataaatagagccataacccacttagttaaaccttagaagccttcactccaaaatctgtccaagacgagagagaaagagagatcgtttgagtccttaacccgagagagagagagatcgtccgaacctttggtttagggaacgagaacggcctttgatttgggaggagtgtctcgaggctcagcatcttcttgtcaaagagtcacactccgatcagtcttctcgttactgggcgaggaggaggagatacaatgacaggtggaggaggacccatcgatcgagatagaggagatgatcgaggagagcgatcagtctaagcctttgatttatccctccgaggagaagaactaccacgagctggtctctctctcttcttttgaatcaagtcagcaattggttcgctgctcaacccacctcgggagaaaggccgaggagaattacgacagggagatcgatctcttcgaggtaagcgaccgcgacgaccctcacggtgaggagtaggtctgaaagcaccgacagatttggccccttcggcactgccatcatcaaccagcagagtcctgctgtattccttcttgtcaatcacggacgtgaggaacgatttgtttgctttacaagccttggccatcggcttagccaaagttttgcaccgggaagcgatagcccgggccgaagtcccgtggagtatgggaggaggcggtggaagatgattgagttgtccagggggactcattctgagattccagttagctttgataaaccggttgagggtaaacgaattccaaagggtttcgccttcgataacaactttgaagagctcgataaattcttcggtcggaagggtaagagcaatgaaagctgcaaaaggtaaaacaaacagttcgggttaaggaaaaatgagtaagcaaacaaaaggcaaatatatttctgccctaatttctaccaggtttcgtggaccatttcgatggaagcacttcggaaaggctcccaatcgaagcaggggtcttctttatgaagaaccaggtatgatgctagtgttcgtctttgttcgggagttgtgtgaggttcctgttggcatttgggtatgccgagaaataacaaactttctttgatgaacactaacactaagaagctcgttcaattcgggaactccaataatgtacccagcctccgccgctacggtgatgagccctaaaatggttcggagaaagttgggggttagttggggcagcgcaatttcaagggcggctagatatcggacaagggcttcgggtagaggaaaggtcagcccgcaacccttgaattagatctcgtaaacgcagagaatccgggacgatggtcctccgacgatcaatgaaacgttctgtgaagcatgcgagaggtttaaaacctacaccactcaatgtccccatcacggtttcaagaaggcttcattactgagcatctacagaggagctttaccaaaaatcagaatgctactcgacattgcctcaaatggaaacttcctgaacaaggatgtcgcagaaggatgggagttagtcaaaaatctagcacaatctaatgggtgctacaatgaagactatgatcgctcagagagaggaactagaggtagtgaggataaatagaggaaagatatcaaggctctgaatgaaaagctagacaagctgttgctggctcagcagaagcatatacactacatcactgatgaagagcacttccaaatgcaagaaggggggaatgatcaaattgaagagctgtgctacattcagaaccaaggagggttcaacaagggctacaacaactacaagcccaacccaaacctctcctagagaagcactaatgtagctaacccccaagatcaagtgtatccaccacaacaaaatcagtctaagccatttgttcagtacaaccaaggttatgtccctaaacaacagtttaatggaggctaccgatagcaaaatccaccaccagggttcactcaacaaccacaacaagcaccagcagctcaagatcctgaaattaagatacttattcaatagatcattcaaggataagctactggagctatggcttttgaaaagaatatagctgaattacacaacaagatcgattgttcttacaacgatctaaatgtcaagttcaaagctttgaattccaaagtcaagtatgtggagagtcaatttgcatcaacctctgctccgaagcatcctcagcaacttccagggaaagtagttcagaatcctaaggactatgctactgcaaatgctatcaacatccaccaagaagatgagtctccaccaagtcatcagactcccactactgaggacaatatgattcaagaagggggggattcaactcaaattgatgcacttgtcatccaacaattcatctggactatagagcacacacctttactgaatactcatcactctgaaaaacatttcaaaagagaaaaactcaagaaggatcagaatcaagagatgattagtagagtcatcactcaagaagcttacaagaagaaagtcatccaaaaaaagcttggtgatcctggttcattcactctgacatgctctctaggatcattgacattcaataggtgcctttgtgatttgtgagcatttgttagccttatgccccactctacaactaaaaggctagggatcatggaatacaagttctgcaacttagccttactcttagctgatggttctgttgcacatgcacatggtcgaatagaaaatctgtctgtcaagattggaaatgttgaaatacctacagattttgtggtattggacatagatgaagagggaaaggatcccctgatcctaggcagaccattcttagcttcagctggagcagtcatagatgttaggaatggaaagattgatctaagccttgaaaagagtatcaagatgagatttgacattagcaaagctttagggaatcaacaaaaggaggtcagaattttgggattcagaacatggatgttgatgaagaaacagaagctggaaccccaccaagagttagctatacttctcaactcagcaagttgaagagaacttttgaccacaagaagagagcaattgaaaggttagcttagactgaagatcttacagaagatgactggtatgagatgagaaaaatatttaaatggcaaagcagagtcatagagggattatcttcaagggtgatgaagctgaaagatcaactatggatgtttgaaaaaagagttaataagtattcaatgagtattgatccagagaatatggaaactgcactagctatcaaagaggacgaagatttcacaacagaatggtttgcaccagaagattagaaaggagttcacttagaggaaagaagcttagagagcaagttgttgagtgagaaggaaattcctattccgatatattctctaggagtgcctaaactgcccaccaacccctctgttgaagaagaacactagattcttgattatgttgctgaagaactcctagagttttggattggatataaagctcaggaggatacaattggaaagttaactcataagatggaagagttaaacaacaccattctagaacttcaagaaatggttaaaggctacaccagttttgaaattgaggattggtcaaaggagcctggttcagaagaagaagactactctaatgttcagaaaaaagcttattttgaagaaagatcaaatgagtactcatccttccatatgtcaagagaggatgcagagtatgattcaggcactgaaaattcaaccactgaagatgaggatttctttgttcctctcttcaaccttttttcaaactaagctctgtaagagtcaagcttagtgacttaaaacaagctcgcaattctctatctctcacaaccctctgcttcacctccgccactcgaggcacaactaaagcctgcattggtaccacaccttgtaaccgctccaacaactgtctcagtaggtccgccaagccaacctctggaacctgggctcctccggctgcggcacccatcactcctgggccctcagcaccaacaacatgcacaccggcaccgacatcagctccaccaacccccactccggctgcaccagctatatcggcaccaagaccgtccctagccccaggctccacagactcaggctgcgaacccacactttgctcaactgtggcactatggacatcattctcgtcggtaccctcgaggactcgtccactaccgcaatcatgaccacgactaagcccacgtccacgaccacaaactccagctcctctagccatctgagctacccaagaacagaaagctaagaaactggaacaaacaaatatatcataaaaaacttaccgtggaatctcatttcaggctcggagaggatgatactaggacttcaacaacacacaattgactaaacactccataatcaatcctcagtatgctaacaccctagctcatcccgcatcaatcatcaggaaaataatccattaattaatttttctacacatcctataaccgtgatcgctctgctactaaattgaaacaacccatcccaattttttttacaaccgttagctagtgatcccatactcactaatctacctagcagcactcatcaacaacaatagcgaataaacatcgaaaacgattaaagcacttcattaattaaccaacaattgtcacaatagaaatctaaatctcaagaaccataaaacaagcaacctaggtgaaagtcctaaccaattgtccagaactaacaacctagcgataacataaaacgcggcgacgataacatcacagcgagtgcctagatcatcctctctatcttgccacgatccacagtcacactttgcctttacctgcatcaacaatacaaatgagatgcgtaagtattatcataaaaacatagtgaggcaatcctcccatctacgagctatacacacaatcaaataaaggttataaccacaaataaaacataacaaaccagtcattgaacagttcacccaaaaacacatcaccacacctacaaatcatcacacaaaacaagtcatacaaaccaatcgctcagatatgctcatggtcacgcactcaccttaacaagttgattataacaataaggagagactctccatgcgtttgaaacagtccagaaacgtctgttaactatcaaatccctttggtgaaaagctagccttagacgtcacgaagcttcccacgaaatctcgtgccaatcagaaaccacacaagagcacgatctcagttacaatcccgctggtcctaactcgcgtctgagaaaacgtgtctcgcgaaactttgacaacgatttgatatgtcgaaactgtttccttctaaaccctaacgattcttgtccttctccttctctctctttttctcctttatagaacgaaaagtggctagccaaagccctaattttgagtttccttctcttataggcacactctagggtttccattaaaccaaccgattaaactggacgatttaaacacaaactctaaccgattttccggttcacgggcgttacaatcatacatggtatgcttatgactttttcatgttctttgagcatttatgaaacatttctctagtcattgtatccaaaagttgctaactgattaaaatgaaatattgcatgctaacttacaagaaaaacaaaagatcatatttttatttttgagtcaactgaaatttgcctactttgctaattatctttattacttatttctcagatgtaagatgaatgagataaacatcttccaatacgatcttttggaaaataataattagttgaaagccttgtcacttggcttttcttaaccaaaaaatatcttagtttattatatcaaccttttcccaattttaagaatcactaacatttcgagaaatttgatattccttaaaatcatcagctttgtcatcttcatctcgttcttattctcatttatatttgtattcttttcaaacttatgctcaccttcgactccatctttaccaatatttctatcttggatattttctggaatatcagtctgattaccgatccagaagatgtcacgctaaaatgtgctctggacttgggtgtgtctaactaaggaagatatccttggttggcatttcacaaaatctggaaaatatacagttaaatctggatatcatacggcgcggttaaagactttggatgataactcttcttttattggcctagacatcaaagttttaaaagcatactcatgaaaagtacagtgtccgcccaagttatgtcactttttgtggcatattttagcgggatgtgtacgagtaacagacaatctacgaaaacgcggtataaattgtgagaaaggatgtagcagatgtggtgctctagaagaaaccattaaccacacgcttttcttatgccatcatgcgagtaagatttgggcactttcacagatacctacggtcccataaaaatttccttatgcatctatttatgcatatttagatcatttatttcggcacatacattcgaaattcgaataatcttcatttccatggataatttggtatatttggaaagtaaggaatgaaaaaatcgttgaacatatggataaagatcctctagagatcatacacatggtggaaaaagagtcagactcgtggaagtccgctcaacttgaactttacaatgaaactcatggttcattcaatttggaaaatcataattgattgcggcattttctattagaaaacaattattcaggatatcggtgttttgtgaatggatcttagaaagataacgacaagtttttcggcttaggatggtattgtacatcatcaaatggagagacaccaaccatgggagttgccaatttcagaagaagtctatctccattacatggagaggtggaagctctcctctgggcgatgaagtgtatgcttgttgtcgacaaccaagatgtaatatctttcaaactatatatctatcaaaccattgaaatgctatcattacctataattccaatcgaatcaagctcattatattctaactatatatctttcaaaccatttatattcactgtcctgtgatgacgcttatttgaaatgtagttaccaaaacaatcaaatccgtatctactatgtttggaagttacattcaagatatgctagtatctacttaacatattcaatcgacttcaatataatgatattgatcaagccgcatatccagtttcatatatttgcagagaatattcacagattgattcgaaaaagattacgcctactctataatctaaaatcctatacaatctcacaacactataaatatactctatattgcataccatttctacacattgcagtctatcaagaaatctttccattttaaaataagaaactttgcttacctttcaaatggctgcctcttttgctttcctgagagatgttcgaccatacaagaactcatggcgtgtccaagtgaaggtgcttcactcttggcgtcaatacactagcatgactggtgaaacactcgagttagagttggcagactcacaagtaagttaaatatacatttttgaggcatttgaatgctaccaaatatgcactatgttattttcatgtgctaattatatgttttctgtttatactagggtgtcaagattcatgcatcagttaagaaggacttggttagcaagtatgtgaacttgagattctggaggctaacaacaaacctaccacaaagcttgacttcgaattaagggacgacacgtaagtctatgtacctatgttttaaatcctcaagaatgtaatttggtaggcaatatctctgatatattgtttggtttagtgctgagcgaatgtcctgtactttatggggagcatttgctcagagtgtttttagtacatgtgaatctgctgatggtcaaatggttatttgtgttctgagatttgcaaagattaagtcttacaaaggtacatgtctactcttaactttcttgattctactcattgattataacatttattataataactaaaattaaatttataatgtatgtaggagttagaactttgtaaaactcttttgatgcatctcaagtccagatcaacccggatttccctgaagttcaagcttttgtttctcggtctgttttctttaaaatttgtttatttgataatggaatgttgttctgattccgtttatatgatgtgattgaatagcttaccagctgatggtctttctctcactttccgtgagagtgttccaaagtttcaaatggttactgtgaaacaggatgatgactgttcgtagtatcagaggaagtcaatccgtgatctgcttcattctatggaggtttgacttcttaatttacatgtactataaatttgagttatcatatacagatttatataaatttttcatttcagattggaaaggttagggttgtctgcaccatctatgctcttgacttggattggtcatggtattactttagttgtcgtaattgcaacaaaaaagtgactcacattcatgctggtgttaacataactttattgaagtcatcaaaacacaacttcattctgcaagaatgcagtcactaatgtgcaagccaagtaagtatacctcacagtttataacaagttctaactcaactagcaaatgcacacattaattgaccctgatataatttaaggtacatgctttatgtgaaagtcatggatggcagtggtgaaaccaaatgcctcctgtctcctgtttgataccatctgtgcagacatggttcgtgaatcatgtacatccatgttaggtggctcttttaatgaggtatacttacaatcgaaatagttatcttcttatgtttgtggaatctaatatgttgcaagagtatataaactggctaactgacaatttgtggtcttactatttagattgaggatccaaatgatatccctgacggttgaagaaatttggttgggaagacttttctatttctggtctctgttgagaaagaaaacatatgggatggtaaggattcttttaaggtcacaaggctattgtctaccgatggtctctgtggtgatgaggtcctcgaagactcagaccactctgtcaatccttcatccattggttctagggaccatgtatgattctacacatgttatccttaacaaatcaggtgtaaacgaaactttatcaatgaaacttttctaaactatgttttcgtgtttacagtgtcttatgttaacttcgagccaagagacttcagactgagttactccatcatcttagcgtgtttatgctacaaagttgacaaactcggaacaatcatccagttccaaaaagctttgtgttcagccgttggatttggagaaatctgaacctgagtttaatgatgaactcgctattaaggaggtaaagaatgcagagataactgagatggttgaaggtgctggaattacagataaagggaagggtgtgataagcaagttttttaggcctacttatgttaaacgtgtgtgaggttcagttcaattcccctacaaacactaacatgtcgatgcagctatagggggtgtcaatccagtccactgttattgctagcaatcaagacgtgtacagaagcaactaagtcaagccagattataatgatagtgggtttctagtaacaatcctaggtcaggattcaaacaagtaaaaatgagaacttaagagccctactcgatcattgggttgagtagaaccaacaggcagaactaaaatgcaatcaacacgggatacaaataacaggtagataaaagtgcaatcaacaggggatacaaataaatctaatagaagtcctaaggatggattcattgataagggcaactctaggattcatcagatggctaataggcgaaaggtagataccattgacgatagattcaaaaaccgggtcaatccactatcgtgacagagacccccataactctaccacttcctaatctcaactgtcgttgatgaaacatagcagagtagagtttaagaaacaatctaccaaagccaataagcagacaagccaatgtcttggtcgagtatacatatctttggaattcgtagatcagacatccatttgaatgtcttttggacgttggacgtctatgatcgaatctccacattagccagcgaaaactgcataggggccaagcgaatccagaagggttctaacctaatctctaaccacctaactaacctagagattaccctaatctaatccatcctcaagaaccctaatcactactcaagcaacattctcaagaacacaaacccagaaattactaaaatcataccaaaatgtagatctaaacaagctaaacaactctactcaaagaaataaatgcagaaacgaaataaattaagagtaattaagattttaagattcataaacacaaagaaaaactaaaggataaaagatggatcctttggacaaacccctaagtgatctatttatagtaaaatgttgaaaccctagattcactagaagacaagagacttgagccggtttgggcgaatactcgatcttggggatcgagtaaagagggtgctgcaaagtctgcgcctttgtgtctatgctccaagtgatcaattggttgagtagatgcttcttcctctcctatatgtatgctcagatgtctggttgagtggggaatgaggaggatccgaagacgtttttatagctcaacatgttttgtagagttggtcacccttggtcgagtaaatggatcgagtaggaggggcgagtagatcaatctgctgcttcatctgaggctgccttgatcgagtaagagggtcgagtaaactgcagcctcctctgttgcatcctagatcgagtaaagaggtcgagtagaatgatacctcttctgtagctgcctagatcgagtgaagtccttttcagctccttctgcacctgaaaacacaccaaaacatgcaatgcgaatggaggatgatcctagatgcctaagtatgcaaaataagctaaaattgtgcaaaatgatatgctacaatgagcaaatgcacagctgaatgatgataaacatacacctaaaatgagtaaaatacagtgttatcagggtgtgaaatgacacgagacacctcaggtggtagtcaagaaggctccaaataaggtggttactaagcctatacatgttttcaagttgtcttgatccatgactcatgtttttgttggttttagaagttattgctttggttttggtttccaaacaattgtttaagtttattactttttgttctaagatggatttgtttctttatacgttgatattaatatgtttctgtttacttttcttggttttgattattatctaatttataaggttatgcctataatcaagctaatgttagtaaccattagctaatgaaggttatgcctataattaaactaatgtatataaaagttttaacttatgcatgattaatcaatcttatagtaaattaagtatgaatattcatggaaagaggatatttaccttatgctcatagtgaacttcaaatatttgaattcctgaaaacaaatgtaaatagttagtatacacgcagtaataatttgtatagtttttacaaaataatgattgtaatctgaagtcgaaagatatgtaatatatgcaatcattagcacaaagaaagtttctattttttgattggatcaaggatcggttattcataatctcgatattatcattttatttacagtgtttatattatatggaattaggaaatatacataactcaatcgttccgactttcctatcctttcactgtctatatatatgagatacctttggttaaaaaataaaactctctcctctctttagtttctctgtaaccagttttctaaaaaactaaacctaatgggtaccattgactatatccgtgattttaatctcgagaggaccaactgggtcctctacttgaagatcttaagcctctgaaaccatcaggctgtcaacaatggtgaaccgacaaccatgattctctgtgatgagaatgtgagttcataattcaactacttgtgaagttttcattttttttgtttctgaatcctgttcataatctaaagtatgtttgtttatgctgttcagggatgcataattgatgctagagtaccttctcgaaattatttgtataattttagatctaccctacgtgagggaacgtagtattacatggcagacttccttctgaagagagcaacttcaacaacaaagtattcatcatctatttatgagatcgagtttatttggccaaccacaatgtggcctgtaagtcctaggtcgactcagatttctctacaagtcatccattctgatgaggtcgaatatgaacttgacacttatgttaatggtaaactaagtttttcatagtaatgttcttatagttacagttattgcataaagaaaatttacagactctgacttaactattttgattgtaagatgctattggaattatatcgagtgtttctactgttgcgaggtttccctgcgtctatcgtgaaggggaaactgattatgaagccagatatgtgaagtttaccatcagagacaatctgtaagttacattacctgtgtaattttgagacatgtagatttgtaaggaacagaattgtttgatgattggtttctttagattgttgtttgttgtagtaataggatcaccacatgtgtagctaaagggatcctgtgagtcatttttgatcaagttttatcgacgggttggtttggtcacttataactttgagccaattgttgttgtggtccggttctggagagttcatgatttcaaaggttagttaaaatccatctataagtaggcgctttcatagattcattgttatcaaaccaaaatttcaagtatatatcaatactgattttgaagtctcttataggatccaatgctttattcagtgaggatggatgttctagggtattcattgatcttgcatttccagactatgatcttcagacttacatgtatgtgaaatcgagtagtttatatttactataaaaaaaagtaaacctatactttatccaagtaaattgagtttgattgttttcttacagtggttggaatgcctatgaagatgacgaacagcttgatgggaagattgactatgtaatttaaaactaaagcagtgttcttatttctgttcttgtcagaactaatggattgttgttctgctttgttttcctatgattcttttagttatgttgtggttccttggatatttcttaaacttaagtctctatttgaacttcttattttgttgatctactattaatatatgcttatttgattagttttatcatagtcactaacaggaattttaaccattttagaaaaactagattagtaacttgcaaaataaaataggacaatttataaaactcaaatcgatttaaaccaaatgttgtatacttatatcataaaaagatggatgtgatataacagagttattcatggtgaaagctgaatttaaaacacaagccaatgcaatggttcttgaaaacatataaagaatctgactgttttcaaaactgtaatcatttattttggatattcaaaaaatctcttaaaaatttaattacatgtaagacaaattggaaggcataagttatatgacatattaaagtgctcttcttatcccattcatcttccacacaagaacgaaaaattttagaaatataaacacttttctgaaatgtcatttcttaagaccttctcagatgtgcatcctagaacgacgagatggtttgtatttgttaaactactccgtttgtggaattggcctccaaattatgatggagaagaacatattatgattttggctgatgagaaggtatggaagttatgttaaaagctaggccagatttataattgtcgatttttgattatcactatacacattcatgcaagatttagttagatttgttaacatttctcagggaaacaagatcgatgcaatttctcctctccatgcaaagaaagaagtgttgattttaacatttaaagaagggcaatggtatctgctatcacactttgacgttatcgtggctaacccactgacagattctctaaccatgtgttccaacttgagtttttaagaaagactacaatggataaagtagctcctagaaaaagatgtcagtttattgattgctggcctttatactggatcaagcatgcttctactgttgagaagcaatttgttgttggtcagcacttgagtatttgttttcaactatgtttggactactatgtggcttacagatataaatactaatttgtatgattcttggtttttatatatttacatatgcaatgggaatcattgaaggtatgtttccaatcggcaaaattttgtgggttaaaagggagtgggaaggtgactatgaatctagctatctgactttcacaattaaagataccacgtaagtttatcctcaaatatcatacattgtagttaggtggatggaacttttggataatggattcaatgcactacatgttataggtcacagtacatgaaatgtgttgcaataggaaggtcttgtgatgagtttgataaaaaatggtacaagaaaataagcgagatcaattttaagatggagcctgtgatgattattctccgtttttggaaaatgtctgagtttcaaggttattttcatattccttccaactatgattgttctactaggatatccaatttatggatcagataatctaaattatgtttcatacacaggaaatccatgattgataagcgtgggtggttgttacattgatccaaatttcagaggattagacaaaaacacctatctgtaagctactgccttattacagaataaataaccttctgtatatcaaagttccatattaactttgtctatttttttgtctatttttatagtcgtaactttgctggatcagatgatgaagatgatgacattttcatggagactggggagtccaatttctaagttatcgatatgccattttaaattccaatgtactatgctttataaactatgtttattttcttctgttctatgttggaattccttggagtactttatattttgaatgcttatgtatacttttatctgaatgtaagtagtggaccaacttatagaaaacataacatgttttacaggaaatgctaacttaaactactagagtaaagaagaatcatattacctttatgcagtttgctatcttctccgacttcaaatgcctgacattatagtaagagaaaaaacttagtattattactgaattatttagataatatgaagaatccgtgaaggatataactataaccaaccatttattcatgtagctaatgaatcagaatacttaaatatcattatcaacttaacatagctgcaatcattagcaaattttaattccattttttgattggctacaaagtctgttatgacaaagatttaattgattaaaggatgtgaacggttattgaggaaggaaacctttcatatagattcacttaatcgttacaactttcctctccattcaaaatatatataagccaaagggtaggttaacttcagacaatctgtcctcacttttaaatctgtatcaaatccatacaccagcatttggccgacacaaactatatccctgacttatgtttgcatagtaacaatcatgtcctatacgtgaaaatcttaagcatctaggatcatcagtctatgatctttgaaactcctactaccataatcctctgtgatgtgaaggtttgttctttatgtaaatcttattggtttcctattttttgttcttggtttctattgtattccaaagaacttgatatttttgtatttttattcaggggaatagaatcgacgctagagtgccttggcgtgattatttatacaatttcaagcctaccttatttgaaggaaagtggtattacattcaggacttccgattgaagagagcaacttcaatacctaagtactcagattacgtttatgaaatcgagtttatgtggcacaccaaaatgtggcctgtaagtgatagatctgatgaaacttctctccaattcatctatgctgatgaagtcgaatctgaatctgaggattatgtaactggtaatctaagacttatctatatagtttatgctttctctctattttatttccttagtactaagatttataagttatttgattgctatactgttattattagatgctattggagtcatatcaagtgtctcaactgtgtcaagatttccatatgtctgtcgtgaaggggaaacagactttgaggtcagatatgtgacatttacaatcaaagataatctgtaagttctcaagtaatacgaatattgctatagtctgtaagttaggaacataatgcattttgtagtatgataatttggtttttggttggttgtagtgatatgatcataacatgtgttgctagagggagtgcgtgtcagtcctttctgagaaagtgttatcgacttattggtttgaaacttataactacgagccaatcactgcagttctccggttctgaagagcctccacttttaggggttagtgaaaattatggaataggttataaccgattcctttatgatgttaaacacgttgccctataactaatcatgtatattgtttacaaatgaaacagcctcgaaggcattaatcagtgagcatggatgttctagggtcttcattgaggaatcgtttccagactttgatgtgacagcatacatgtatgtgaaaggaaatatagataagttgtttttgttaattagatagtaattaacaatgtcaaaatgacatgttttgtttttttggttacagatgttggtttccagaaggagaagatggccagtttgatgggaagattgagtatgtggtagagaactaatcatggagtcagattagttcttccaatgatttgtagaatcaatctactttgctctaaaattcaaaattattattactatctctatttgctttatctcatgaactatggttggaatatttgtttgaatttcatacattgtcctattttgactttacgtgtttcagcttacagttctcctatttcattttgcaagttactaatttattgcactctagcaagttcataaaattatatactctaaatgaatataatagctatttaacaagatccatccgtggctccggattctcagttacatatttcataactaatacaaaacatatatattttagccttaattaaaattattttgattgtggattgattaagtaaagagtaactgaatcaggaaacaatatatatgaccaaacgtaatatgagaacaaaaaatgaattacattggtcctatatccactctaacaaaataattcaatctttgttgacgactattttcaagggattaccttggccatgctaaatgtctctccttgcaattttatcttcatttttgacatagccgagtgaagcacaaactaactggatcatgagtaaaaaacatacatcaaacaatgaaaatattgattcttcatccaatccgccaaaaagaagcagattcgatcacttatattttcaaagcattaggatgtcatagtggaattcaccttcgtctcatggttctgtccccattagttctgttttgaacacagtgcagcgtgatgtaagcaacacctctcagttacacatttcacccaatgttagaggtgaggtgtccacccctaatctatctgcgagacaaagacaaatgtcaaaaggtataaaacttttagatgtacctcataaagaccaatttttattagtatatttcaactcattgtattaaacactacatctcatttaaacaggaatgccacttggatctcagattccgtctgcatctcaatgtcacgcataaatatggcaggttctactccatttgtacttagagatatcaccaattcatcagttgggccacatggcagaatgggtggcacactgcttacgtgtccagagactgaaaaaagatagagaaaaggttagtaactattattcaaactgtgaatattttaatacatgttatttatgctatacagttttcgcttataggcaaacaaagtatcaatgattcggagtgcttgacccaagagcaatcttcatgtgtcaacaccattagacttaacatgccaaggaaaaatctgcacatagactttgctatagcaagttctgaatctaatgctgaaggtgaatgattatctataagtattcatatataaactaaaacctagccaactctgtgttttgactaatcatctacttaacattctcctgtgaaactatcaagcacaactgcatatcacaataacagtgatgaagaaatgtatgatgagatgaacggtatcaatctcaatgaggaagaggaactagaacaaaactatgacataagttgcagtgaagatgatggttcaccaatcagaatacagagaatggatttggatgaggcacaagacatgggaacttgcccatctatcttatctaatgaagctattgccacagaacaagcatcacaagattccataggtcaaaagagcaaagaattagaatcagtaaagataaagaaaacatgtcggaggactacaaagagtatacctttaagtatggaatccgactattgcttttaattcacatgccttttatataaacttattaagaaggctattgattatggttatttgtttctcagtttatcttgatcatggtgatcttacctatcagtgtaaatattgtggtgcattgatgtggtatgatgagcgaatcaacaaaaggcgcaatctaaaagaccatatatttacactttgctgcggacaagggttagttaaattaccttttcttgaagagtcaccagagttagtaaagaaacttcttactgctgatgatgcacaaggtcggaattatagaaaacatgctaggatatataacatggtttttgctatgacctctattgacggaaaagttgataaatctatgccaaaaggtcaaggacctagcatgtttcgattgcaaggaggtaactatcatttgataggcagtttgaaaccttcggaaggtgattatgcaaagtggataacagagctactgtaatcgggttagcattctcaacaccataatgttgtttgtataagcaatgacctaacaagtttggttcttttttgttaacatattttatggtctttctgtatttgtagaaagggaaatgatgcaactaaaggaggttgtaaggataatctgaacaaagaaacaattgctgccataatggatatgttaaacaaagttaatccatatgtgaagaatttcagaattgccagagacagattcgaagttgctgactgccaacctttccataagagaatagcaagtggtcgtaaggagaaagatcaaaggacttacattaggcctactacatcagaggtagcagcattaatcccaggggatttcgaaaatggtatgcctgaccgtgatatttttattcaagaaaagactacatgtcaccttactagaattagtccaatttatatttcctatctagctttgcaatatcctctaatattctgctatggtgaagatggttttacccctgggatagagaaatgttacaaaggaaatgacaaaaagaagaagaaaaaatgcatcagtatgcgtcagtggtttgcattcggcattcaagagaagccacgagagtgcataccatgctactctccaagagactatttcagcagttttttttctaacgcttacaccaccattgaatctaaccggctagcttacataaagttcaatcaatcaaagatatgatgtgacaacttaaactccataaaagaagctgcggattctggtgtgacaaatttagaagacgaagggaatcagcttttgattcctaaatcattcactagtggaccacgctatatggttcaaagttattatgatgctatggctatatgcaaacactatgggtttcctgatttatttatcacatttacatgtaaccctaagtggcctgagataacaagatatgttaaggaaagaggattgactgctgaagataggcctgatattgttgttaggattttcaagatcaaattagattctctcatgcatgatctaactgagaagaaaatgcttgggaagactgtcgcatgtaagttaatttaattatgtgtcattctgtacttaaactgttgatggcatttacttataataaatattgttttcttatcgcagcaatgtatgtaagttaatttaattctgtgtcattctgtacttaaactgttgatggcatttacttataataaatattgttttcttatcgcagcaatgtatacagttgaattccagaaaaaggccttctacatgcacacatccttttgtttatggactctaaaagtaaactgccaacagctgacgatattgacaagatgatttttgcggagattccggataaagaaaaggaacctgggctctatgaggttattaagaactgcatgattcatgggccatgtggtacagctaataagaattctccatgtatggtcgatgcaagtgtttgaaaaattatccaaaaaagtttgaggagataaccaaggttggtaaggatgggtttcctgtttataaaagaaggcaatgtgataactttgttgagaaaagtggttttagatgtgataataggtatgtggttccttacaataagatattgtcagttcgatatggtgctcatatcaatgtggagtggtgtaatcagaatagttctattaagtacttattcaaatatataaataagggtccagatcgatttgcatttgtggttgagcctgataagccacaaacaatagagactaatgagaatgtcaatggcatagcagctggtgaagaaaccttaccaactgagaaaaagaaggacgaaatcaaagattatttcgactgcaggtgcttttctatatagtctttcccagctttgcatttatagaaattgtcccgatatcgaatttatagtttctttcttttctatattagaatttcagatatgtatcagcctttgaagcagtttggaggatatttaagttcctaatccagcatagatcaactcttgtgcagcagctatcatttcatgtagaagagaagcaatcaacttattttaaagggaaagagtctataaaagaagttttggaacgtattgccaaccaagattcccaattcatggcttggttgacattaaacaggaatgatgctattggtaaaaatggaaaacgtggtcgtgatatcttatatgcagatattccagcgtattttacttgggatggaacaaataaaatgtggaacaaaagatcaagaggattttcattgggacgtataaattatgttccaaagaaattagaagatgaatattttctaatagttctgcttaacattgtcaaaggtccacatgttttgctgatatcaagacctacaatggtgttgtctatccatcttacaaaacagcctgttttgctagtggtattcttgatgatgaccaagtatacattgacagtttggtggatgcaagtcaattctgctttggtgatttcttaaggaatttctttgcaatgttgcttctatctgattcattatctagaccagaatatgtttggaaacagacatgggagttattatcacaggatatgctgaaagaaaagagagatgactataacaatcagggtatgatcgtgtctaaactttattcatatcattccatatatatgtaaggttacatatgaattcacacatcatttattggtattcttctgttcagagttggaactaacagaagctgaaatcaagaactacactcttcaagaagttgagaagattatgctgtttaacggaggtacaattacagagattgagaaatttccacagccaacaagagaaggtattgataactccaaccggttgatagtagacgagatgagatatgaccgtcaatatttgactggcaagcatgctgagtggatagatatgcttacacttgagcagagaggtgtgtatgatgagattaaaggggctgtttttaaggatccagcactgttaatagttaatgaagatccaaaattctttcaaaaacgagccattttatcacctaccaatgatgatgtgaacacaatcaatcagtatatggttcagaagatggaaggtcagttatatgtgagcctagagttttaaactttctttaaagacaattatattttaatttgttgatttaaacttgcaggtgaagaaagaatattcctcagtgctaacagcatagatccttcagattctgactcatagaaaaatccaattatcacgcctgattacttaaacagtataaagttatccggtttgccacaccatgaattacggttgaagattgatccacatttgtcattgtttcatccacatttcatctcattaggagtcgttttagtgtgttttacatatttaggacgattttgcattaggattgcatgtgcatgacatatttggttgttttcatgtactttggatgcttttggagttcaaacagaggaaaaacagaacatgaagtcagaatgcccaatgacgcccatcaaaagtactctatcgcaaccccggagaagctagcagctcagtttcactcaatcgcgaagccggaggaattaccccatcagaaccactcgatcaccactcgatcacaaggaagcctatctgctcgttctgcactcaaccagacaaactgagaacaaagaagataagagaagccgaaggaaccactcgatcaccacctcatgacatccactcgatcgcactcgatcacagggtcgctggaccattcaatctcgacttcactgcatctcactcgatcgtaagacggagcccctgaagcccagtttaatcagtgacatactcgatcacaggaaagctcatttcagcccatcagatgccaatgacacattcggtcgcagggttatgacgtgaagattcgctatatatctagtttccttatttgttttatttctcgcttatataaactgcctcttagggttttccctagggcatccgtttttatctcgcttttacatttttgcaactttcatagccgcagtgtttctcctgcatctttgtattttcactttcaagtatttgattttcagtttttgtctaagtctttcatcatatctgtcatcatgttttcaatcgttgctttgttattgtctttgattatgtctgagtagtgaactgtatttctgaggatgggatagattagttgtggtttacttggtcgttttaggtggttgagtttagaatactagaatcccttctggattagttgcgcttattgcgtgtttcactagctaatgtggaatatgagtctagacgtccagtgctcagaaggcgtttaatgtgcgttggatcctattaattccagagatatctgactctaccccaagggattggctgtagagagggtattggctttaacatgttgattcgataatgcctgcttagttagagatcgctaaagggatttaggtcaatgtctagctttgcttgaggatttctatcacgggagtgaattaatctgttgttgaacttgttgtctagggatagcttatgtgaagttttgtcaaccgcttgaatagattaaggagaccacactattggattaccccatccttaggaatcgtttatccatttgattgcatgttatcatttctgctttgttattcacctgcctgctattgccatttctgcttttaatttcatttcatttctgttattgcatactaggactattaaaaccaaccaactctctgcttggattgacttagagctttctgatcatatctcatctgtttgcatcataccggattggattgacatcctaaaatactacaacgacaggatagtgttttaggattaattgactaaaatcctactaccaatttggggctgttgccagtttggtgtttgtttgctatatttgagatcattagaaacgttaagatcaagttcatttttgttgtacaagttactttggtttcaggtaccttgcaacccgctttccagacgcatctctaattcgtctgttatagcccgtctgctatctgttgcatgcatacacggtcacaaggaaatcagaacctcctattaaacgataacatcgaccgtaaaatcaatggagttagtgaagatggtttcaagcttcgcttgtttccattctcacttggagataaagcccacctgtgggaaaagacgctaccccagggatcaatcacgacctgggatgattgcaaaaaggccttcttggcaaaattcttctccaactccaggactgcaagactctggaatgagatatccggattcactcagaagcaaaatgaaagattatatgaagcttgggagcgctttaagggttatcaaaccaaatgccctcatcacggatttaagcaagcttctcttctcagcacactctatagaggcgtcttgcctaagataaggatgctgcttgacaccgcttcaaatgggaattttttgaagaaggatgttgaagaaggatgggagctagttgaaaacgtttctcagtcggatggcaattacaatgaagactatgacagaagtatccacaccagttctgacactgatgacaagcaccacagagagatgaaagctctcaatgacaaactagacaaaatcctccaagtgtagaagaaacatgttcactttatctctgaagatgaaccgttccaagtacaagagggggagaatgatgagtgtgctgaaatcagctatgttcagaatcaaggtggctaaaacatggagtacaacaattacagaccctatccaaatctgtcatacagaagcaccaatgtcgccaactctcaggaccaagtctatcctcagcagcagcagcagcagaaccaacccaaactgtttgtttcttacaaccaaagccaaggcttcattccaaagcagcagtttcaaggaggatatcaacaacaacagcaacaacctggtttcgcaccacatcaacaacaagcacctgcgcctcagaattcagacataatgactatgctccagcagctcattcaaggacaagccacaggagcaatggaaatcgctaagaagatgtctgtagtaaacaaccaagtcgaccgacaaggcgtcgaacttaacagcaagttcgaatcaatgagcactaggataagatatgtggaaggcatcctcgcttcaccatctgttaacaacaacctatgccagcttccagggaaagcaatccagtatctaaaggagtatgccactgaggacagtgtaattccagggagagctgccaactcgatatgtccttacatcaaacactgaggacagtgtaattctagagggggaggatttttatcaagatgatgttttggctgacaacacaatcgaagagctcaaactcaccagtcaacccactcgaccacaagctcccccagctactcgctttgttgaaaaatcggaagctgcaaagaccaaagacacagtcttcgtgtcaccgccttacaaacctccccttccattccctggtcgttttaagaaagttctagttgcaaaatacagagccctcctggaaaaacacataaaggatatgtctttagtggactgtctcgcgctaatacatgacgagcacaagtacatgaaagtagtgttcatacaaggagtgttcatgtatgataggcgcctaaagaataatgatgaagtcacagctcttatacaagaggccagaaaacttaatgattctgaaactgtggaggaaaaaaatcaacagatgtcgtctggaaatcgttaactggtcaaggactaagcagcaaaatagtcaaaaacttattgaggaaagtcgacaaaagcttgaagaggcaatgtctatccaagagcacaatcaagagctgatatctaccatcaatactaatctacttttggcttacaaggtagaagaagaattttggaaacaaagaagcagacaattatggcttgcattaggggataaaaattcgggttactttcatgccatcactagaggtagaactgttataaacaaattctcagtgatagaaattcaggatggagtacccgtttatgaagaggcagggatcctcaaggtcatttccgagtatttcaagactttgtttactgcaaatgaaggagctcgagctgcaactattaaagagtccattaaaccatgcatatcacctgaacagaatcaatttctgattaatacgccgacagagaaagaaatatagaatgcttttttcactattcaggccgataaagctcctggtccggatggattctcggcgagcttctttcaaacaaactggatgactgtgggtcccaacattgtaatggaaatacaatccttcttctcttcagctacccttcaaccatcaatcaacaaaacacacatcagactgattccaaaaatcaaaaaccctcaaaggatggttgactacagacttacagctttgtgcaaagtcttttataaaatcatttccaagctgctatccaggcgtatgcaaccaatcctacaagagataatttcggagaatcagtcagctttcgtgccaaaaagagcgattaatgacaatgtccttatcacacatgaagctcttcattacctccaaacctcaggtgctgagaaacgatgcttcatggatgtcaaaactgacattagcaaagcctatgacagaattgagtgggactttatcaaactggttatgcaagagatgggttttcatcaaacctggataagctggaatctacaatgcatcagtacagtctcttattctttcctcctcaacagttcggcccaaggtgcagtgactcccgagacatggctcagacaggggaatccactctcaccgtatatgttcatcatttgcagcgaagtcctctctgggttgtgcaggaaagcccaacagaacgacgctctatccggattacgtgtatcaaaaggcagcccccgagtcaatcatctcctttttgctgatgacacaatgtttttctgtcgttcagaccccaaaagctgcaagactttgttacgaattctcaagaaatatgaagaagcgtctagtcaaatgatcaatatatcaaagtcagcaatcactttctcaaggaaaacacccgaccatgttaaaacagaagctcaacaaatccttcagatacaactaactggaggtctaggaaagtatttgggcttacctgagatgtttggtagaaagaagagggatctcttcaatcagattattgacaaaataaggcaacgttccttgagctggtcttctcggtttttgtccactgcgggcaagactactatgcttaagtctgtactagcctcgatgcctacctacaccatgttctgcttcaaactccatgtctctctatgcaaaagtatccagtcagccctcactcgcttccggtgggattcatctacagacaaaaagaagatgtgttggatagcttggtcaaaaatggcaaagacaaagaaagagggtggacttgggttcaacgacatcaccaactttaatgatgcctgattggcaaaggtgagttggcgtcttctacaatcaccatctttgtccgttggctagaattcttctgggaaagtactacagaacttcgtccttcttagagtgtgttgtctctgcttcctcttcccatggttagagaggcatatgtacaggcatagatctcatcaaatctcagctgggcaaagtcattggatcgggctcatataccctgatttggagtgatccttggttatcactctcttcacccacagttccaatgggccctgcacctgaacatttcaaatccatgacagtagattagcttatgtatcaaaccacaaaaacttgggatagagagaaagtaaggatgttacttcccatttctgaaaaggagatctttcttctcagacctagtaaatttggagctcgagatcgttatgtctggctacccaataagtctggtgtttactcaaccaagactggataccacgcagctgcgacgttatctcaactaggctctcaactgctagaccctccattggattttaactggaataaggagatttggaccaaactttgccccccaaaaatgaaatttctcctctggtaagctatgaagaatgctcttcctgttggcgaaaacctgaggatgcatggtattaacccgctttcactctgtccccactgtggtgaagctgaatcaagcctccatccgtttttcttctgtccattcgctactcaggtttgggagaacgcacctttcaggaccccaataacggtttcttgaatcacaagcttgaagatgggactggaagtatctaagcttctcgttactctcccaccaatcggaattggacaaggtcatctctccatttggattatgtggaacttatggaattgcaggaacaagctgatttttgagcaaaaatatatctcgaatctggatctcatctcacaatctatttctcaaaccaaagaatggttaggagctcagatccaagcgtcgacctttcagatcgtcgacctttcagatagtgaaatcaaattacctcccacatcgattgactcaaacatgaatcagtgcttcacagatgcatcgtggcgtgaagagtccttagaggctaggttcggatggatctttgttgaccacctaaatcatgcggaatcgcaccatcaatctgtagcaacgaatatcggttctccccttttggcagaagcaacagctatcaatctcgccatccaaaccgcagcagatcttggttttaaaaaactttttatagcttcatactcgtagatgctagtcaaagcactgaatggtgagcctcatccattggagatccataggattgtcttcgacatatcagttctctccctaaactttgatgaaatttatttttcctttgttaagagagaaaacaattctatagacgatgcattagctaaggctgctctgctttcatttcaatctgtaccggttcacatttaatgaaaaccaaccactttgacaaaaaaaaaaaaaaaaaaagaattattgaaattgtgagatatcttgcaaagcataatttggcattttgtggaacaaatgagaaattatatcaaaatagtaatgacaattttttaggattagtagagatgttagcaaaatttgatcccgtgatgaaagagcatgtttttcgagttacaagtggaactattcataatcacgaccttagtaataatattcaaaacaaattgattcttttgattgcttcaaaaataaaataaaaatttcttatgagggtgaaagaagcgaaatatttttctataattttggattgcactcccgatgctaatcatcaagagcaaatgtcaataattctaaggtgtgtacatttttcttcaaattcttttaaagtagaagagtactttgttaaatttttgaaagtagatgacactacgggctacagacttttcgaagtgttaaaagaagtattacaatccttagatctagatatagataatgtgagaggtcaaggttatgataatggatttaacatgaaaagatgcaaacaaggtgtacaaaaaaggctcttggatataaatccaaaagcattttatacaccatgtgcttgtcatagtcttaatttagttttatgtgatattggaaatagttctataaaggtaaaagattttttggagttgtgcaacgcttatattctttgtttgctaattcaataaagaggtgagatattttgagaaagaatttgaaaaatttatgcttaaacaattatcaatgacacgatgggaaagtcgtgttgaaagtattaaagcaataagacataagagaggctttgcttgaagtgaccgaaagtgataatgatccaatgattcaaaatgaagcgaaatctttatcaatgaatgagcttaaaagttttgaattttttattatcgactattatttggtttgatatattgcatattgtgaacattgttagtaagaagttacaataacaaaatatacatattgatgtggcaatgaaagagattagtggattaatttcttattttaaaatatttagagaaaatggatttgttgatgctatggaaaaaaactaaggaaattgctattgaaattgatattgaacctatatttattcagaacagagttatacgtaggaaaagacaatttgatgtatttattagtaataaaacaatattatccgctgaagaaacgtttaggattaactatttcttacatatctagatcatgctattagttcatttgataaaaggtttgagcaatatcaagcatatgaacatatgtttggttttttgtttgattctaatagattgaaattaaatgtgtgaagatgtagatttaaagtctcattgtagtgttttagaaaaaagtttgagaagtggttatatactagacatcgatggagatgatttatttcttgaactaaaatttcttaaggagcttttgccaaatgaaaatatggaagcaagtgatgtattaaattaaattgtacaatttgatagttttccatatactatgattgcatatagaattttactaacggttccaattaccgttgcttttgcagaaaggagtttttctaaactcaagctattaaagtcatatctaaggacatctatgtcacaagggagattgaatggattagctttgatggcaatcgagaatgggtttttggaagaactagatgtagaaagtttagctgatgattttgcttctgatcattcaaatagaacgacattattcacttagccgtatattactttctttcatccgactattttgtaaaaagtatgatttattttgttaccgcaacgagttgcgttgacgcgcaagccgggtttgaaaaaaacattgtatatttattaaggtacaaaagcgcactttgtaaattgtttcagttgaaaaatgccatttctccatttttgtggtcaatgtgttcaatgcttgcttgcttttaattaggtaacgaattaagatttgccattgactggtaactctacaaacaacaactataacttaatacaaactaaggcttaactttaccgtatataggcaaaattataatcgcaacttaagccacacaatttccaatctttattgtctttcatcctcttttttaaaagtcccaaaaactctctgttcactcttaatgaatccatatactaactttgtcggcttcatttgtcggcttcatggatattttagccagtcaacaagaaacccccatcattcatgagagtatttcaccaagtcttggaattagtgaatctgacgtccgtatcttcagcatacaaagaacatggaccaagtggtcagtgaaagacagtgttgtgctaatctttgtgtggctaaacacaagcaatgatgccattgttggtaataagcaacgaccaaatgccttatgaagcattgcagcttattttgcatatagtccctcacttggtagtctgaaaaagagagaaacactataaacaaaagtgggaaaagatcaacaagagtgtatgcaagtttgtgggatcccatgagtttgcaacaactcatatgtggaataaatgataatgatctgatgaagtagcccatcaaatttacgagaatgattacaatgagaagttcaccatggagcatgcttaaagatagttaaggcatgattggaagtggtgtgcatcacagtcaactaaagagactggaatgtataagaagaatggctgacgatggtcctgcacattcttcaagctctactccagtaagccatggagaggctgaagcttcccaagcttgtccacctggtgtgaaggctgccaagggtaaaagcaaaaggaatgctaacaattcaccaaatgtggaagaagaagggaaggctctggaaaggtttcaaagataagctgagcgacaagaaattgcttgacagtcttctagcaaaacaagagactcttagtgaaatagaaacatgattgaagaccaagctaattagaaacatgttatcaagctagtttgtttttgagtttttttattccttgtattttcaatttattgtagacggcaagtttctaatctttccaaagtaagttactttgtatttttgttttgattattcgatagcgatgatgagtttatgattctagcaatttatccaatgttatgtaccagttgtttggtgtctttctgtttccgtgtaatgagtttgactagaatagttcaagtcatattttggttttatatacagatgtgtttgtatctttatgtaagttaatgaaatatatgaaggacatgttcatgtgaaaagaatcaggcaagttgaagtagaggaaaagaaaaagaaaaaaaggatggcaagtcttttcttggatcactatcttatacttagaccagagcacaaattcttgcttttattgtacaccatatatctttgatgctttgtgtaggttgattaaaagcaatcagacaaagacaagagtacatggagacatggttaaagttcacaagttgaggaacaatgactagagtacatggataccacatatttttatgctttgcttatacaccacacacattggtaagcctgtaaagaatccggatatccggttttttggagtatatggatcagtaatttaatatcaggatccgccaataccggatatctggatttcggttattcgtggaaaaaccgaatattcgcggatatttgaatctgaatccatattataagttaaaagtcttatagtttttctgaaaagttagataaaagtagcaaaatgttgaccaaacatcacaagtatcacaaaaacatcaaagaactaacaaaaagtttgataaaaatagcaaaagatcaagtgatgcatgcatcttcgtatctccatgtcctttattcttcttcatattctccttataatctcgagaagaaagacatttgaaatatgaatttcaaatgaaatgaaatagaaagaaactaagaaatatgatcagactttcaaaactaatacgatgagactaatggtttgatatgcttacaagatgagaaatatgttaatttctatgagaaatacttgtttaaggactgaatatttagagtcttcacctctgtataagataaaaaccagtcaaaatcattaattcattagtactttaaaagttctttatatactagatcatgacttgcacgtacgtgcgagatttcctattttacgaaatttgttggataaaataaattaaaaagatttttgtataatgttgtaattaacaaataattatctgttttctggtgtattagataattgtatacatttcctaaaattaaaaaattaagggaaaattataattaatagactttggtatacaaatttgttttttgtttgattcattataaattttgaatagaaagaaaatgttatatacattatttttggtaaacgataaataatttagacagttgaagaatattggtgtataataatcattataatattatttatgattgtttatagaatatgtgataaaatactatataaaaaatatttggtaagtcactaaaaagctaaacccaataaataatttaggagcgcattagagaatcatatgaaaattctatattgggctgaaccccacaacattgtcttcatccattcacatattgaatgattttttttatttatttaatgaaaagataaatgcttttttcttccgtacatataattttagaagagatcttgtcttttctccgtctctaaacatacacccaaaaaaaactcaaatggttgttcgtaatcattcataaaattttctaatagtcaacatactatgtctctatttatcatctgttcatcactaaaccagaattctacaaagagataaggttattattgattcagatttagactttagtttttccaaatgtttcgattgaaattccaatctttgaaattgtttctttgaccttagctcttatatgggtaaatattgctaattctattattaaattatgtatcatcaacaaatcccaaatcgtgagaggtcatttttagattggttagtttaaaccaatcgcttgtcagaaatgtacaatgaaccgagttaatatatgtattgaaattggagagcgtatagatttaaacggttaattttgttacatgagaagcgttataattaagtttgtttccatatatatatttcattgtatttttaactatcaatctgaagttgatttcgagaagtttgaaatcgttaccttgaattctataaagatgaacaatcaatctcgtgtgtacagagttttgtttgaaacccctaaatttagtatattttgttacatgagaagagttaattatgtattggtgattgtgctgatttgtaggaggtaaattgacgtatcatatcactaagaagagacctagtggacctatttgtctagttattttcaagagtaagtaatattctgagtcataccctctctgatttgatttggtacaatctaaagctgtctactttgtttgattttggattgacccatgttaattgtagtgaggttattgtattgattgatgcaaatgtcttagtttatgttgatttgtttgtagtgagatcataattttacacttttgtttgttatatatgcaaatttaacaactgttatttttttttatcacatggacaatgtgtgcattgttttgcccttgaatattaaaatgaaattaataaaaaaagagattatatctactaaacttaataaggtggtcattattaactcaataagttgataagaatatatacctacctttatgcttttggaatttgatgaataaacaaacaaaattttattttctcaatgtatcttcaaatgattatactagagtaaattgtttgattccatataatataatttatcttattgtttgataaatagtaataacttatactgcttgtatatatgatatagctaacttcatattattcaatctgaaattagtaaaacagaacttttggaaaacaaagttacattattatggaaataatgtatgaggtcataacaaattttccactcttgtctttctcattagctacagaagcaagatgaacattagaattccactttaccctgttaaagagacaaatacactcgtgttaatgcttcaatgtcattaatgaaaactcaaccatttcacgtagttaactgttgaaaaacaaattattgtgattttgaatgtagtaaaagaaaaaaaaatattaatgatcacagtagatatcgtcagaaacaataggagcacgaacatatgtttcgttgcccgatacttgccaattgttttggcaagtgtaaaattctcgataaaacgccactttccagatttgatgaacctctgaaacttattcacttgttccttcttaattgtagcatggatcaaagtaccctataaattatagaaatacaatatgatattaagtgtaatgcacaaatatttttttgaatataaaatatatgaatatcaagacttactgttatcaacaagtatcatttccatagtttttcctgtgtactttgtgtattgaacccatgagtgcacactcttaacttggattttctattctattttgaaaggcttgatttcggaaaggctagagatgggtaactgtgcagtcattttatgatgaggaaggggaagagtaatgttgttcgatttttgaaggtgagtgtatgattcttggaattatttgtagtaaataaattttgtggagcaattaggtggtattgcgaatattttcagttcattaggatattagtgaataatctttgataaggtatatattctttttgcaaaaggatcaaaataattaattgtattagtgtgggtaagtcatcatattgttgaatgataattagtttaggagaaaattgctattaataaattgaatagaatattctcatcctattattcctatgaatgtttaatgtatatgattcagttattataagtttggtatgaagatattcggatatcttaatagttttgacatttctttgttatctatactatttaagaaaattctagatagtgcaattgcacttaattccgaaattaaggtgattttcaagaattatgggatagtgatattttggaagttacaattttatttttgtttgccttatagaatatatgtgtcactatgatttcgaatataaattcttgttatttatttgtgttcacgcacgcaaactatgggatgatgatatttttgaagttacaattttattgttgattgccttatatcatatatattaaatatgatattttgaatctaaatacttgctatttctttccgtgcaaattaatggtcatgttagtgggccatatagtcacgaggcccatatagtccaatgcataaaatcgtttaaatatttgacccgataatagaaccgacaatcgaataagaatccttgtctttttattatgttaaatgaccagattacccatggacgaatacttaatttagtcatagacattataaaaaactatccttcaaagattgtaagtttcccaatgattcccaatcaataatatagatacaagtagaagataaaaaaaaaatgattacgtgattcaatattctcacgttcagcaagcatttcttctactctttaatcttcttcatcatcacgataccaatcttgaatgcatataagagcctgcacggttcttggtgtcaatgaactataaaaacaatcaagaactgtacttcccgcactaaatgcagatgcaactgttatgattcatatagtcaataaatctcttgcaatcaatgtcaataccttatatgtagaacatgttatcttccaccaatgttaaattttaaaatctggattcgtatgatcctcccgaacatcatctaaataagactgactgtagctcagattttataaccacagctacttcactttcctaagcatcatcatacattgcatccatcaaatcttgtttcttcccattgtccttaaaaggttctcctttttcatgcgaagataccacaggatcttgtgatagtagatactcataatgtgcaaataatctgtccaaagttgatgtgatcttttctatcaaacaattagcctcaaattcaggatacacaccttccatcatccactttacccatctcattttatattgtagatccataactgctttaacatagatcaacatatttgtattatcaaagtttccccaatacttataaaacattagcttcattttttagtcatagtttttgtgtgctcatcctccattcaccccatctttactatcgtccaacccactttgaatatctctttcatatatatattttcagtaacatatttagatacaaagatattaactattttatcataaacatactgcaagatattggatagtacattaacataagacaaaattgtcttgacttggtacatcatcacaaattctggtaagttcggaaacatactttttatcttcaagcttaagcatatcaaacccttttttcagagccacaacaacttttaccatcaaaaatgttgaattccatcttgtttcaacatctaaacaaagaacagcctttgattgaaccttttgaatctctaaacactccttaaaccttttcagccaatccggtgaagaacaaacatacctaacagctaatctaatccttaagattgctatgtttgtctcgtgaagaccatctctcacaatcaactcaaataatgtgctccacaccgcatatggagaaaataaccattcaaaacacttgttccccgtgaaggcacctttttcaagtattttaatgcaagatgattagaacttacattacctactttaatagtgagaactttactgacttcccaaaaaaaccaagcacttctcaagcattctaccaattgtttcaccaacatgattatcacttatgcagaaattgatgattctcttatgtcgcttccaatcctcatctatataatgagctgttagacacatgtagctcatattcaatatgattgtccaacaatatgtagttaaacaaatactgcctttatagattctaaaaaagtttttaagtttactcctaggcatgaccaaaatataactgtaatcgtatttcggaccgtaaccagaccgtttctaaatcgtaatcgaacctaaccgtataaaacggttaataacgtaaccgctaaccgtaaaaatacattatttacagttaaaaaatatattaaccttaaccgtatcaaaatcgttggttaaccgcatggtaaaccatataaatatgaaacgttttttatttcttattttgtttaatatatgaaagaatttgattgttatattataatgagtgtgaatgattataagtgaatgaataatgacacagtacaagtaaaaaactaacgatggagtagcattagcctttcaaaaatactttgaccaaaatcgttttaaatttattgttagattaaataaatttaaaatttgtgtagatatttgaaaaaaaactaataaaatagaacaggaaaagctttaaacataagataatttactctagatagagtatatagataacctaaattaatagctaatatcaaaaataaagaacagttttgatgttatattataaactgaattactcatgataacaaaatcaaagtgaattgtagatgggcaaataccacggattatgacaaagcagtagattgtgagtggttatgattaactatctaagagtgtaaacataattttcttaggcttatcatattaaaaataaatataaaatgttcatgttaatctatttgcataaaaagctgacccatgtttaaagacttgagcaaattttggaaactaataatgttgccgtttatgaccaagtcaccaacctttgtttaacttaaaaattttcaaagattattttcataaatatattaaccaacttttctaaaaatttctaaaacaaagattattcttcttgcttcatccaatcgtaaaagagatttttttaatcatatttttgagctttatttattttgtttaaaaatatcttccaattcatgtcgatctaacatcggcacagccatagaagatgttcataactcaataccacccatcaatattcaagaaaatgaaactaaagaatatgctaacacaagttcaggaaagcaacgtccgaatacttccgatatttccaaggtacacgttcgtaaagaaaaaattgatggaaaaatgaaagcatgttataattactgcaataaaagttttatttggaaatcgggttcaggatatgaatcatatagatatcatttggttaacaatcatcctgaaaaattaggcggagaaactcaaaaggctacatctcctagcaaaatgtgttgatgttgaccacctttcatttagctttggtgagaaactgggttttaataaattattgtcaaaaaacattaaattctcaagctaagagagttcctcgaattactcttactcgtacattaaaatcactttatcgaaatccaaaaaaagatttagaatgtttgttttccggtttacctaataatgtttcatatttggaatgatcagtggcaaattcatcataatatgggtattaattctcattagtttgatagtgatttgattattcaaaagagaattaatgtattttcgagtttttgatgaaagacatacatctcataatgttttgagattaactgaaaattatccaaattgacacaaatatgactattaataactagatcaacaccataatcttgggattaactagattaacacaaattttgtgtataatgaccaaaaaccctttgcctgtttttgtttgaaatttttatcctttaaaatcatcaaaattttattactaaatacaaattttaaacacaaaaaacccttaaaaaacactattagggtgtatcggtttctgagtttactatgtctactcatatttcccccattcacaaaatcgtaaaaaacatcgacgatgccaaagaagaacccaaactttgactcgccagcaaaggagacgcagaatttacttctccttcatctacacattttgtctacgtcgccggagcttcatctgcccaatttgtcgccatcgctgccgcttcatctgcacaatccatcgccgtcgtttcatttgcacaatctgtagccacaaacgcgcgatttctggcgccgcagatataggggaatagccgtactctcaattcatctgcacaattcgtcgccgtagttttatccacacaattcgtcgccgtcgtttcatttgtacaatatgtacccacagacgcacgatttctgccgccgcagatatagaggagtagccgtactctcaattcagacatcaaggtgagtggtctcttcttaatttctatttttctgttgcatgtcctcctcgtcaatagtatttgtggccaaattcatcggattattcattaatccattaacaattgggttaaaattaatcattttctttgagaacctttagatgagaaaccttttgttttgatagactcttcttttgtttgttgctgatcgcggaaggaagtccatctgcagacttaactaaattcatcaaaaattctgagtggtgactgattttagtgtcattcggtaatgtttgtagacaaaacaatcgggtttttaaagaaaaattagattgttttagctacatattttaggtattcaattaatttatgattgattctagtgatattcgattagtttattaatttaaacacctaatgatagtttatttgttcgattctgaatccaatttgttgtcaattttctattttcaattttggttgacacaacttttgtttcttggagatcgtcctcctcattgaaatttgttgtcgtattcctcagaatcttcatttttctggtaaggattgttcccaaaatcatagtttttgtttaaggaaaataactcaagaaatccgtatatcaattttcaattttgattcactagtctttttttattccggtaagatttgtggacaataacattcgccgtcaaattcatcggatacttctttattccggtaagatttgtggacaaaatcattgtttattattttttaaagactaattattaccaaaaatgggaagaaggttgatataaaatccaattgttgctacagatttatggtgttttgataccatggtgactgattttttttgtgttggctttgtttgagatatcacttgttctgtttctattttttttattacaatcgtttattaaatgattaatctattgctcattttatttggtgtttcttaatttttttggaagttaagtatgacgtcatcgagtaatgtcttcaagtatcctcctcgtctttatgaagaaggcaaatcaccattgcaaagttgaagcatgaacaacaattgctttctaaccaagattggttagattagagacggtctaggtttggatgtgtggcatgttttggagaaatcttctaggtgtgtttatcaagcttgtccacctagagtacatgtgggctacacataaagtacatctcttcctcacaaatcagttgaaagttggtaactttcatgagatatggtctatggtggatggtagaccactctgattctctttaaataagtttgctactataatagggctgaattgtgatccttttgacccgtcgaataatttcaaagctgaccacagttagttatggaaggcaatgaaagttccacctcagaaggtccaatgttcaatgagttaaaaaatgtgatgggttttagcaaagcatggaattttaaagatatgttgatggtgggtaggttgtgtttactatctatggcaatacatggaatacaccacggatctagaattcctttacctagtgctattagagttcttgatctagtgggttttgagaaatatccatggggtcttgtggcttttgaatctctaattagatcggttaaaattgttgactttgacaaagagggtagttatgttatttatggatgcgttcacgctttgcttatttgggtgtatgagagtatccatggtctagcagagacttttgggatgagaaggcctacattgactggtgttccacttcttgattggcgttcaactcgaaaggttatcaactgaaagagttcatcaaaaaggagaaggcgttgcatggagaggttagtattcacatgttctgtatttaaataagatttttttctcaccaaacactaatatattatttctacgttgtatgtagatgcgtgtaaaacacatgataattcctattacataagagaacatgtaccttcaatggagtgatgcagaagaagataaggatgtgaagcttgacaacttgataaaagacatcatccataatcttcttgctttagatgcttggaaagatgtgcaagtattttgcattgctaagagtaaaacaaaagctattgtggctagcgaaagtatcacaatcaaggggaaacaagttatggaggccgaatcttcaaaagttgaaaacaaaaagcagaagatagtctcagaagataaagaggttagttattctcatcttattactgaatgtgattatacttttaataaaatctgtacatttaaatgattctaggttgataaggatgagaagaatagctttgcggatattctaaaggtgatgaaaacactgaatgagactatttcagacgtgggcaagaatctgagttgtaagatcgatgctatgcagactagatttgagtctcagattgttgcatttgagatagagttaaaggaactgaaagaggtaaaaccagcttttatacctaccattattaccaattcgaacaacaataaagtctcatcttattattgtttgttaattagtaacaattgtattttacttttcgactctataaataggttattgagaaaaatgttgaatattaataaagattatttgtttgtgttgcagtcttcgaaagtagaggagaagccatcttcagtggatggtttacctattcaaagggtggtaaataaacctaaaacagtgcagaaaaaaataaaggtagaaggtgaagtatataacaagaagaaagctgtgggaaacggggcaagtagaggtgtagtaaaggatgacaagaagaagttagttttgaagcaatctaaggtacctactctcaagggcttcaaaaaaccaaagaagacaacatctaatgatgatgttcaagatgttactgaccaagtagttgcagagaacttgaagatggtttcaagttctgaagatacattctccgatcctcaacagcagcgcaatagtaaggcactttctgcaacattgactgctttcgtagataagataaatcagatagatggagatggaattacaactgtgggtagacgcatgctacaactagcgggttcttagaagtaccttttgttggtaactcaacagtgaagcgcatcattacagaagaagtccctcctccattgatacctgatcatcaacaacctgttacaaatgagaaactgaatgcactcatggattatcttgcacttgatgagtttgatttgcaactattcttttatacttcatttagcaacattttacttcgtctatttaatcattctgtttcaattgatttgcagggaagatccactagaaaccacttacgacgacatgaagttctattggcatattatgactccaagaaaatattggccggatgaaaaatagggatggttaaaagactatgtcagtgacacatcaatgtttttttaataatttcatcttattagactcagactttaagattttgtaaccatcttaaatgttgtttttattgaaatgtagcatatagctgttgcgttgactatgttccgcaaaaggatgatgtgtgatccttcaatgtaccctaaccaacagataactttcttggatcaagatatgatcattcctttgtctaatagttacagtaggtttaaaggaggcagaaatgatttcaagttcagagactactttgtgatatagacttgctaatgaggaggattaatatctatgatagtagtccacacatgaccactgataaagaaatggttgaacaatccatgtttttgatgcttatgatccctgctatgttgagtgctgtcattccaattcagatacgcaagaagagctttgcaaagttggaagtgaaaaggattacaaagaaggtccttgagaataaagatctaggtgattgtgctgtttagcactgaaatacatagagtgtctggcgcttggaagatcatttgatggcctttgcgataaaaacatgttggctctacggattaaacttgctacagagatatttgatgaagtcagagatttagccggaccggggaagttagatcctcgtggtaaagaattcaagatccctcacatggaggattcatagtagtgtaggctctctactgtatgtgacctcggagttgtagattttttttaattgactttggcagacatatgttgcaggttttaatcattgtaatattctttctttgtggtttttaaactcatagacatatgtcacatgttttttactctgtttttaatcactcatttctttttctattagacatcatattgatcttttaacgatcttgtaattaattaatcttatttgactcataaacacaataaaagctgaaatggtttctcaagatgtcgagtgacacacaagcatgaagctttatgttaagtgacacacaagcatgaacctttacgttacgtgacacacaaacatgaacttttacggcgagtgacacacaaccaagaaaactaagaaacctttacgttaagtgtgtcctttacgttaagctgaaatgcttaatcaagattaagtgtgccctttacattgagaaataaaccgagaaataatacaagcatgattccacacgacatcaagtataaataaaacaccatttaaaagtctaactagtgatcaacaaaagtattttgaagtagaaaaacaagtaaaagtgttaaaaacataaaacataaggcctaaaaatcaaagtttatgaagtacaagtattacgattgtgtcctactttattgcaattaccacaagtgtatggctttgtttgcttcttttatgcatagcaacctccaatgccgatataattctcgaattttatggccttcccggttgttgtcgaggtatgggggtaagcaaacagttgtcgccacatgttggggaacggatatagcaaactctcttggcatgatagcattcacatatgcattgtacaggtagttcttgtgataacacagatgacactatacaccttcctatttttcagctgctgcaattgcgtgtgcacatggcaatttctccacgtcaaaccggcgacatgtacactttttgtctaccaaatttaaaacatagagagatgttccaattgtaacttgagctttaacaacatctatatcttgatagtccattaactgagcatacttaatgcggttttgtaaaatgaataacatagttaaacttatatacatgtttactcgtcattgttataatgactgaagtaaaatatatctgtagaattttctctacaccacgtgtcaaagatgtagtcatttttaatgcatcggctcacgatccgaaaaccatcgtgtcatcatggatcttatttcctgtaatagttgagtaataggaaaactcctggcatgtgacaccacattattcattgattctgcaatgttgcttgtaagcaagttgtacctatcacctaggaaatgtacatgtgtccagagttgcacatctaccgtttctaggtaagcatgtagtgcaagattcatcatttcttcctgataaaatgtggtttgaaagtcgacttgtctaaaagcattagccgccttcttaaccaatccgaatgcttctttaccttttaaacggatgttgattctgtagatcaaacaatgaatttatactaaggggttagataaattcacttctctcttagctctaaagtaatcagaaaagaagaacaaagttgcttgaataagaagctagcgtttttgctatgacaaaagtagtgtttttttattaggttctagatccattgaatataggacaaacccctctatttatacaatgtttccttgatatcagaatctgataaacttctaattatctaaggtttaaatcttcatttcttctattcttcacaagatcctcttctttcaaaatgaaagtcttctctttccgaagttcaggaagtcggctgggcgatctctagccattgaattaggtcttctggcgacctcaccactttggcccattaacaggcaaaccggggtatcccggttaagttgaattctcgatttgattcacattccctcggtttaaaccggtattgacggaggtgctaattcctgcaccaacaattagtccccccccctccagttcggagaatccgaattgcctaattcgaaattttcgaattttgaaaatgaatattcggttcaaaccttggaatgtgtgaattaatcattagatctccgaatccattcgtatttctgggtgcattcaacaagtgttatcgtctcgcgtccacacgcgcacgtgaagttcggaaatcgaagcgtcccgtaggtttaatgattacttcataggtttgtcgcccacttcctcctatttatactcgattaaaccctcgagaattcactttccgccgcttgcaagaagaatcaaaggtagctctcattcttctccctgcgaattatttttcgttctccgtacttttatcgaattttctgataatgggtaagactatcatcgtttcctcctcctcttcctcttccgatagcgaaactacaatgttagtttgccataaatctcgattcgtagaaaatcaaagagccgaggcccaatctagtcgggctaatcaaattgagattccgaggttgatagatgaatcagatcgggatggcgatgacggtaatccggctatccttccagaagaaccggtaaactatctggatcgattcaaacccctcatcgatctggaagtcgcttacaacgtcaatccgagatattcagaagctgaagtcgtggcgaggtccaattaagaccgccgaatttgatcttgatccggttgtcgactagaacagtgagatcactgcgagtgaaactctctcaaaagaagaatccgtcgtcgaactgctttcttcttgtgggtgtggagatcgcccaatcatatacatgattcctggtgcagacgattgtccctggagtcctcccaaggggtatgtttgcttatacgaggcctacttcaggcaatgccacctctggtttccaatcccgtccttaatcatttctttcctcactcgccgtcgtatggcgatctcccaacttactccagcagcaatctgtaatttcgtcgctgccttgacttttggtgctaaggaaggctatcgagtgaacgttgaagagctgacaacgatgaaaaccagtaggtcgcctggatactaggtggtaaacaatcgccccaaatataacttcctccctggccctaaggttagcaatttcaagaactgggaggagttctacttctttgttagggctgatcttgaatcttacgagagtccgttctcgggaaggaagaggatgtgggcagaggatcctggtagacttctcttaaacagataggacttgaaagatcttgattttgaactcgttctcataatttctcttcatattgcagatcgctacaaggccagcccaaaatttccttctgagttcctagaggttagagaggcgatcttccgagctcacaatcgtacgtagagaagtatcacccggtcgcgagtgatataacccgattttcaccgattttatctatgttttatgtataggattttgagtctttatgttatttctcgggtctttttagtgtcttttcaggtattctatgcaatgggacaacaatggagataaggagacattttggagcaaaatctaaggaaaaggaagttaaggacgattttggttcaggaatcagcgaggagtgtcgaccgacacactcttggtgtcgatcgacaccagtttcagcccagcaaaaaccctagacgctttcgagtttccagaaactcaagtttgccccagaagacttccctatttgcattattagtctctggacgtttttagggtctatatatattgtttttagacctaagtttcgtttattaagtcttttatcaagttctttgcaaaaccctattgtgagagacataagctattcattcgttgttcttcagagtttcattcagatcgatatatagtgaagagatcccttctttcccattctctatttactgtgtttatgctttttaactcaatgcatatttattgtctggatttaagatctagttaattactctagatctagcattaagaacaatcaaagatgaagaattctatagataacctagcaaagggggcaatctactaaaccatatgaatccttaatgagaaaccctattactaacaagcagattactcagacatattggattgatgagtctggtttatatgtgtgtaataagaatcggcctatttactaagatgaacaattgaactcgttaaaaatgcatatttaggttgatagtctctcggcttctccggtcactattagctatagatatagggagtttggcggcacgcccactggttattccataattagagtttgagtttaagaatggtttgataacaacctagctttcattagatctactaaccaatagtttcctgagaataccctgttcctagctctttattaaatcgtttacaacccaatcaatctgctgttttcttaatttcattttcttactatttcactcataccctgctagcttaatcttgacatttaactcactgtttgaaagaagaactccgtgaattcgatcctaaaatactacaattgatctcttatttgagagagtagttctaggtaatttgaaccatatcaaatttggtgccgttgccggggttcttaggaatcatcattgagtttactcacgcgttttttgttttcttcttttctgtgtttcaggtgtatgcctaggcaaacaaggagcacaaaacagaaggagcttatcaacttgtctgttctggacttagaaaaacttgaacgcaccaacagaaaaactcagaaattagcaatggttgacagagtcatcagaggctggtcagagattggatgatcatggactcatcctacctgaggacgccaatgaggatcaggcgcgcctcaatgcgcaattagctgctagagacgcagctgggcttggtgtcgaccgacaccaactgggtgttgatcgacaccatcgagagcagcacacagatacaatcggtgtcgaacgacacaacagaggtgtcgatcgacaccaacaccagattcctgcagctattcctccagctgcggaaccacgtcgtactcttggggatttcaacaggccagacctgttctagctaatcgatcagcgattgtacccccaccattccaaaggaacaactatgtgcttaagcctgcctactttgctttagttagccagcatcctttccatggcttatctcatgagcagccaatggatcatatcgagcgatttgaagatcttgttttgagcatcaaggctaatggagtctcagaggactacctactgtgcaagctcttcccttattcacttgcttgggaagcagcttcttggctgaaacaacttaaagcaagttccctcaagacttggagaagcatcaagatagccttcctgaacaatttctacgatgatgctaagtctgaggagttgagaaacaagctctctaccttcacacaaggtccagctgaagctttcaaggctgctttggttcgtttcaaggagtaccaacgagattgtccacatcatggtttcagtgaggtacaacttctaggtaccttcttcagaggagttgattggagataccagatagctctagatgcagcgagtaatggtaacttcaacacacgttacccagctgatgctacacccctgatagagaacctcgcttgctgcaacagtaccaagaatgctgattttgagaggaagaagattgctggagctatttgaagaaattagatggcagaggtgaatgctaagctggattcggttcataacttgctcacagggaagaagcatgaccactttggagctgaggaagagactattgagcctgagcatgagtcagaggaacgagtcttctacatagatggtcagggatacaggaagtttgggcagccacagggcaacttcagtggcaacaggtttaaagggaaccagggttactccaactacactccaaagcctgctttccaaaagacttttcctcaaagcaactttctgaggaactatggtaattcaacttaccaagcctcccccccccccctccaccctcattagagacaagaatggaatcgatgcttgagcagattttggaaagccacacaaagcttgttgtagagtttaatggcaagtttaatgctgtctacacagatcttaatgggaagatcgacaatctgagctctcgcttgaagaagctaaatgtataggaagctcaaactacacaatctatcaagagacaagagggttttcttcctggtaatcctgatgctaacccaaggaagagttgtaatgccatcttgatcagagaaggagatgatgtgtgggaagaattggatactgaagacgagttggagacgacaccctcctgtgtcgatcaacaccatataggacgctcttctcagagacgactcaatacgacagtgtcgatcgatacccctctagtgccgatcaacactggatcaggactgcaccttgtgaggtgcaagaacctatgcagcccaagtctgtctacactcctcctgtcccttatccaaggaggcgtcgttctaagcaggagcttcatgctgctaagtgcacatccataatggaaaagatcctccacactcttcctaaggatgcttcagagacatcttccgcctcactcaacaagtatgtcaagcgagttgttgacaatgaagcaaagctgcttaccagagacattagtgcaatcatgctgcttaaggccaagaaggagaaggcacagggggtagagatagctgagtacatccgcaccattactcttggtcaaaccactaagaagctt

SEQ ID NO: 194 - DNA, 28670 bp, Arabidopsis thaliana
acaagaagtttttatctagttttatcccgcagaccttttgttctagaccttttgtaatccggatttctctttatctattcagtattcagtattcagcttttgttcttgatttcgtttactgttattcattctgttatcatcctgctgttacactgttgctatcatgttttcaacctgttcaacgtttatgctcattgttatgatgtctcagtagtgaataggtttctgagtatgggttagagtagtgtagaattctcagtatgctaggagattgagtattggttgatagatcccttctggattagttgttcttaatgcctattgctttctaatcaactggaatttgagcccagacatttccgtgcccaaaaggtgttcgatgaaatgtctgaaccactaattttagagattcgtgaccctgtaccaaggtattggttgcagggagcgttttggctttaacttgttgattcgtaatgcctgttaggttagctctcgtcaatggtgattgagtctgggactaggttaacttgagagtctctgttgcggtggcacttagatttggttaatgaacttgttgtctagggttaatttattgagcatgtcaatcacctgtaaactgaggaaacgaaactactcaattaccccatccttgggaattctttatctgattgaattctttgtttactctattgttgtttactgcatcctgttatctgtcgcttaatttctacaattctttcttcttactcgacctcgtactcgaccacccagttgtctggcaacagactgtgcagtcgagtatctgtgttttattttctgtctgttactcgacctcacccagtgctctgcaaagagctgtgttggtcgagtgtttcactgtttctgtttgattttctgttttctgcatgttcacttaggactgctagaacacaccaaaacctgttattgcttggcttgacttagtgacctctgatcacatcttgattgttagcatcacacccatttggattgacaaccttcaatagtacaacgacatgatagtgctttaggtttatttgattaaaaacctattatcaatttggcgctgttgccaattgggtgtttgtttgttacatttgagatttcagacttgcttagatcaagttctttttcaattttcttttcggttactaactgtgtgtttttcttgttgtcttcttgatccaggtacacctctgttgtatgcgaactcgatcaaaaggcaatcagaacctccttttcaacgacaacatcgaccgcatagctcgcgaaatcagagaaaggagaaacacagtcaaccttgtacctcaacaaccactcaaaatggctgaagaacagaatcaacaaaatggccctgccaacattggtgctgggaaaataagtctcaaccttggaaagcatatcaagttgcagtttagcatcaacaaaactccacaagggtcaacagaggatggaaaaacctctggaaatgatagagtgatctcaggagaaggatatgagactgaaagagtgaaagaacttaaaagaggtctgataagcaagatgaaactatagagaagctagcccacaatgttgaggaacttaaaagtaagctgaatcagttgcagaaggaagctcaacctaaaggcgggatcgacactatcccgagaaagaagttcacttcaaaatggtctgaagagatagattaccctccagaagagaaagaagcatattttgaagagaggggaattgagtattctgctgcagacctctacagggaggacgctgagtatgatgatggtatcaaagaggattatgtagaccctctcaacagttcattttcttcttgataagtgtgaggagtcaagctagagacttaaaacaagctcacttgggaggaagtcccatgactatccttgtaaataatttttactttcttgttattttttatttgttttggttgtgtttgtggttctcaggaagaaaggagtaacgtgaaggtagagtaaaaattcaaaacttttactctaatgatggcctagagatcgagtatattggtcgagtatgagtgatgtttaaaaacctaaaaaaaaaattcatcattttactcgaccaacagaagctacagaatattacaaagagttcatcaagtttagaagattgcggaatttcctggggatttttctagtaaacagagaatacagagaagagacatgaagacaacgagggacccactgctgcagccatgtctcccacgctccccataaggtgataacaaaatctatcttttcttctccactccactcgacctccccttacccattcactcgatcccatcgccttctctcttcaaaatacgcgacctccccatctctcttcctcatacactcgaccaaatccaaaccactcgacctcacctactgctgcgacactcgatttcgcatcaccttctcttccgtccaagcctcatcattcggcctgaaggaatcaccgccgctcatcaccatagtcatcctcacaaccttcactcgacctctccactaccacaacaactcgaatcaccgctcttccaacttcattcaacctctcgttgcctctcgctcatcaccgtttgaccaaggaatcataacctctacacatactcgatcgcgtctacacaccatccaaactactcgacctcctgttctttctccaaggaagcaactcaacatgtttaccagagcttcagggatgaattcgaacgctctgcagcccgacgtaatcagagaagagctgaaatcgccagaggaaagagggcgatgtcgagtagatatgagctgattgatgaggacatcgaaactgagtatgagccagagtcatggcgtaaggagacgaagctgctgaacaaacccgacgaggttacagtggaggagtatatcaggttctttgagatgaatgacttcaggggaacgaggtatccgtgctatgagactttagcccagctggggttactggaggacgtacagcatctgttcgagaagtgtcatctggagacactcatgccttacccttaccctgcctataaggaggagacaatcgattttctttccacgctgcaagtggagatgtatgagggactcacagactttgagttggataccatgggactaggtttcttgacgttctcagtggatgaacagcggtatcagctttcgatcaagaacttggaagaactgattggtttccctagtggaaatggaaccaaaccacgatttgacagagaagagcttaaggacttgtgggccactattgggaacaatctaccgctaaactcggcgaggtccaagagcaaccaaatccggagtcctctgatccgctactttcagcgatcggttgccaacgtcttttactccagggagtctacaggcaccgtgtctaacacggacatggagatgataaattatgcgcttacagggattctccaccggacgaagggagagaatgtcttgagaggcgatctcaacaacgcaccaccagtactgcctctgttgatccatctgtgtggataccggaagtgggcgttgacaaacggaaagaataaggtgagaggagcactatgcgtgggtggctttgtggagtaccgctcaaggaaccagggttagcaccaagaatgatggacttggatcatttgtgccgatgtgagttcttggagtttgacatggctggcgactttcaccgctacaggttcgagcattcatcgattaaaatcgccaacattcttctcccctgcattgacgctactaggattatcgagggcaggaacattgacttcaagcctgcgcttgaagatctttatttcgagggcagtccaccaactgaggagatcagtcataccgaaggagctacaacagaagatgttgatgagacggatgatatagatgaggcggagtttgacacgagcatgtatcatttcagtgagcatatacctcctgtgagggaaagcaggagtttgagcgaagctcacagaaacaacagcaagctgcaaaagtggtgcatgaaacaggacaagttactcgccaagtgcctcagggctatcaagtttctgaaggacaagatcagctgctcctcttccactacagctattccgcagggacatctccctcaggacatgccttcgaggagatatgacgcacgcgagccaagtcggcgcaggcctaagcctagagagtaggagattccgcatgcccctgcgaggcattcatcattcgagcctcgtgaatctgggaggaagaggaggaccacactcactcgatctagcagtaggagcagacaacttctgcagtctcgtagtttacgcgaccgcggtgctggccgcagtagaaggagagaggtcgagtatccttagagaggtgctggccgccacagagctgatgaggtcgagtacccacctgctggagctgatacagaacaaggtggttcgtctatggcctgagaacaatcacatgcaaccattgacgagcaacttcgttcattcttcaactgaggtaagcgcctcacttcaccattgtattatatcatctattgtgatttgtttcttcattttttttgtttctgtgattggatttgtcctgagtactctcttccaagtttattcacacagtggactgtgtgatttaagtttgggggagggctcaggaagtgtgtgttgcattgtatatatttttgagtctgcaatcatttaaggcatagaaaaaccaaaaaaaaatgaaaattttcagaaaatgatttcaaaaaaaaaaaaagagtgttcatgtagttgcattacatttaggatcgagtctatagtgtttcatttaggatcgttgcatatgcataggggatgatgatgagatagccttgtaagcattttgattcaccggataaactcagtgccctcgttgctagttgtctgttgcgtagtcaatgaatttgaaataaaactgaaccatgcctagattgctctactcgaccacactgtcatgatctgataccattccctatcaatttgaacctgaatctgatctttaattatcatgtctgcatcaaatttgaactcatggataccataaaatacttggattttcttattcattttgatcactcttgttaatccaagtagctgactctccttattagagcagttaacccaaacccaaacctagactttctttcaagccctatatcacttgtgagtgtttgtgaggtcttattccaattaagcttggtagaaagtgttaggttcgtaacgacagagatagtgtctcatgtagttctagttcgcatttttcggactagataggactaggtgggcgcttatactttgggctaggatgtgtttaaaagaaaaaggggttgattcattgatgagaaaaggtaaaggactctaggtgaagtaagctaaagaagcagaaaaagtctagtaaaggttttgggatttctaaagaaaagaaagagttcttgttagctattggagatgggcaaaagcccttggttttaaaatgttaaaaacaggaaccttaattgttaaagaaatccaaatccgctagatgtaacaaagtgttgagaaagcttctcctagagttaagagaaaagaaaagaatgattagaacaagggtttaaaagattcatgaatgcatagggtagagttaagttcttatattgagattggagatgggattaccattagagcttcatttgacatactctgggtagatgggatcttatctctgtatgcatagcttgggacttacctttagcattctactaaagcttaatcatttcttgagagatcccctgttgttgaagcctattctataagggaccatctttgtctcttgaccttttaccttagccaaatgagttcattgatgatgcattgcttgattcacgttccagaactaatgaatgttaaagggattggtagatttgaaaacatgtgtaggtccaacataagagtcggattgattaataacaaggcatggctaacgtttttgagtagaattcgatcatatcccagcttagaactttcaacttggacattgatttcatctggtctatctggtgctttggctctgagtccccgctttcaaacctcaccttctgcttgttcttgattgtttgcttgagggcaagcaaagactaagtttgggggagttgataagtgtgtattttgcatgttttaagcatccatttgtcatcactttagcatcatatcatcactgttttataccatttctcatcatttgtcatcactttacatgttcactagatagtttcaatgcccttgttgttagttgtctagtgcttaaccgattgatcttgaagtaaaaccgcaccatcttttgaattcatatacttgatctttccttagttgaaactcgctgtgatttgaagctattccctatcaatttgaaccttaatttgacttgtaattatcatactatgcattgtttgttaaactcatggtcacccttaaaatatttggatcttcttattcatttcaccactcttgttgatccaaatagctgtctctcatctttagagcagtttccccataccctaacctaagccttctttcaagccatatatcacttgtgagtgtttgtgaggtctattttcgattaagcttggtagaaagtgttaggtttataacgacaaagatagtatctcatgtagttctagttcgcgttatccgaactagataggactaggtgggtacttgttctatgggttgggaagagtttaaaagagaaaaaggattgagttcattgtttacaagaaaagggaaaagaattctaggagaagtaagctaaagaagttagaaaaagtctagtaaagggtttgagattgttaaagaaagagattgggttattgttagctaataaagaagggtaaaaagccctaagcttaatagagatcaaaaacagaaccttagtactaaagaaagccaaacccgctagaagtatcaaagagaaaagaaaagcttctcctagagttaagaaaaaaagaaaagaatgggttaagaaagagttcaaaagattatgaatgcaaaagggtagagtcaagttcttaattaggatgggagatgggattgccattaggtcttcattgattatactttgggtagatgggatcttatctatgtatgcataacttgggacttacctttagcattctactaaagcttaatcattcttgagagatcccttgttactaaagcctattctttaagggacctttttgtcttttgaccctttgcccttagccaaatgagtttaatatgcattgtatagtatgatccatggttcttgcttaatgaatgttaaagggaatatgctgatttgaatgcttgaatagactaagtgaaagattaggttgtgttgtgaagaagatggctaaagtccttgttttagatccaactacagatacctatggcgggcatatgataacactagattttaaccttttaaagcccttgtttttcatgcatttagcttagtttcaagtctcttttcatgcattcttagtctcttttccttcttttgcacattttgcattgcattgcataacatacttgcatttggagtgttttgcaggtgaattagatacttttggactcaacttggaggtttctaccacaagggatggacagactcgagtccggaggacctaaggaagaatttgaagtatactcgacctttatactcgatgtgcatgtcgagtaagtgaagaaaaagtgaatcttgaagatttgcacctactcgaccaagccactcggccaagagccgagcgatgtgactaagaccaagccactcggcttttctactcggcctagggccgagcggtcctgcgccgactttcttattttgtcttctagcgaattagggcaacctagtatttgctataaatagaccccttccgtttacctaatggatattcctcttttattccttttgttctagcctctttggtgaaaaaccctaaatatgttcctttaatttcctgttgaatctttaagtttttgcaattattttcttctacaaagttgtttatcttgtttagatctattgcatactaagtttataatgatttctgggttttatgatttttctgggttttgtatgatgttcttcatagttcatgagtagtgttcttcagagttcttgaggatgggttaggtttaggtggattcctcttctctttagctagctaagtttataaatgcatgattcccttctgttttaggagttcttaatgctattttctttcagatcaattgaaaattgatttcagactttctccacccaaaaggtgtttgatgaaatgtctaaaccaactaatttcagagatttgtagattctagcccaagacattggatgtttagactgcttattgactttaatagattggtgtttaaagcctgctttattatgtttcatcaatggaaattgagattaggaagttctaaagttatgagaatcattcgcacggaagtggattgatttggttttgaatctattgtctagggatagcttgattgagtttgttagttagctaaatggattgaggagtccactagaaccaattaccccattcttaagagctctgttgcgcttagatttattgagtttcgtgttatttactcttctgctcgttcagtttagtttatctgctcgttctgctttgttattctgctcgactttgttactcgacatgtttactcgacctgcatgttcatactcggtcgagcatctttactttcctctacttagttcattgtttaagtttatgcattgagagttcctggtctgtagtttacttcttgcttttatcactcatgttctttattttctgcttagtatagttagtttcttgcataattacttaggttgttagataactcaaatcatctagacttggcttgacttagtacatgctgattgcatcttgattgatagcaaactcacctaattggattgacaccctaaatactacaatgacatgatagtgttagggaattgatcacctggatttaaacacctgtgaaaaatcctactatcagcatatctattgtctggattcaagatctagttaattactctagatctagcattaagcataattaaagatgcagaattctacagataacctagcaagggggcaatctactaaaccatatgaatccctaatgagaaaccctatttctaacaagcagattactcagacatactgattgaagcaaacaacataattgagtatgaaagcataaacacagtaaatagaggaggaaaaagaagggatctcttcactgtattaagaactgaatcaatgtctgaaaatactcgatgaatagcttgtgtctctcagtaacagggttttcaaaagcttgataaaaacttgatgatgaaaactggatcctcaaaacttaggtctaaacaatgtatataaaccctaaaaacgtctagggactaataatgtaaatagggaagtcttctcgggcaaatttccaccaagagtgtgtcgctcgacactcctcgctgatcctaaatccaaaatcgtccttagcttccttttccttagctcttgctccaaaatatctccttatctccattgttatcccactgcatagaatacctgaaaagacactaaaaagactcgaaaaataacataaagactcaagatcctatacctaaaacatagaaaattagtgaaaacagggatatatcactgatgaccatgaagctaaaagaggtggaatatccttggaatgctgttcacctcaaaaagtattattactatatatagatttcaaaaaaaaaaaaaaaaaatcgcctgtttgatcttatgtaatatgaactacgaatggcttgatcccttcaccgggtacgtaggcaatccttcgctttaagatctgtaacaagtcaaatctcggcgccctggccaggtgtttgatgcgcgtctcacatggatgcagtagtgaaattatctacaccctattagaaacttaatttttctaataggtataaccgagactagttttctcgcacttaagctctggttcagacagaaacgtttttctaataggtattacaaacacgtttattcgaaagacgtttttctaataggtattacaaagacgtttattcgaaaagaattaaagtgatcaaataagatcggtagccattacaagggcgtttattcgaggaaagataaaaagagaaatgacctaaatactactaaggatcatcttctatcatgacaaaggcatggtaagagaacatttcatagcattcaggagagctacaggccagatggaagcatcaaatcgtccgatccgaaacgacgcggttgtctttgagaaggcgattcggcataggccacaccagctgaagaccaactttctcccaatcctctgaacgaatttccaacgctttgatcgtttgttcgatttcatccagacgggtgacgacccttcttttcttccgtctcagtttagtaatcagagcttcaagctcctcaaggcgagaatccaccttttgtttcttagttcataagtattgtagctcgcggcactgatcctcatgcataaatccgacatgaagaaaagaacgatggaatcataagaatcacatcaaaaaaaaacgataggttaaacagttctcacctggttaacaaaattctgacactcggtgctttcggcatcggaggcggatgatccaagatagaacagttgaggcgctctgggaacgaaatctccgtcagcgataattgtgggattcctttccttcgaggcgacaacaacatcttgggcacagtcgttgaaatatgacaagaggatgtctagcatgggagccaatctttagaaaccattcttgatccaataacgtagatgcgacttcaacatggctagtttatgaaggatgtcagactagcgttcttcatagtagctcaatatctcacgatactccttgtgtcttgattcaacacatgataggaatccttccgcttcacgccttccctctgagctcgcctagaacagaagagtccacggaacacagacgttgttaaagaacggcattccccactcaattgcctccgcattagaaaaggttggaacatttttcctgacaaggaatgaggatccggcgctctccattctacaactaaaaggaagaaaaaggttcgataagaaaatcgttcttgctcgaaggggtacttataagatggaggaagcaaatagaattagggatttgctaaaccgcgatgaggaaattctcgtttttcttttccacgaaaaaatggaaaatttctcttccctagaagaaaaaatgggaacttgcttaaattcgaaagtctttgcttttctttttcaaaaaggagaaaaaaaaaacgagacaattttcctttttagtttcgaatgaaacaagcaaaattggaaattgtagaaaatggaaactaaatttaaaaccgccccgaaagtgggtccacggttgaacaagtattttctttgaccgcctcaaaacgggtccacagtcagatacaatatttaaatcgcctcgaaagttgggtccacgatcaaattgtctttaaaataattacaagtacaaaacgacatcatcaggtcgttggattctgttcgccttcctcaacgctgagatggcgaatatcacttcggttgaagaggtcgacgatggaaccatgctgatcggccacgggagcaacttgagaagattgccttgaaaaccaagttgatctggagacatgttcagatcgccctctccgaactcaatgacattcaaggcattgacctcatcgttcaccttttgggttaagacctttaggccctctagctcggccgctgcaatctttgcacctcttcctatcaagatgccaaccacttcctctacgccttgggcttggttcagagcgtccaccttaggcttaacgatctcttcctgctcggtgagataggccttcatcttgtcgagacggttttgagccttcctagtagtatgggagaccttcgcagctcggtcggtctgaagcctgatacattctctctcctcgtgctcttttgccgcgacaagtgcgacctgaacttcaccaatctctttcaaaagatcagcctcgcgaccattaagtctggtgacctcgtcattcagcgagttgatctctgtcttgtgggtctcatcggcatccttcaaagcggccatctccttcatatcccttgcatagatgatctttgcttggtccgcacatttcttcaagttgtcgaaggtgtccctgtctgcgagcttcaacctcagtttgcgatcggatgaagcgattagatcattggccaaagcggcggtctgatgaaataaagattgcagtcagaacaaaacatagagaataaaaaaatagaatacttgtgtaatcgacacatacctttaaagaccatctggcaaacttctgatactcctccttcaggaccagatcgtcagggttggggaactctcttgccccaggaagcatcaagttacgccagagatgactggcagcctcacgatctcttacgagaaatttatcaccagtatacttgaatgtaaattggtcgggattaagagcttcacccctagacagacaaaaagtctttggcacgggagctccatccgttaggccggcttcagtggccgatctcttcttggattgactggccacccctttccctttctcttcacgggactgcctcgaagtctcatgatccgcagcagttccatccttgtttgaatcaaggatggtcaggtcaacatcgatcctcacgccttcagatgtggcggtatgaattgcggcaggctgattgcctttgataacttgaacctcaagttcaacgacctgagtagagatagtttggttctgatcgccaccgacaatcagttgagcttgagcattgtcggccccttcaagacacgtccggtcttgagaatcttggacgatcaaggtctcgtgagaaacctgatcaacatcagaagggccagaaaccacggaaggaagcattggggtcgtaacatcgtcgagaggacgaacttcttcttgaaccggagccggaggaggcggcatgctcaaaagccttgaagcaaagctaacaaaggacttcctaactttccccatgatattggtgactcgctgatatggttcaaattacctagaactactctctcaaataagagatcaattgcattattttaggatcgaattcacggagttcttctttcaaacagtgagttaaatgtcaagattaagctagcagggtatgagtgaaatagtaagaaaatgaaattaagaaaacagcagattgattgggtgtaaacgatttaataaagagctaggaacagggtattctcaggaaactattggttagtagatctaatgaaagctaggttgttatcaaaccattcttaaactcaaactctaatgatggaataacgagtgggcgtgcccgccaagagactgtcaacctaaatatgcattcttaacgagttcaattgatcatcttagtaaataggccgattcttattacacacctttaaaccagactcatcaaataatagatccaactacagatacctatggcgggcatatctattgtctggattcaagatctagttaattactctagatttagcattaagaacaatcaaagatgaagaattctatagataacctagcaaagggggtaatctactaaaccatatgaatccttaatgagaaaccctattcctaacaagcagattactcagacatactggatgaagcaaacaacatgattgagttaaaaagcataaacacagtaaatagagaatgggaaagaagggatctcttcactgtatatagatctgaatgaaactctgaagaacaagggatgaatagcttatgtctctcacaatagggttttgcaaagaacttgataaaagacttaataaacgaaacttaggtctaaaaacaatatatatagaccctaaaaacgtccagagactaataatgcaaatagagaagtcttctgcggcaaacttgagcttctggaaactcgaaagcatctagggtttttgatgggccgaaacttgtgtcgatcgacaccaagagtgtatcggtcgacactcctcgctgattcctgaacaaaaatcgtccttagcttccttttccttagcttttgctccaaaatgtctccttatctccattgttgtcccattgcatagaatacctgaaaagacactaaaaagattcgagaaataacataaagactcaaaatcctatacataaaacatagataaaatcggtgaaaatcgggttatatcaactcccccagacttagcttttgcttgccctcaagcaaaacacaaaagccgaacccgtggaagaggttttgaaaacaaaggaactcccaacattctctagcctattgccatgatcattcaaactaagtccatatgcctaacaagtctaaccaaatcctaaccaaaatgtacttctctgaaagcttacacaacattctagattccatacctaagttccacaactatacccaccaggctttcatcgttgggtctcatcaaacaagccaacattcaagatccttctatactcattcctgtactataccatgataaattgaccattctttatatatatatatatatatattttttttattttttttctttttcgttgttctttctctcccccagacttattctttttagagagtaaacaaaggggaactcgcatactggatcgacaccctcggcattttcatacctttgtaattgatcattccaaataataaataataatggggtcataggaaacattcctacccctatacactatctgaaagtcgtctcaatctctcattataatttatttattttttaaaaggagagaggatcatattctttttatcacattggtctcaatatcaggtatgaacaaggagtcaagatctatgaatactaaccgcttgaagaggtaaaaggaatagcagtgagattagctccagccttagtggttgagttggaaactaggatatcctcaagtctgttggtttgctatctagattttccaatagtctgattgactcgaacctgcagcactcatcaatcaggcaataaacatgagaaatatagatcatgattcctaactaaattaaagcaaacattttttttttttttttttttagactccataaactcaaaaacaaaaaagaataagaatcaaaaataaaaccaatattagtaagaacctcccccagacttaaacgacactgtccccagtggcattcaaatccagagaaagcgggaaaaataaatcaaaaatgaaagaaaataaaagaaagggaaaagaaaaatcaaacagagggttggctcccactaagcgcttgttttgagtcaatagcttgacttggcggaattcaggatgtgggtggagtggtggtggaggattgctgctgcctcctcgccttccaagacggtgtgtaaactgatctggttggagcagcttctggtgtcgatcgacactcagtggtgtgtcgatcgacactcttctcgtcatctgcaaaaacaacaggagaaacaagctttcgagggactctaggcttgttatcttgtgaagcagtcttcgaataatccaaggaagtaatcatagataaactaggagaagagatagaagagaacttatcacataggtcctcaagtggtttgggctgaagagaatgtgcggaatcctctgtctgtgaaacccgtgggtgtcgatcgacagaggtagtagtgtcgatcgagactattgccctacaactctcatttgtgagtcgagcagatgggagcgttgtgtgtggctctatggtgggattttgatcagtctggggaggtatgactatgctggaagcaatgcaactgattggcttagtgagccatccatgccaaactccatatcttaaccacaaaccttgagagagatctccctctcttcacatcaaacctagcaccagctgtagttaggaatgctcatccaaggataaggggatccttgggttccttctcatagtccaggaccacgaaatcagctgggattatggagttatgatagtaggatttttgtcaattaatctctaaaacactatcttgtcgttgtagtattttaggatgtcaatccaatccggtgtgatgcaaacagatgagatatgatcagaaagctctaagtcaagccaagcagatagttggttggttctaacagtcctagtatgcaataacagaaatgaaatgaaactaaaagcaggaatggcaatagcaggcaagtgaatgacaaagcagaaatgataacaggcaatcaaatggataaacgattcctaaggatggggtaatcgaatagtgtggtctacttaatctattcaggcggttgacaaaacttcacagaagctatccctagacaacaagttcaacaaaagattaattcactcccgtgatagaaatcctcaagcaaagctagacactgacctaaatccctttagcgaactgtaactaagcaagcattatcgaatcaacatgttaaagccaataccctctctatagtcaatccctttgggtagagtcagatatctttggaattactaggatccaacgcccattaaacgccttctgagcgctggacgtctggactcatactccacattagccagtgaaataagcaataagcgcaactaatccagaagggattctagtattctaaactcaaccacctaaaacgaccaagtaaaccacaactattctatcccatcctcagaaatacagttcactactcagacataatcaaagacaataacaaagcaacaattgaaaacatgataacagaaatgataaaagacttaaacgaaaactgaatatcaaatacttgaaaacgaaactacaaagtcgcaggagaaacactgcggctatcaaagttgcaaaaatgtaaaagcgagataaaaacggataatagcggataatagcccacgccctagggaaaaccctaagaggcagtttatataagcgagaaataaaacaaataaggaaactaaatatatagcgaatcttcacgtcatgatcctgcgaccgaatatgtcattggcatctgacgagcagaaatgagcttcctagtgatcgaatatgtcattgatcaaactgggctttagggcctccgtcttgcgatcgagtgaaatgcagtgaagtcgagattgaatggtccagcgaccttgtgatcgagtgcgatcgagtggatgtcatgagggtgtgatcgagtggtttcttcggcttctcttctcttctttgttctcagcttgtctggttgagtgcagaatgagcagataggcttcctggtgatagagtggtgatcgagtggttctgatggggtgattcctcctgcttcgcgattgagtgaaactgagctgtttgcttctccgggggttgcgatagattgatttgccctggcagggctccgaggctgcgatagagtacttttgctgaaggcgtcattgggcattctgacttcatgttctgtttttcctctgtttgaactccaaaagcatccaaagtacctgaaaacaaccaaatatgccatgcacatgcaatcctaatgcaacatcgtcctaagtatgtaaaacacactgaaacaactcctaatgagatgaaatgtggattaaacaatgacaaagtggtgaagaatgaatgcgtaaatcatgcaaattatagacatatcaactcccccaaacttagtctttgcttgccctcaagcaaacaagaagacataagcagaaggagaggtttgaagttggggattcagaaccaaagcatgagatatgacaattaagatcaatgtaccagctaacagttctaagatgcgaggtgatcgacttctactcaaaaactttagccatgctctgttatgatccaaacctacactcaaatgcacaatgcgtcaagatcaaccaatccctttaacattcattaagttcaaaaacatgaatcaagatatgcatcgctagtgaactcatttggctaatgacaggttatgagacaaagatggtccctttttagtggtttagattttagtagcaggggactctcaatgaaaaaggactaagctttagaagaatgctaaaggtaagtgccaacctatgcatacaagaatagcatcccatctacccaatgacataaaccgtgaataacaagtagatggtcctatctctaaacccaatgatgatcataagtctactcttttgcactaaaggcatatttctattttttcttggatcaatgtttccttttcttttctttggctcttgttcttaaggagaagcttttcttaaactctatgagtctaatctagtgaattgggtttttctttaactcttatggctcttatcatttttttttttttttttttctttttctgtttttgttgccatctatttttttagagcatatcttaacaattctatgcttctcaaacattcactagaccacaatatgattttcagcttctttctcctaaagactctaacccatttttttttctttctttttcttttcacactcaatctcaatccccaaataagttcccacctagtcctaccaagtccgaaaacgcggattggaactacatgagatactactcttgtcggctcaaacctaacacgttctaccaagctcaatcctgaaaataggcctcacatgctctcacaaaataacatggcttgaaagaagggttggttaagggtgggggaactactccaataatagaagcagctacttggattaacaagagtggtgaataagtgaaagaaaatccaaatatgtattctatccacgagttcaaaaacgatgcaaacatgataattataagtcagattcaagttcaaattgacagggaaaggtgtcatgacatgcatcgagtggtttctatagaacatggtgcggttttatttcaaattcattcaaatgcctcagagaactaataactcattttagtgaatcatcatgcttacaaggctatttcctcattatcccctatgcatatgcaacaatcctatatgaaacactctagactcgattctaaatgcaactaaatgatcactctgtttttgtggaattcattttcaaaaaatttcaaattttttttgtttttttctatgacttagatgatatgcagactcaaatgatattcacaaaaaacaagtcaaatacgtcttgaaccctcccccaaacttaaattacacagtcccttgtgtaatcaaaatttgtgaaagaattcaagataaacacagaaacaaaaacaaaagcggtatttactaagggttttggtgtgttacctcagtagaatgtcctggagatgtagtcatccatatctgcttgagtgtactcagcaggcatgaccggttcttgatgtggctccgccatctcctcgtcattgtgctcgatcgcaaccccagcaggttgttcagcacgacgctgacgtgttctccgccccgacattatccgacccttgcttgatgatcgaaccatcctagcgctcttccgcctcttgtgctccctgacctcgtgagacgagtgtcgtgcgggttcttgcgagacagcgcgttctctctgttgataagcagattgccttggcggggcaatgtcatgacgcctggatggcatgtcttcaggcaggttgtccctggtgatcgcactggtggatgtggtgcaactgattgccttctgcatgttgtcaatggccttgacacacttatggatgatcttgtcttgaaacttgcaccacctttgggttagactgagcttccggtgtgcttcagcgagactcttgctttctcgtgaagggggcttgtgttcttcaaagtggtagcggctcgtgtcatagttctcccaattggtctcctcattgtcactctgaccttctacttcttcagcattccgggacgcggatcctccaatcacagcatggaggatttcttgtggtggcgaaaagtcgatgttgtctctcaccgtgatggttgtcatttcactgaatgcgagaagaatagttgcttcgcctgttgacgggtgatcaaacttgaaagcgtacctcccgtcatagaccttatgttcgatcacatgggcaagcttgagatgggcgatatccatccaacgtggttggattggatccggtcgcagcgggacgtcgcacgataggagaattggtgtgaccactcctccaatgcaaagggctcctttcgcgttcttcttgtcattggccatcgcccaccctctgtagctgcataagtgactgagaagatacattgacggtggtgtgtcattggtatctcccttcatcgttttcccgtccttggtgtaacggagaaaacttagcagtgccaggtctaacgtctccatgtcttggtttgtcacagtggctgatatctccctagcgtaagggacattggccatggctctctggaaatagcgaatggcgggattgcggatggagttgctcttggatcttgcagagttgaagctggtggtgtctccgatcgtgttccacaaagatttcaattcctctcgggcaaacttcggtttcattcccgtgccactgggaaacccaaacatggattccagcgtcttgatcgccatgatatagtcgcggtcgtcgatggtgaagcttaagtaaccaagcccttcttctcttaactcagcagctgacaacccctcaagcaattccacttaaagtgatgaaaggaattgaagtgtctcatcctcataggtaggatagggatgagacatgagtgttgtcatgtggcatttctcgaacaagagttgaacgtcttccaggatgcctaactccgccattgtctccgggtgaggatatcttgttccccaaaacggatttcttttgagagccttgtagtagtctcccggcgtcagcttgtcttctttcattagggacttggtggtcttgcgggtttgctccggaatgtactctgcatcatcttccatctcttcatcaattagctcataatttttacgtcattgacctcttccctctggctatctcttctcttctcctgtcattggcgactgctcgctctatttcctccacaaatcgcctatactcatctgcttctctctctggcctagttgaccaagattcagcatcatcaacattgtagtcggcatccatagatgattcgtagctgtgtgaactcatcttgaagctgaaatcgatttgaaactcacaactaaagctcagtaggttagtgagaaacaaacaaagacaatgaaagaaatgacgtcctgttgatatagagttgtgatcgagtagaatttgatagtgagagcttaggtcgcgatcgagtgaagcaagcaaatgagagacagggttgcgatagagtagtttctgaggttctgttttagtcaataacagctagcaacaacgaaagagttgagagcgtttttggtagtgaagtagagagataaacaagagagatgttttgaaatcacaagtgatgaagaaaagtgaagagtagtgacacttatctccctttgcgatttgaatgagtggaggaggtgtgttgcttttaaacggacggatgggatgcaatgcccgttatgatgtcggcaaagtgataaggtgataaagcatggtgctttatgtcggcaggatggggttccttcaagtcacgcgccttgtgatcgagtatgggctgttgatcctttaatttcgtgtcatgggctacaattggacacagcatggactttttggagttttggtggagattgaaatccagtaggcttaatgggactgaggtttgtcattgacgttctgtggacactttcactcctctttgcgatctagtagaaaattgttatcccgaatctactagatcgcactcctgagctttcactcctacgttgtgatcgagtatttgaaaaaaaaaaaaaaattggaaaattttcattttaacactcgatcacatccttgttgatcactccagctgttattcatttcctgagaatcaacgacacaaccaaaacgaatcaaaagtaacaaaataaataaaaagtatatacagggatagtcatgggacttcctcccaactgagcttgtttagagtctctagcatgactcctcacactaatcaagtggagaaaatgtgacagagggaacttgagaagtcctcctcttcactgatatcatcatcatactcagcatcctccctcgatagttgcacagctgagtactcaattcttctttcctcatagtaggctgctttctcctctggaggatagtctttctcttctgaccaatcccaggtgatctactttcttgaaatcgtgtcacggttgacctggggctgaacctccttttgcatttgacttagtttgtctctaagcttttcaacagtgtagctcagcttctgaatggttctgttctgtagatcagccttcctattgagttccagccaatcaagtgaggagggtatactcgatcgagtagtcgagttcgatggcggactttgaaccaaaatttgctccttcgctcttttgatctcaaggccttcacttggaaccgctctctggacctctaaggtttttccttctgttggtggccttgtcggaaatttgttgatgtcaaactgtaacttgacatgcctcccaaggttgagatcaatcttaccatatctgacatctattactgctcccactgaggctaagaaaggtcttcctaagatcagcggatccttagactcttcatccatttcaagcacgacaaaatcagtgggtacctcaactccatctatcattactggcacgttctctagaatgctgaaaggtctgaagttctatcagcaaggatcaaggtgatgtcacagggcttgtactgaacgaatcccagcttccttgccacagagagtggcattaaactgactgaggctcctagatcacctaaacaattgatgaaagtcaattgcctaatggaacatggcagagtgaaagatccaggatcttccagcttctcttgaataatcctctcaccagcggcttgatgcataatgacatcgtcttcgtaatctgaatcctgatatatgttgagcctttccagtatcaggtttctcacatctttgtgagggtctgaaatcaacttgaggacttctattaagggcatcacagcttccatctcatcaagttgtttttctgccagagattcatatctgcttttccaagctttcctcaacgtccaagaagggattctagtattctaaactcaaccacctaaaacgaccaagtaaaccacaactattctatcccatcctcagaaatacagttcactactcagacataatcaaagacaataacaaagcaacaattgaaaacatgataacaaaaatgacgaatgacttaaacgaaaactgaatatcaaatacttgaaaacaaaactacaaagtcacaggagaaacactgcggctatcaaagttgcaaaaatgtaaaagcgagataaaaacggataatagcggataatagcccacgccctagggaaaaccctaagaggcagtttatataagcgagaaataaaacaaataaggaaactaaatatatagcgaatcttcacgtcatgatcctgcgaccgaatatgtcattggcatctgacgggcagaaatgagcttcctagtgatcgagtatgtcattgatcaaactgggcttcaggggctccgtcttgcgatcgagtgaaatgtagtgaagtcgagattgaatggtccagcgaccttgtgatcgagtgcgatcgagtggatgtcatgagggtgtgatcgagtggtttcttcggcttctcttctcttctttgttctcagcttgtctggttgagtgcagaatgagcagataggcttcctggtgatagagtggtgatcgagtggttttgatggggtgattcctccggcttcgcgattgagtgaaactaagctgtttgcttctccggggttgcgatagagtgatttgccctggcagggctccgaggctgcgatagagcacttttgctgaaggcgtcattgggcattctgacttcatgttctgtttttcctctgtttgaactccaaaagcatccaaagtacctgaaaacaaccaaatatgccatgcacatgcaatcctaatgcaaaatcgtcctaagtatgtaaaacacactaaaacgactcctaatgagatgaaatgtggatgaaacaatgacaaagtggtgaagagtgaatgcctaaatcatgcaaattatagacatatcaagttaccaaccttaacaagaacatcttaaaggattccttctgggattcgcttggaacgatccgcgaagagaggagtgatgcgagtaggtctgtagttagtcatgcctagtctctcagcaacagacttgggcatgaggttgatgctcgatcccagatcacacaaagagcggctgaatctgcttgtggagatagagcaatcaaggacaaagctaccttgatcttcaagcttcttagtggtttgaccaagagtaatggtgcggatgtactcagctatctctaccccctgtgccttctccttcttggccttaagcagcatgattgcactaatgtctctggtaagcagctttgcttcattgtcaacaactcgcttgacatacttgttgagtgaggcggaagatgtctctgaagcatccttaggaagagtgtggaggatcttttccattatggatgtgcacttagcagcatgaagctcctgcttagaacgacgcctccttggataagggacaggaggagtgtagacagacttgggctgcataggttcttgcacctcacaaggtgcagtcctgatccagtgttgatcggcactagaggggtatcgatcgacactgtcgtattgagtcgtctctgagaagagcgtcctatatggtgttgatcgacacaggagggtgtcgtctccaactcgtcttcagtatccaattcttcccacacatcatctccttctctgatcaagatggcattacaactcttccttgggttagcatcaggattaccaggaagaaaaccctcttgtctcttgatagattgtgtagtttgagcttcctatacatttagcttcttcaagcgagagctcagattgtcgatcttcccattaagatctgtgtagacagcattaaacttgccattaaactctacaacaagctttgtgtggctttccaaaatctgctcaagcatcgattccattcttgtctctaatgagggtggaggggggggggggaggcttggtaagttgaattaccatagttcctcagaaagttgctttgaggaaaagtcttttggaaagcaggctttggagtgtagttggagtaaccctggttccctttaaacctgttgccactgaagttgccctgtggctgcccaaacttcctgtatccctgaccatctatgtagaagactcgttcctctgactcatgctcaggctcaatagtctcttcctcagctccaaagtggtcatgcttcttccctgtgagcaagttatgaaccgaatccagcttagcattcacctctgccatctaatttcttcaaatagctccagcaatcttcttcctctcaaaatcagcattcttggtactgttgcagcaagcgaggttctctatcaggggtgtagcatcagctgggtaacgtgtgttgaagttaccattactcgctgcatctagagctatctggtatctccaatcaactcctctgaagaaggtacctagaagttgtacctcactgaaaccatgatgtggacaatctcgttggtactccttgaaacgaaccaaagcagccttgaaagcttcagctggaccttgtgtgaaggtagagagcttgtttctcaactcctcagacttagcatcatcgtagaaattgttcaggaaggctatcttgatgcttctccaagtcttgagggaacttgctttaagttgtttcagccaagaagctgcttcccaagcaagtgaataagggaagagcttgcacagtaggtagtcctctgagactccattagccttgatgctcaaaacaagatcttcaaatcgctcgatatgatccattggctgctcatgagataagccatggaaaggatgctggctaactaaagcaaagtaggcaggcttaagcacatagttgttcctttggaatggtgggggtacaatcgctgatcgattagctagaacaggtctggcctgttgaaatccccaagagtacgacgtggttccgcagctggaggaatagctgcaggaatctggtgttggtgtcgatcgacacctctgttgtgtcgttcgacaccgattgtatctgtgtgctgctctcgatggtgtcgatcaacacccagttggtgtcggtcgacaccaagcccagctgcgtctctagcagctaattgcgcattgaggcgcgcctgatcctcattggcgtcctcaggtaggatgagtccatgatcatccaatctctgaccagcctctgatgactctgtcaaccattgctaatttctgagtttttctgttggtgcgttcaagtttttctaagtccagaacagacaagttgataagctccttctgttttgtgctccttgtttgcctaggcatacacctgaaacacagaaaagaagaaaacaaaaaacgcgtgagtaaactcaatgatgattcctaagaaccccggcaacggcaccaaatttgatatggttcaaattacctagaactactctctcaaataagagatcaattgtagtattttaggatcgaattcacggagttcttctttcaaacagtgagttaaatgtcaagattaagctagcagggtatgagtgaaatagtaagaaaatgaaattaagaaaacagcagattgattgggttgtaaacgatttaataaagagctaggaacagggtattctcaggaaactattggttagtagatctaatgaaagctaggttgttatcaaaccattcttaaactcaaactctaattatggaataaccagtgggcgtgccgccaaactccctatatctatagctaatagtgaccggagaagccgagagactatcaacctaaatatgcatttttaacgagttcaattgttcatcttagtaaataggccgattcttattacacacatataaaccagactcatcaatccaatatgtctgagtaatctgcttgttagtaatagggtttctcattaaggattcatatggtttagtagattgccccctttgctaggttatctatagaattcttcatctttgattgttcttaatgctagatctagagtaattaactagatcttaaatccagacaataaatatgcattgagttaaaaagcataaacacagtaaatagagaatgggaaagaagggatctcttcactatatatcgatctgaatgaaactctgaagaacaacgaatgaatagcttatgtctctcacaatagggttttgcaaagaacttgataaaagacttaataaacgaaacttaggtctaaaaacaatatatatagaccctaaaaacgtccagagactaataatgcaaatagggaagtcttctggggcaaacttgagtttctggaaactcgaaagcgtctagggtttttgctgggctgaaactggtgtcgatcgacaccaagagtgtgtcggtcgacactcctcgctgattcctgaaccaaaatcgtccttaacttccttttccttagattttgctccaaaatgtctccttatctccattgttgtcccattgcatagaatacctgaaaagacactaaaaagacccgagaaataacataaagactcaaaatcctatacataaaacatagataaaatcggtgaaaatcgggttatatcactcgcgaccgggtgatacttctctacgtacgattgtgagctcggaagatcgcctctctaacctctaggaactcagaaggaaattttgggctggccttgtagcgatctgcaatatgaagagaaattatgagaacgagttcaaaatcaagatctttcaagtcctatctgtttaagagaagtctaccaggatcctctgcccacatcctcttccttcccgagaacggactctcgtaagattcaagatcagccctaacaaagaagtagaactcctcccagttcttgaaattgctaaccttagggccagggaggaagttatatttggggcgattgtttaccacctagtatccaggcgacctactggttttcatcgttgtcagctcttcaacgttcactcgatagccttccttagcaccaaaagtcaaggcagcgacgaaattacagattgctgctggagtaagttgggagatcgccatacgacggcgagtgaggaaagaaatgattaaggacgggattggaaaccagaggtggcattgcctgaagtaggcctcgtataagcaaacataccccttgggaggactccagggacaatcgtctgcaccaggaatcatgtatatgattgggcgatctccacacccacaagaagaaagcagttcgacgacggattcttcttttgagagagtttcactcgcagtgatctcactgttctagtcgacaaccggatcaagatcaaattcggcggtcttaattggacctcgcca

SEQ ID NO: 195 - DNA, 63586 bp, Arabidopsis thaliana
gagatgattgattaagagaatcctcgttcaaataatttatgttttcaacttagaagattctgtaacattttaatgacaaatttctttggacaaatcttttaataaactctaaggtttggtttttgtttttctttgtttaatagtatagatatctaactcattttttagtttacattttaatcaaaatttgcaatctgaatacattgtgttaaaatcaacaaaatatctacataacttaaatcaaaataacctaataattcgccaatctaaaaacagttataatttgatctaagtttacggaactatagtaatttagtaaacattaaataaaagaaagcataataaaagttaatgtttaacagaaataatgcataggaaatgaaataaaaacataaacaaaatcttaatagtacaacctttaaacataatagaaatgtttttataaaaaacgatggaaaggggtctggtgttgcatcttcagttctcatcaacaacttcacctagctcaggtggctgcatccgttcaaagaattgggttctaaaacagtagaagaaaaaaataaccaagactaaaaattttaaaaatacatttttaaaaatacaataaacaattaaatgataatgaaaatataaacgttcttacgtgatgcgatccatgttaatctctgggtaactttgattgaaaataattcctgaaacaccattatgtgagattagacattgacgacttaaaatattaatgtttttattatatgagttagctatataaattattgataagatgagaagagtcttaaatataccttcatgatcatcaacattccaaaatcgaagcacacagtttgtaggattcataccgaaggtccactgataaccaaggtttagaccaagtttcctccacaattgcacaaacaagtcacaagtatatcctcttgcaacacatatcagagattttcccctaataacaatatcaaaattatttcaccaaaacatctaagttctatgaattaagccaactataaagataacatgatttactatgtttgtgcatttaaatatataaccaaatagatgtcgaactatatagtggaaaatactaaccaagtatttttaatctcaaactcgagaaattgagaaagtgtaggattttctgaagcttgaggaacaaaatccggtcttcttatattcccaactctcacgacaacaccataagcatctacaaaaaaaaacgataacatgaaagatatatatttccaaataaacagacttaatatttttaaaaaatctaaataagaaaattaccatggacaattaaagaattaatagtcttattttcgattatggagaaggcaacaaatcgaaaaaagttacttggaaccaatctacccacatgagacagtttggtagtctgaagaaacttgattctgaacttattatcggctaagggaggttgtctaccgacagatgctctgatcagatgtatgttttccatgaaaaaaaaacctccttcttcgagaactctagggacgtcatatccagggtagaaataaggacaaatggcatcaatcattgtgccctaaaaaaaaaaaaattgacttatgaattaataatagattagatccaatgaatactttttaatttagacttacaatctcgttgcacaagatcattcggtatgacttcccaccctcatgaggaagtgttacccaccaacatagtatcttcacaaaaaccttccacctttttttttttgggaaacttgagagagatatgagatacctttgtaataaccacctctatcatctctcaacgttttttttttttttgaaactaataggttagaagaaagatgtcgaagataaataatggatataaataagggaggaggttaccttgttttcaagttatgtgtcccttgacaattttgaatattacttgtatattaattttataaaataaataaattaaatagaaaaagttaaatgccatgcaaatcttgtcaatcgaatttggaatctcgatggtaagttatagttgtttttatggttactttcgaaatttaatgaattttgtaagaaacaaaatgtgacataagttgtcatatctcttggatgagttgtcaaatcttgttatcaatcttggaaaagatggtaagaaaagatgtgaagaatagatttaattgagaaagcaagtcttataaataaattgaattcaatatagatgttaatatttgtatctactcaattattccacaaaatatgtataagagcacaatatatttataataaactgagatcatatatatatattacattgaacataaattaaattttaactgttatatatgtatcgattatttttaagtcacaaagttaatgatgtcactttgatctatatccaaaaagaaactttaaaatgagtacctaggtttccaaaataaataatattttaatatgaaagaaaggatattgaaagataatgcttttgcagggttttaaaatataaacaaaacaaatatatatttttacttttttgtataagacaatgacattaagttgaaaagaaatgaacttaataataaatgatcctaatgtttccaagaatgatttatctcaaagttttaaatgttttattcttggtacccaaacaacttttatcaaaatgtaaaaagaatcatcaataattatatgtctaaaaaaacaaatcataaggatagtattttaacagaaataaaaaaaaactacaactatacttttatgtaatcgttgcaaaattatataggagtatgtttgtatttttttatgttatacttgtaaactttgttaggagtttaacaaaaagtgaggtagagaaaaatcaaacgggaatacaatacttaaataggttcaataccttagcaaatttgaacaaaaaaacaacttaaaatgataaagtttggagaaaattaaaagaagttcgaaacataatttaaataagaataggagctgcgaggtcaaactcctaattctcttcaatcacttccatctttgggttctctggaagttcatcagaatcttcgaaacggctgtaaaagagaaaaataaaaaattgtattgattaattgatgttatggttaaccaatacaataaaaaaatactaaaattcttacatgtaccttggaatatctatctcagggaaattggttggattgatgtaaattcctgaagatccaaattcactcttcaaaacattctcgcctgttctaaaattttcatttaaaattatataataaaaataacaatcataaataaataggattacaatagaaaaaaaaataactaaccctcaatctcagcaattctccaaaacctcacaatggcaacaatgggctgatagttataagccgctgaactgatacatttcgagaaatttgtaacaaagagttcacagcatcttccaacagcatagcatttcattttctctcccctaaccaatatgataaaacattagactaagcaatacattattaagctaaatttttagacaaaagacacttccattcttcttgttgccactctcttttgttaggttaggaacgcagtaactcgaccacattactaaacatacttaaaaacactacaacttacatattgtccaaaagatcgaatgagacatatcttgattcataatcggtttcaccttggcgacaaacaaatagaaatttcttaatagccgagatatttgacaccacacccattgcatctaagtatagaataatatattaatacaatagttcaaaaataataacataaactactaacaaaaattcattcttaaaatgagaagaacatagattgactaaaaacttatccgtgacataatcccaatcctcaagatatggatacttaaggtcaatggaaaaaataaaatcaaagaagtctcttttcacaagttccggaaaagggtaaacacttgtttcccaaatgaacttgatgtggaaacgaaaggaagaatacctaaccattcctttaggaacaacgacccgaaagtgagagatatgaatccatgtgccaggcttgagaaacggacggaagagattctgatagtttccttgaggaattgttgcatcaacacggttattctgaaaaaattccaaataacccaaagattaagtaatttgtgatgatctgtttcaataataacaaagtaaattgggattaaaagaacaaaacaaagggaaaatacaaaccttgtcatcatgaagaatcatggtcgtaatttcaccatgactgtttggagcatgattccaaattgacaggatcttcacgttaatcttccagttagtcgagttatccctcaaatcggtgagttgtgaacagacatcatatgtatccaaggaagttttttcttgttttgaaagataaagagttaaacctaattgttttaggtttgaggtttttgattttatataattgcgaaaagatacaatgatggaaagttgatgtgtaaaaaggaaacgaatcgtctagaaccaatagaatttcttataggttagaacaataatgatgacatttatttcttagcgtgttactaaaaattgtaattattaaaatgagattctatgaaaaaataggaataggtttgttgtgtttgagttctcatgattaatcatatttaataagactgatgatttagtgtacaaaatatttgctaattctaattttgttgaatatttaacacaaaattagcaaaattgtttatagttcttagtatgattaacattgtaatataaaataatgtgtttcttaataatcaacaattttgttttctcaaaatttgatgttttgagtttttttcttgtttcaaaaagattgatgttatacatcaacatcattactatttttattgttaactaataaaaagaagagagaaatataactaatattatagttaaactaacaaaataataatatttcatgaaaagttgtttttcttaatttgtgtgaatattctacaacataaaatttggtggaacagagggagtataacttaagaaataaaattgtttaacaaaatgacatatcaatgaaataactttattaattccaaaaaaacaaataaaataaagatagtttacagcttaaaaaaagaaaacaacttcgataactttaagcaacgaaataagaaagaagaaaacgatccaagctagagtagtcattgagcatcattccccggagccttcctcagacatggtcatcttagaacacttcttcctacttgtggaagcctgatcatttccatcaacatcatctgaatctttttgttttgatgatagagtagaggttgacgaccaatccacatcagaaagatcaacaccattagtgagcataagagaacccaatataaaaatacaaaaacattttaataagacaaccctaaaatataaatagaaatgattggaattgtttaacgttattagtcaaacatgttcgatcgaaattaaggatgatggatcaacgtatgcatcagagtcttcttgaacgatttcatcagcaatgttaccggtgtagactcgcacaacagtgaatgaatcatatccaccaaatatgttttccctttgaatacacaatagaaactgaaaagtcttccctttcaaaccattgatcacatcaagcaaaacagttggtcttcgatctacataaaaatatagattagtataacatgaacgtagtcattttaatgaaagagtttattttaaaaaaggcaatataactcatcaaatgaaccatcaagcaattaaggggcagtagtaccaagaatttcctttgcatgactatcgaataacatgcatctagcttcaccggttttgtccataatatggaaatgtaaccaaaacctaaaagttagataggattattagcttctaaacaccaaattataattcataatacattcaatataaagatttcacaaagactaacttggctacgacagatttttgcaaaaccattgcatatttcacaccaaaatcttggcttctgaggtagcttgacatcttcaagtttgataacttcctctttgacaaccttcttgttgtgagcacgacaacaaaaatagtaccacggccaatctgtatcaattgccaaaacagtgcaaactgtttttgcacttacccaccttcaaatgaatataaataggaatccacaaactaagttaaaaatatgaaaaatgtaataaaaaggttagtagataaaataaattaatgaatagtacatcagaagatgtgaggacttccttaattgtttgccttggataatcaccatcgtcatccccagtttttggtgcatagagcctcttgtgaaaagatcccgaacttcccaaagttaacccatcggttggtatgctatgtataaagaaaatatattttgtttaatattatctagaagcaaatatatttagtgaaatataaatacaattacctttgcttaaaaagacccaactcagccaatgtgggatcaacgaagacttgtgaaacatcaaaagaattggaaacaatcctactatctgttttataaataaaaggacatgtttttataaataatagtatagatatgtagtaacacataacaatatatttaccattgtagagattgatcttcgcaaatcggattaagcaaacaacaataccatcagttgactcctggcaagcttgctcaacaatcaaagcatacttcccccaaagtgtacatgccaagcggtgtcacttaaatggaaagaataaatttattagtaaaaagtaaataaataataaatatctaaataagaatgaatatgaatatatattgtttgtactgctgatctctcaaatggaaatcgatttttttgtgggtttgttgttagcgttaagatcttggattttagaccgatcgacaacctgacccattacatctgtatagacaaagagaataaatctatgaatatattgactatataaaagataatgcttgtatgttcgaaaataaaatgaaaacttgaatctaaccgtgcaagatattagagttagcggatctagagaggatcacgtcaaacttagcaagtgaaagaaacaaagcatcagaaacggtatcacatggagagatcgtggttttgaaaacaaaaccaatcttgtatttcaagtctgaaatacgatactggccacttgtaggatttagagtgatggtcgtaatgatcttccaaacaccctcagttaagcacctttcaaacttcttgatctgctctcttctcacagcagcatacatcttatcaccctatatgacaaaaataatttaaataataattagtaagggaaaatgatgcttgaacacactataaggctggacaaaatataaagttgaaactataatacgtacagcttcatcaaccaaaataattttgaggaatattgtctccaaacatgaagcaatttaacctgaatacgccaagcgttcttgtaaggcttgagagatttcaaggcagtaaatggaagaggattggcgagcatcatttaaaaaaaaaaattagaaatgaagctgtatgagtctaagatgaatgagtagattgaaatgaggcgtccgatatttataagaataagtagttaggtcaaaaaaatatgcgcaaaagatattattcgtagaatttaagtttattccatatcacaaatccgataattataggaaaatgtttagcattttccgtaaaagtgtgtatgtatataggggatacttgtgaaaaatgtaagatagttgcaaaagacgatcgaaacaaaatattagatgtgctataattatggagaaaatgtaagataattctaaaagaagatccaaacaaaatattatatgtgctataattatggagaaaatgtaagataattccaaaaaaagatccaaacgaaatattgtttcatgcataactatggagaagtggtatatacttcattgttaacgaagatacgcaatatattgaatgaaattaatacgattcgtttcctgaagttcacactgatgaatttatgcatgaaactacaaaatcgtagggcttgtaataaatctattcaatggccaggattaaacggagaatcccattttaaacaaacatgataaaaagaacagcgtgtttttttgggaaatacgaaatcgaaaggttaaaaataattcaattcaatggccaggattagaggcgagtacccgaatttttaaaaccgggtaaaataatcatcgtgttttttaagtgaagccgcgaaatcgaacggataaaaacaattcaattgaatggccaagattataacgtatgacccattagtttaaaacacgggtcaaaaggatccgcatgtttttaagtgaagccgagaaaatcgaacggatacaaacaattcaatcgaatgaccaaaattataacgtatgacccaaaagttaaaaacccgggccaaaaggatccgcgtgtttttaaacgggttatttccatgacattaacattttaaacctatgatttaatgggttttttcagcaaattccaagccaaactcacttaacgtacgtctcaaataatagtgtagatatatatgtaagataatattaattaaaataaaatcgttaactttctaataaaatatcaacccgcagtgtaccgctggtcaatctctaatctaatagtaaagatagtattgttttgagttttgaactaagatttcggccggttaataaccatttctgaacaataatttaatactaaagagagtataattttgatttccaatttactttctggtataattcatcatctatatatatggaatggataggtatataatgaatgataaaaagaacaaaagaggaaaaaggtgagtgttagccccaaattcatgttgccccctcctgggcttaaggattccaaatcaatattgtgtccttatggtccgatctgtagactgatagcaacatgcattgatgtgatcactagccggctttttccatcgtctccattatgtcttctctgagttttttctatttgcacgcataattctactagattaactcacattgtacgtaaaaacaattagtgaaaatatgtgtttagtaatttttaaatgtttaagactattccaaaataatgtattatgaaacaaaacggtaaaatgtatttctggatgacaaattgattagtaaaagatgaacgaaaaaggtgaagtgttttatgcagacataaaatataacaatttgtacaaatccttttcagttgttaaatttgattttaccgattttagacggaatcatactttttatagacacctaatgacgcataaatgttttaaaatgtgttacaatatagatagctaattaatttgtgttactgagtgaggagccaaatggatttcaaaccattacattacaagtatggattggatttaccttcaacaggatgacaaaaatggtgctttaaagtctagtgacttcagagtcgtaatcatttcattaactccattcgctttattgcttatgttgagttaactagattttaacccgcggtatacaatttattttcttaaagttagtatatataaaagtttgcaaattatatttatctataaaatatttttattttgtagtttacaattgttattaagtaatgtcctgccaaacccgtcccgccaacccgtcccgtaaaaaaacctatttattttattaatgttgatcttatttatgatatgtttatgaatcattgtctaaatattttgtaattttgtattaattaattgctatcaaatatctctacggtttgctgcttataatcgaattgttatagtcataaaaaagtaatatcaaaaatgataattttgtagtgtttaaatgatattaaatattttgaaagttttattttaataactaatcgtatagttaatgcagagagattttgggaaggtagttaaatgcaaacatttaattcgaagatttactttctaattatcaaaaaacaattattaaatatcagtggcagccactgtaaataagtcccaacttgaggatttatttcacaaagtggcggcaaaaatgtatatgtagatggactgaaatttaaggatttcaaattatgcatgtatgttcttatcttttttttttaccatgagaccatttgattagatctataatctttttattgtatttttaaatttaaatcatttccaatgaaatatttacatttttgacaaaaaaaaaggggaaaaaaagaaaaacagaaaaaaaataatctaaaatgtcattgggccataagtaacttaagcccaagtataaatgggttcgttggttagtattatgtttagtagaatagggaatcatggttatggttaatttagtccaaaaggtgaaagagacatattgaaaactagcaaatgtttctagatatatttatgtaatgagattagtgaatgcaaagtataaacaccaacaagttcttgtcagctaaattcgtaaattgtttaataacctaactagattttaacccgcggtataccgcgggatgatttattttttaaaagtaatatatattaaaacttgcaaattttatttttataaaatagttatatttttactgtttataattattataagtatttatatatattaattgttattaaaaataataaattaaagatttaacccgtattgaaacagtggattaattatattttactttttattaatgttgattcaaaaacccgtccctccaaattcgtcttgccaaaaagccatttattttattaatattaattttatttatgatatgactctgaattataatctaaacattttagctaataacataggagtgcaccatatttatttaataggggaatgtaccatatgacccgaatgcacttttacccaaatccaccaaaaaagtcttgcaaaactactatagacccgaatgtaccatattttttttgtgctaatttttatgtgattaagatttaattgattttgtatataaaatattaaattgttttacaaacttatttgtttataatttggtaacagatagatatttgaatattcagtatattttgcttcagtttaggaaatctttgatgacctgtctttaaatccaataagccctataattaagagatgaatattgtcgttaaatgattttggtaatcttaatgatgtcattaaaagattttgtttttgattaaatttttctaatagcattgtcatgtaattaattacaaaaattaaggttacatttaaaatgtacttcccaaataatatagtaggatgatacaaagtagtatccaattccaatgaaacacttgcaaacctagctatatataaatcactaacatatacaaaattatttaaagcccacaaaaccctatcgactcatcaacaaactcgaaattgtgctctcatcattctctttggaactttggtcaaacgcaaacaaaattgtgaaacaagattaagatactataagtgacaaagattatctccacccacatgattcacaacatataacaaaagttaataatatagatatatttattagataaagtctgccaaaatagataggtataaaaaataaatataaatatttattgataatctttgaattctaaatagtaatccataccattttaatatttaatttagtcattttatcttaaatcaaattaatatctaaattgatgatattttaattctatagagtaacctccacattttgataaatttaatttagtatattcttttaaaaaccaaatttcaatcttatacatgttattttgcaatatataataactatttatttcatcgtaataaactggattattatgattctacatacttcatattaatggataaatactaaaaattttataccaaaatcatatgtatatcatatcaaatctataacttagtaataatattttttaaaataataaaccaattattaacaaaaatattaaaatacacaaatagtttggaaaacaaaaatttgttaaaatataattttaatatatgtgttaatctcgtaagttaattttagctcatgtcaaactaattttgaatgactaaaattaattaataaaacaaaaaataggttttaagaatagaactctttatttacaatttttcaaaacaaaaatgtagataaaaatattactcaccgtttctcacagatgttaaaaaaaaaatcaatacactcgttcgaaagagagaaaaaaacacagttgggagtgggtttgccgtttgcctattgccaagcccaatttcaaactttacaattgtagatcgatttaaaactgggtcgcgtcttagtgacaacttgatgtgccctaaaagaaaaaggaaaagatcatacaatatatgatttgaaagtctctttagcaatcataagagctctccatctatctacaattaaaactattcgcaataattctatgcagagagaaaagtgtcgttaggtcgtagatcgttgaaggtttacaaaatagaaaaaagtcatatgttatgaatttaataaagataataatgtatcgtccgtgataaaatcgtacatgtaagagttatcataatttgaaatctacttagacatttttggtgaagcttttgtaaaaaatcttttatgtaaatactatttagtttttaatctctacaaaaaatatctaaacaaaatattttaaagtacaaaacttacaactcatcaatcaacattaaatacttacataaatacttttctttattaacatccaatttgtgaataattacaattgagttattgcataaaatatcctccagcaaaatatttgtctaaaaataaatactatttaatttttagtccctataaaatctattctaaaaagatttatattaaattaatatccttcattaaattttatctttattgcactatattcaatcaattgctaatttcttaaactctctttacctacattaaatataaatatataaattcctctttcacttttaattttcttatttctaatttattttgattttatagaaaaatacatatagttaataaatgttagattttttctgcatatcatgtaattcaaatttcaaaaactgatatacattactcaatcgatgaagaaaacaaaatatgtgtaaaaggtctcatattgtttaaaaaactagacaatggttcaaagtcatactataaaaaggatcaaaatgattcttaatacgaatgagcaggaagcttgatttatcaggtatccaaaactaataatgttaaccggtttactccggtatttttaattttaaggattgaaactttaaaaagttttaaaatattagaaatacttaactttttaaaagttaagctttataaaacgttttaaatatataattttaaaactttaatgaagatttaaatattataaatatttgaactttataagaagtttaaatattataaaattaaacattataaatacttaaaaaagatattaatatgggacgatataccacataaaaattctagatataacaatcaaatgaagttttgatcgaaataatttttttttgaagttctattattataaatatttgaagtttataaaactatgacaaaatgatgtttaatttcataggatggggttatatggtatgacggatttgggtcgatattaatatgggatgatattctacaggtgaaatcttcgatataacaatcaatatacaattataaagtttagatcaatattaatttttttttgaagtttcaaatatttatagtatttgaattttataagaaaataataaaatgatgattaatttcattggacatggttacatgggacatgtctggatcgccattattatataatggtatactatgggtgaaaccctagaattaactatcaaaatataattatacaattgtaaacactaaacaaaataaataatattaacacaacaagtacaatttaaaattaaatataacttttagttataaaaatcgtcacaaggtgtatcatacattaaaaaaaaatagcctatatatataaatcattttaaagacaaaaaatcaattttttatttaataaaattatagacctaaaatgtatcttttgaatatgttattcatatataaataatattaattaaaaaaattaactttttaaagaaattatcaatatctagtaaataataaattcatatgttaaaaaaaaatcaatacactcgtgcgagaggaaaaaaaggacaattggaattgccgtttgactattgccaagcccaattctaaacttatacagatttattcccaacaatgggccgagtattagtgacaatttgacgtttcctaaaagcttatagtgattcgattttaataaagaaaagactatatatgatttgtaagagaatctccaatggttacaaccccatgatgggttctctgcattttataagaataaaattagcttttttcaatcttaaaaacttgcataagagctctgaagttttttgtcctccaatggttaaaaccactaatggggttctctaagaaaaaaattcaaattttgtaaaacaatacatacatcctttttgtttggttacaatacatggttttacaaaacatattcacaaaaagaaacaactcttggttgcacatgtttacttttactcgctataatacatttccaattattattaatcaagagagtactagaatatgaattaactatgctttggttccgacaagacagtgaaacaagaatgacatttgcacaagacctttggttctgcctccttgatctcatctcctgcttcgtcctattgaccaaagagttataatcatgtcaattacagaacttagtgaacaatgatcaatgtatattgtgttgatgcttacagtcatatctgaagtccagaaagtgagattgtctctaagaatcttcataatcagggtactgtccttgtataattcatcacccaatgcatccaactcagcgatagcacattggcattgtccaacatacaagaacaaagatcttgcaacgacaacatttagtttaagcaattaatgaataaaagcagcacaaagaacataattactagtaacgtcttcaggtgacaaaatatgtaccatcatcagagcctccggttgcaggccgtaaacaatcctagtggcaaagtaacaacacatggttatgggatctcagaagcttctttgattctcatagcaccaatcacaaggagagtcaaaccaacgactcttgtaccccaagtccttataacttcagtgtgaagcctatttcaatttcaaggtatagagcagtggataatctcaaggtaaactacacagaaaaaactacaattcacatagatagttcgaacaattactacaaacttgatatttacgatgtttcaacaattacttgatcatgaaaccatagactactagtaatgaatccaatggttcttgaaacaactgaaacctataaacattgatgcttcttcaaaaaccaccaatccagtaacttaaaccaaaaatagtcgcaaacatcgatataaacaatacactgacgctaatccagaagattcatagtcgtgaattaccttaatactctgattcaatcttcgagatgtatccggcgatggattctggcggaagaagcatgaaagggagctgtctcggcgtgactggagacggcgaaaggaggtaaagctaagacccaatttctcattaagcccatcttcattaaaaacaagacctaaacgtgagaagtgtgtacgtatgtatataatgtcttcttcctctcgccgcttatgttacgagcacgcaatgttaaccttatcaaaatcatagaaatttgatctcaactctcaagtcaccatcatcctccactatcgagttcaccatcgttgtagtttgtggttgtggtcccgatcgtgttaagtggtgacgtgaagttatcgtcacgtaacatccaaccctaatcatcaccatctgagccactattagccttcttcgtcctccttcttcaccggaatctagatctatcattggtgctttgtttgggtctgtgataccgaatcctctacttcttcgttgcagagtgagataacggtgaaaccttattctcgtattcatgttaaggtgttgtgttgtttaattattgaaccaacctaaaccaagggattacgtatagttacggccatgaattgaaacttgattattaaggaaccttttgagttgatcggttatggcgtcagttgggttgtgttagtgaagaagacgatatagtcagttattggcttattagaaagcgttgggttaattgtcaaaccagaagtagcattgacatgtacgtgatttgaattgtggcgttggtttaattattaaaccggggagtatttggtcacgtaaatggatgtggcgtagtcaattacgtgttaagcaactaatattaaattattagacttggtttagttattagattaaataacaaattattaagggaatataatcttgattgattaatctaaattgttgtagtttgagatcgttgttgagccggatccattgttgctagtcctatttcttaaaatccaaccgagttgccaaggtgagggtaggatctgtggaaacatagtatcacctttacttttgtatttctgaatttcatttgtataagattagacattgggtgctgattgttaaaatgttaggattatatattaaatattgttgattcagtaatcaaacaatgaatttgtactaagggatttagacaaattcactcctctcttagctcacaaataatcaaaggaaaagaactaggttgcttaaacaaaaagctagggtttgctctgtaatagtagtctcttgtattaggttaaagatgatctcaatggggggtttgacccctctatttatacaataggtcgaatataccaaaatatgataaacttctaattatcttaggtttaaatcttcattacttctattcttcatgagatcctcttctcttaaatggaagttttccctttacacgacctaagaagttggttatggcgatcttgattgtcgacttaagtcttcgggcgatctcatgacttaggcccattaacaggctaaccgggataccccggttcaatcgaattctcgattttattcacattattcctcggtttaaattagtattgtcggaggtgctaattcctgcaccaacaaatattataatacgtgttgtgtgatattatgcgataggttgttagcgtgatatgcatattgatttttgaatactcttttgtcgttttcttgtactatatatttatctgttttgtgttaccatgttgagtaatttctctaatcattcttttgtttgtttgttaaggtttagcgaggcggttcttggtcaaagcctatacatacatctccccgttaggacgcataacttaatggagggaaatactaactggaagcctaatgaacaaggcggaaaccgtgatgctgcgaataatcgtattgattggagatcacaacatgagcctgaattacggcaaaaggttctttcaaaaatgtaagccattctttcaagagtttcatgtttcttttgttggactcattgttcttatttgattattaacattcatgaaagagagtaaggttttcttggtcatgctttcgatgtgatatttgtagtttgcgcatgataaagattgcaacagttaaagcataagagttgtgcataaatgtttatcatagttgacaaaacctaacttcaaccttttgtactttaagttttgcatattcttttaacctcattacctgcatttaggctcttcctcactaggagaatcttgttttactctcgcttctatgtacaattgcttggcacatatgtataattgtttcagtgtttgttcgctaaacgattatcgtaagttcgaatattaactacggattattttctctgttttgtatttttagtgcaattaaaatggtatcacttcctcttgaatatcagttataaccaaattcttcatagtcactgatattttgttctcatgtatgtgtagagttgaaaagttcaaggaaaagtttcatgcacatgaagaatataagattaacgacatcgcttccaaatttgaagaaaatttttatagcatagcaaccgataaggtgttaaactacaaattgtttctccatctattaacttcagaatctgaatttgatatcttactcattgtccccttgctatgtttcagaatgattaccttaggaaactcagtgaaacactgcattatatacagagaacttacactagagttctaggtaataagtttttggtttcataattatactattttagcttaataacaaagaaatcactaactaactttttttttctatgtgtttatctaaacatcagcttctcaagtagttgtgaatcaagctcaatctcttcccgccttgttgccatatatgcagactacaacgagccaacaatggttacagcaaaacacacagagcaatctctgtgtcatctgctttgccaagtcaggtccctataaccgttcccggttctcaaagacagatacatggtaggcaacaacttcttcctcagcagcaacagcctcaaatgaatcaaatccgccatggtaatttacgaccttcgcacatgcaacaacaagctcggtcaccgcagccgcaacatcatccgcaaagtttgttgaaacaacctattcaacagccttttcctcaatcaagctaacaaaacactcaatcactgaccagaaatcagttttcgatacaacgggtcagttttagtcatcaacaacagatggttctgccgtctcaagaacagaaacgacaagaacaagagcaactcattaatcaactgacgaatcttccaacatcacgaccaaacaatagagaccaacaaggagcttttcaggtatcctcgtctcagcagaacaataatgttaccttacatgcaatgtctcaacagaagaataacctccaaagtatgactagaggtcaacaagtaggacaatctcaaccaatgatgtcacaacaataccgacaacaataccccatgcagcaggatcctcagaacagaaacttacagaaacatttggattttgtacaaaacaataccaatcaatttcaagcagcaagttcgttgcgccaaacacaaaacataacagatcaacagaaccagccacaacaattagagagagcaaatccatctagtatgtttcctctcttactaactcttgtgataatgtttttagttctaataatgaatatcattgtagcatctcaagattctacgggaaagacggtaaatgtcaatgccggaaactggcaggaggagacctatcagaaggtatcttcacttgctttgctcttcacttcttaacatcacaattagggtttgattttgttttcaattgattcccattctgatatgtcctgcagataaaaaaactgaaagagatgtgtttacctgttctcagtttaatgcaccaaagagttgcggaaaaattgcgggaggtactttattttataacctaattgttttgcttgtggaacaagaatttgttctaatggttttcttaatcatttttttttctaaaactttgtgttgtttttggtttaataaacctaatgtttccagactgaatctcttccgccgcaaccgatgcaagctcagtggattgaaaagctaaaggcgggaaaattgtcaatggaacaccttatgtttttcttaaatgttcataggagcagtgtatcagagaaacatagagacaagtttagtcaatatgagtaccacatattgaaatttaccaagagtcagaccatggttttgaggccaacgcagcaacaacaaggacaatttcctccttctcaaacagcaatgcaaacccaaagtcctcaagtccatgtgtcacagtctctttataaggagcaaaggagatcacggttgatgccaagtagccaaaatgaggcctcgtctttgttgcaaataaggcctaagttggatccaagagacgagaacatcattatggcttcctcaggaaatgtcatgttaccttctgttaaacaaaatcctcgggccgtaaacacaaatatcagttcggttcagtcgttgcagaagcagaagcgattccatcaccgacaaatgcaacaacaacaaccacaacaagggaatcatcaacatcaaatgcagacaaatgagatgaatgatgtgaggatgagggagagggtcaacattaaagccaggttgcttgagcaacaagtctcatcgagtcagcgccaggttccaaagcaagagtctaacgtttcatcctctcagatacagaaccactcttctcctcagttagttgaccagcatattcttcctgcgacgattaacaaaaccggaaccccattgaactctagtggttcggcttttgttgctccagctccatctccagttcctggagattctgaaatgcctatatctgttgagtctccagtttctggtgttgatgaaataaactcaactttagattcttctagtaaacttggcacacaagaaactcctctgttatttgttcctccgcccgagccaatcacagagcggcctattgatcgacttataaaagcggtaagtaaactctatagcttatctaagtttactttctttaccttctcctatttactgacctaatttttaatgtgtgtggctttctagtttcaagcagcatcaccaaaatcattggcagaatctgtaagtgagattagctcggtgattagtatggttgacatgattggaggatcgttcccttctagtggaggatctagagctggtttaggcgaggatttgagtgagaggacaagaaactttaccacacacgaagaaacaaatctgtctaagagaatgaagcgatcaatcaacattgtgccgccagatatgtcatcacaaattgatagttatgaacagttgagtagccttgaatctgaagttgtttccacaacatcatctggcttgaaagttaacaatattgcggtaaaatctactctattggtatcgaactacgaaaacaaatgaaacatcgaaataaatccattttttcaatcttgtagcctggttatgcccttttgcaagaaatcaaagaaacaaatgggagacttgtagagacagtggtagagatatgtgatgaagattctttaggaacaatcgtcacttgtacttatgctcctgtggctctcagtgccacattcaaagatcattacaagtctggaaaaattgtaagttacttcaaacttcttctttttcctcactctgctcagattttttatgtctctaaatgtttgatgcaggcacagattcaacctttacgcttactatttcctatggattatccgtatagttctccgatagttctcgaggaaatctcctttgacactaggtatgaatctttcttagaaatcaagtaacaacgattggagtaaatatatatgatcttaaggatttatatctgcatgtttcagtgtacacaagtatgaggatctatccgcgagaaccagatcaaggttcagtttgtccatgaaggaattttcagaaccagggttttcgaaaggaatagctcaaacgtggaatgattgtgcgagagcgacaatggttgagtacgcagagagacatggtggaggcactttcagctccaagtatggtgcttgggaaacggttctaagagcttcatgaggactaatacttcctttctcactcaccgtacaagatagtttttaggtgggaagccttatagcccaagttaggtttttttttatttcctttgagatagaagtaacatttatttgtatggtgtggctcatgtcttcttattgtatatattttaacaagaaattataattgtttcaaaaccgatagtataataaattatcttgaaatatttaggcacaaagccttttttttaaaaaagattttaaagtattttattgttttttcttattacatgtttcatttatagagcccaaaaggttggaatataagttttaaaaaaggattacagaaaatgaagccaagcctataaaactaaatcatccttagtaatttaaacatccactcataaagattttgctgatgaaacgtgttgatgaagtgttttgccctatgacacgggccgagacgtcaagcaccgctgttgaattcgcgggaaaccgctagaattcaccaaaatgttgagaatcgtctttccttctgtcgatctcgaacccatgtccaaaaatcgtcgatattctttcggatcaagtgatggaagtcgcttaaaaattcttcaagtatcattatcgtcggggaagctccacctctgacgacacccatattgatgtggccggatctttgttcatgtgtgtgcataaagaagtggtatagatattactcgtcgaactaattggtgggaacatagaggatttgtgaagaaaccaaagacatcaacaatcaccaatagatggagatctaaactcgcaaggcaagagagaacttgataaaagtggtatcaaaagtcttgtccgaaatcaaaattattgatatcgtcgaagcaaaatttataaacctaattaaacagaaaaaaaaaaaaactgaaattaatatccgatttggattagagcatgatcgtttctaaagaaacgagaagggtaagagaaaaaaaaaagaaaaaaaaaaaaagctctcgaaagtatcctattgatttacatgacatgataagagatttataaagcaaaataaaaagctatagcctcaaaattgaaacaatcatgctgtagattcctatttttttttctcgcatcccaaataatagcacaactttatagtctttagaaggtctgtacattttttctctttttctaaaaaaagttttatatctatttctccatgaatcaaaagatctctatctaaactccctgaattgatacttcaacatttattaacccatatttttgggtttattcggttaactatactgttaaccatttataaccagagaaaaccatacatcaacgaaagaagaaaacaaaaatactctagcgagatttctctcttaggcactcttcccgagtgaccccaaagcagtaaagagtttttgaaaaaccagatctcacccacttttacttcctatacaaggcaattttacaactccggtgacctttctttgctctttctcgccgaggaaacttctcttaccatgccaccaggcatgggcggttggactatcaactcaacatgactccagaggactcaaacctcacttcggccctcccgctagagcatgtttctcaaccttgaagctctggaagaagactccaacaaccgtattctctcttctcacggtatggttaaaccttctgtccagcttctaacaatatcttaacctcgttgaactctcttggaaccttttttagcatttgaaccagcctgtatgtcatgctctatggcttagcagcatacagttctcttactggggaagataactctcacctctaagtgaagaaccctctcgaaactttttaaaaactctgaagaaccgtctcccatcatctctcccaagtcattctgcccaagtctcatcatggccttaaggcactcttactctgcaaaaggtaaagacatcctagagagtcctccttctcagacagagacattagacagtcctcttataacaatgaaaaggaaagatttcgagagtacatacctcatcccagaagtcgcccctctacaccatctcttagtgagcaagactcttcaaagcagtttatgccccctgctccaagacgtatcaaagccctactctggacaactcagaccttatccaggaaaactctctaaccctaattggacgactcacaaatccttctatccaaaggctatggtccctcatcccctttctctccaacagatggaacctgaaaggcaaggcaattggctcagacctaggaaaagatggcttccaattcaggtttgaccacgaagaagatctacaaaaggttctaaacaagagaccttaccattttgattactgggagcctatcatatttgcctcattcccgtctcagatccccttttagattgaaatacaaggacttcctctacattactggaagccgaaaatgttgacagacatcgcagaggacattggagacctcctggaccatgaacttaccccctctgcagcaagaatccaagttatgataaacgggctacaacctattactaaagaaaccattgtggagttctctgaccgcagcgaagtcctagtcaccttggactacaaaagactgaagtctcactgtaaacactatctcaggcttactcatgcggagaaaaactgtccgggactagcccttattaaagggtctccaagggaccaagggataccctccgcctcaaagagcaaatctatccaaagctcctccaacaaaacgcaacaaaaagaaacccgagactctgtaaaatcccattaccacccctactctagacacagaagctctcaccctgagaatttcaatgatagaaggaaagagtacagtaatgattcctggaaaccatctacaaataagcggtctccgcgtcgacaatctccaccaagagatcagaactcatacagaggagattccaacaggtccttgagatcccctgttcgccatcctgctagaacctctagagatcatcttacctcatctcttcagtggtgggaaaaatcaccacccaaggagcatcgtcctcctgcttctccgcaatcttcaaggagtagaagaccaccacttgagagaagcgtcgatgaacccttacttccaacacctatccccatcatactttcaaatgaggaggtcatgggagaactatgtgaagtgaccctatagtacactagttgtgcagaccccacagagagtgcaacaaggagatgacgagttctgcaaggggaagctaaaggcctaatggcagctactgctgcatctattattaactctgcaacacaagcccaactccaagctgaatctggggcggctctgcttcagtcttcaagacaatctctatcaccttacttaccaatactagatccaaatgcggctgctgcactagtaaagaagaaaagaggaagacctccacttatcagaccttcgaccaagccaggaaataaaagaccgataaggcttgcagggacaaaatcatcaaaaaggcaacttattaccattcaaaattcaccaagaagaagaattctccagagctcatcaaatcttggtgaagaagagttaaataacggtgtcaacaaaacttttggtcataaaaagaaaaatactccaaggccgactaatggggcatcgacaagcagagctcttcctaaacaaaagatcataccagcaatagtgaaagagagggtggattttcataaaccaccccctcctcttccttaaaagttgcaagttggaactgttgtgggctggggaatcccatgacagtccaaagactgcgtgtgatacaaaaaagtatctcaccttatgttttattcctcatgaagacgaaaaatccggatgatattgtcactaagaagcttcagtggatggactacactaaccacagattcatctctcctcacagtcctggtggtggaggactcgctctctactggaaacaacatgtagaattggaaattttaaactcttgtcaaaactatcttgatacatctattaaatctgaagaaaaaatggtttttgctacttttctttatggagaacgagacagaactaaaagaaaacttatctgggcacaactgacagctataggaacagcaagagaggttccatggtttctcagtggtgacttcaatgatatcattgactccactgaaaagactggtggcccaactagacctgaagcttggacctgcgattgacctgcgctccttcatgttagagtgtgatctttatgatctccaacattcggataaccccctgtcatggcgaggcaaaagacatgagaacctaatccattgtcgattagatagagctgtctctaatggggcatggacagaagtttacccatcagggagatgtgagtacctcaactttgaaggctcagacgacagacctctcatcacttcttttgacctgaaaagtaaaaagaaaagggtatctttagatatgacagaagactgaaagaggatctagaagtcaaacagttggtgaaagaagcttggacctgcgatttagcagacatagtaagtgaaaagatctctcgaacaaggcgaagtatcatttcctggtccatagaaaagctcaaaaacagccaaataaccatagagaaaactcgaaaagctcttgagatagcaatgtcaagctccttaccttgcattgaactcatctttacactcaataccaagctactcttagcctaccaagatgaagagggtttctagaaacaaccaagcagacaactttggttagccttaggagataaaaatacaggctactttcatgctatcaccagaggcaggaaaactgttaacaaatttgaagttatagaagataaaaatggcgactcacagtttgatgaagggaatattcttgaagtgatctctgaatactttcaagaccttttcacatctcagagtagtgagagagcttcaatcgtatttgaagccatcagcccttgtagattatattttgacattataatggactaaatagaatagattataatcgcatgttcctttcttttgatgcaaataaagggtacttgtcattcatcttttcccatgtaacagaatctacaggatggcaaagtttgccatcactagacttgttactgaaatgccatcttaagtcctttgccatttcctctgttctaaacattctcttcaaccgcgagattattggaaagtaccataatactttttgtggcacacctttcttgacttcacccgtctgcatattaatctttcaccttgaagcattgcatttgggacaattttccagcttcttgtacttcttcagaaaagacagcagtcatttacacacgcatgtatcttttgatatcacatatcaaagctcttcaaaaacttcttcacattatacaatgatgtgtgaagcacattgtccttgggaaacattttgggcagcgtctcaagaagctcatcaaagctcttgtcagaccatccattcttggtcttaagcctaaagagagacacaattgctggtagcttgctgtggtttaaacaatcaggatataaaggggtttctgcatctgctaccttggctaggaactcatcttctctcttgtcctcaccctctacaatctcacctaagttagccactagattgtcacctacatcaccattagtagccaagtcttggtcattgtattcaaatgtggattcaaatgttaaatcgattaagagaaatctatatcacaaaacaagatctttgtgaagagaatgtggattcaaatgttaaacagacatgataatcgcagaagttatttctttaccctaaatttcaaacaaatcgaagaaccctaatttcaaactaatcgaagaaccctaatttcaaaatgaaaaacaaatccgattttccttaccaatctactgaactagatcaaaattagagacaatcttacccaaaaattcaatagaaatagaagttatataaacgaagaaagacatgcctcggttttaactcattgacagccgctgcgtatgaggattaggctacggcggagtacaaatcagatcttaatacgactttgaggtttgagaatgagcttcgaggttagagatttgagcttaattggtgataaatctgagtttgtcggaatttgttttttgagagaatggtttggttttgattactgtatcgcgctaagtgttttgggctaagtgactgaagagggaaatgaattactgttctcgcgctaagtgtttttttggctaagtgttggcggataaagtcattttagattcccgctcattaaattcctatcatagtgtttattaacccatattataaagaaaccccaaaaaaaaaccctaccatagcaggaacagaaaatgagctatcctatagtgctatcaatgttgatatttattgtagtggtaccaaatgctcatataatctataatatacatcatacaaattttctatatcttttcttgagttgaaataatgcttggaaaactaatactatcaaacaaatgcaataaatcataatagcgacgagataatcatataaaccatcaaatttagttctaggatcaaaaacagatgcaagcaaattaagaggtggaacttttctatagtattttaacaatttatctctcatactagttatgcatgatgacaaaacagtattattttcatgttcatgcatcacatcagcaatattaacaaattcatacaaaagtaaatgactagtaggagataccgtggttggaaaaaaggacaatcgttcctctctcttctctctcttcttaacctatttttcggatctagggtttttccatggccgcctctgtaaggagcttcatcgacgaaggttgggttagcggctgacacgggagtgggcgcctttcttctccggtggtgtgtggtgtggtggatctatggtttcaatgcgaattggtggctctcctcacagcagccatgagatgatgttcctccttgtctgctggtcatggacgctagcggattggaatggattctttaggctcgacagcttgtgagctgtagctccggtgagcggcagaagtcggactgtagatcggtgggtttcacctctttgcgacgagattaacagtggatctttggtcggatcctagatggcgagctgcgggtgttccttagctggatcttggtggatgatggcttgcctgagccagagaccgtcttctccgccgtagctagttttcccttagccggatctgaagtgaggtttgctttgggagaggtccttgggtgagcatcagtggagatgggggtaagtttcgaatccttcgtcttgctaggttggggagaggagggattgggtctcggttgtggcggttctcccttttccgaaaggattgttccaggttaggcttgttcttggcgttgatttgcggcggggttcgctagctcaagccaaaagtttgatgtcgaggtcgtagccacataggagtcgtccttgctagcgtcggttctagaaggcgatgttcgtgtttccggtgtaccgcacggttctgatcttgttttcgctgggtttgttttgggcttctttcattttgtaaccgtgtatttgtcgtttggcccatcttccataagcccatttgggattcttaataaaaaaaaaatgactagtaggataataaacaccggataataaaaatgttgagtgggccattaagctaaagaactgcgattttgttgaataaaactacacaataaatgtttataaccaatagaatcaacaagcatataatatgttgaattccactgagtaggaacatctcgagaaaactgtttgggggatatgttatgcattttacaaaatcaaaccattttttcattaattgtggatgaccccataaataattcaacgtagttttaattggtgaaataagattattttgagaaaccaataaaccatcttgaacacataaatttaaaacatgacaaatgcatcgaacatgaaaatgttttccacctaaaataagactataattatttattaattcatcaatggaagcaatattagcggatgcattatcaaacaaaatagaaaatcttttgtttgttaaattatatttttctataattatttttattaatttaaaggcatgtctcaaatataggatataattactagaatgtctcaaaaataggttatatcctttatctgggtttaactagtaattttctattattctctttgataggaataaaaataaagttagtattaccctttaattttttttaaaacatttttgtaaaaaattgtttgttttttttttttttggaaaaatctgctgcttagttgtgacaagtttatttttctgtaacagatttatttgtctatgacagattttttgcgacattaaatctgtgaaaaaatataaatctgtcgcaaaaaaaatctgctatcattatataaatttaaatatagttacgacaaatatttaatttgtaaaaggctttattatgaggatagacttttttacgatgacaccatacactttttgtaaatttgacagagtttttaacaatttggcacatttaatttgttttagtggcatcagacttatatttttaaaaactaatctgccataaagtaacatattttatgatgaaaatataagggtttgttacactatgaggcactttcggagaaacttaatgcacttaatacactttaaaaactagaggcactttgccttgcttttggagtgaaataagacatatatacccccacgatttcgtttgagatatcattgcaaaccgggttatggtttcgtttggtattggtttaaaatatacggttataatgtgcggtttagaaaaaacagtttgtgcgtgacgacgatcgtcggatttcaatagattaaacggccgagattaaacattgtaacttcccttgctttgcgagttaaaaaaaaaactgaaacacgagatcaattcaaacacataagattctgggtttcaatcatcgatctttggtcaactgtcgtgtccaaggagctacgattgttgaaaactgatatcatgaaattaaaacgaaaatccgtgcattctatttgttatgggtatcagaatataaccaaatctttttttcgtttatatgtacagggatcgatggacgactatatcatggttatatgtggagagtggttttgttcttcgactggagagtggaaattggagatatgtaaccaacttttctcaagggttgtaccaattcatgagggaataacattggttgcgttgaacgaagcaattctacaggagtttggcgtcaagggtttaaatcctctgttaagttactctgtaccgaataagaacatgtttgcaacaaaggataagactccaccggttctggttacaagcgagattggacttcaatactatctaaagacccttagagaaaacatgggtctaaacttgtttgtgaagtttgaagagaaggttgatacaccaaatttgagttgtgaaacaccaggaggtagtgcaaaacggaaagttgaaagtttgtatgatacagctagtggttcgagaaatgctgacacatgttctggggatatatctcctaatgtcctggtgacccctgtagatgacgaattcatggatgcattacacgatgtagaagaaaaaatagcaagaagcggtggactgaaatctaacgaagatgtaattgttgatgatgaagatgacatcttcgtggatgacttatgtgtggacagcaaaacagaggaaaccgaagacgggatagatatttctgatgacactatgccctgtggcggatatgaaaaagagttctggggtaatttcttgtcggatgattatggtggctcaaatgctgaagagttgatgtctaagggtggagtagatgcaaggtacaagggaaaaaataataaagacgtgagttttgagggtttaaatgataaggtaggcaccagtgaggataaagttgttcagtgcacatgtagtggtgtctttgaccacgctgtgtttgtgagtggtggaggttcaggtgtaaacgcagagaaggtaaaaacggaatgggctgcgaaaactaaggttggttgtaaagctgggagctctcacggattgagaggtggtgcaaggaagttggaggaaattgatgatgaggagtttgatatcccaccattatttgaagacatcgagtatgaggtagagaacataccggatttggatatagaagatgatggcaaagggatatacaaggggaaagtgtatgcaagaaaagaagattgccaaatcggtttggctatatatgcgatcaagaacatatttcatttcaagcaaacaagaacaaagtggaattatttctttcttagttgttcagatgcgaaatgtgattggagaattttggcgacactcatgaaaggtaccggctactatgaaattaagaaagcaagtctggatcacacatgttcgttagatactagaggacagttcatgcagaaggcaacatcaaaagttattgcatccgtctttaaggctaagtacagtgatcctacgtccggtcctgtcccgatggatctacaacaactagttctagaagatttgagagtctctgagtcatacagcaagtgttggagagctagggaatcagctttaactagtgttgcgggtagtgacgaagaatcatactgctatctggctgaatacttgcatttactgaagctaactaatactggaacaataacacatatagaaaccaaaagagatgttgaagatgagagcaaagagaggtttttgtatatgttgttagcttttggggcctcgatagcaggatttaagcatctgagaaggatattggttgttgatggaacacatttgaaaggaaagtacaaaggggtcttactaacagcgagtggtcaggatgcaaacttccaagtctatccacttggatttgttgttgtggacagtgagaatgacgagtcttggacttggttctttacgaagttggaccggatcattgcagacagtagaactctgactatattatcagatagacactcattaatccttgttgttgttaagagagtttttccgcaagcaaatcatggggcttacattattcacctttgtaggaatgtccaagctaagtacaagaacacagctttgacgcagttagtaaaaaatgcaggatatgcgtttaccggaacaaagtttaaagagctttatggtcagattgaatccacgaaccaaaattgcggtaagtatctacatgatatagggatggctaattggataaggcattatttcaggggacagtgtttcaatctgatgactagcaatttagcggagacgttaaacaaggcgttaaacaaaggtcgatcgtcacatattgtggagttgataagatttatcaggtctatgttaactagatgatttaatgcgcgtcggaagaagtctctcgaacataaaggtcccgttcctccggaagttgacaagcaaataacaaaaaccatgttaacaactaatgggagcaaggttgggaggatcaccaactcgagatacgagataaatggcatgttaggtggaagaaatgttgttgatcttgagaagaagcaatgtacttgcaagaggtatgttaaactcaagatcccttgcactcatgctttggtggctgcgaatagttttaaaatttcgtacaaggctttagttgatgactgtttcatgtcccacgcatgggtttcgagttaccgggaagcagtattccctgaagctattggaagagacgacgaaataccagaagagcttgaacaccgatcgatgttgccaccatatacaaggagaccatcagggaggccaaaggtagccagaattccatcaacaggagaatacaaggtaaggaaatttgttagctaaagtagtactttctacttgattgttaaaacctaatgcataatgtggtttgtacatggtaaatgtagaaacctaagactggaaggacgcagcagaaccggtgctcgaggtgcaaaggcactggtcataacaggacaagttgtacaaatccaatttgaacaagttgttacggtggatgactttgagattgctatttaggatattaattgtttttcttttgtaatgtaatgcgtaagtgtaaaacatataaatatttattgagtattggatgctaattaggtttttcatttatactgcttatgttacaccagggactcgcaagaatgtcgcagaaaaagtacaagtagatgaaaatcaaatatttctgttttctatctaaatatagttaaccatcagatcgtatccaatcgtttgattaaaatagatctatttgtaaaattagttcgacttacatgcttcaatattgaaagatacctctatcagttatatgttgaaaatttaattattgtgagcaaattattttcatatcagctgagatttaaaaaatggaattagaacctatcacccatgtaaacaaacatctttttcccatattcctttataaaacttatgcaattgccaaatttctgctaaaaaaatcgtaatgtaaaagtgcatgtaaggttagaagtttgttggttttgaataaaaaatatggacatttagtgaattggataataaagaatagagaatatcgactaatacatgtgatttcattttatatagcttagtttttaataataaaaaaacctttaaaaatttggtaatgaaatggatgtctctgaatatttacatgtagatagggaatgaatatttatatgtctatccacacaccccagaccaatcagatataaccaatcgttagtatttttgaaattagtatagtcggaaaattttgctatgcatgctccaaaatcaaaagagtccctataagtcatgataaacgagaaagatgttcactagtttatacgttaaatacaagagagaaatacaacttcataataagattacattaataaactagataaaagaggaaaacaaaagagaaagttatattctgaaagtgagtaaacgaagtttttaaataaactagaaaagcaaaaggatgtctctgaagaggaagaagtagatgcaatgtgaacatctctcaccattatattcgttgtaaaattaatggatgagccaacagtctggataatcctaataataaaagagctcagcgtaagatccgaatcgttttggatccgaatcagaaatgtggccaattagtgtcttggccatgatatctacatcggtaaaacacttgttctctcgtttgaaagtattaaaagcgtctaatacttcattacctgcgcagcggtttagagcaatgtaaagaagtttggctataggaatgacatctttacaatcattcaataatgaaatggcgcctatcaggtcgagagaacagaaccctagcctcaagctctggagatacatagcataagggttttgttttgcaagacattttgagtagaatgagaagtgaacagagtcgggcaaagacatgttgatgaagtcagggcttttatctaaacgaactcgggatagtgtctcgacagagaaagctgcagatttcccttcatgaccagatttaatccagtttttcagagcctcaattccttcttctgaaacgtggctaacaattagtgcgagaattggttccggaatgtataatcttgcaatcttcctctattgacaacgcagacgaaaagttagagaagttacatatactttgtggaatgaatgaacactacattgtttaaaataatgaaaaatttaacctgtgtgttgataggttgtgtgatagagtgtagacatttggatgatgtactcattttgtcaatctgttgcgaataacgaaagagtaagatgtgatggagagagaagttttagtactgagcaaaacagtttacaaatgagtaataaaaacagagttattaattggaagtttctcttaatagcttacaatcgtgagggatgaagcttagtgaggagtacaggttcagttttatattaactcgaaatataaaagctaacacttgaattccattaaagcaaattcatatacaaaaatgcaagtcatagttctgaaacaactctaatcatttgtataataattgttacaccttatagttgaagacttgaacaatatataaataaagttagacaaatatgcaaaacaaactaatacataaaatcaagaataaaaacttagattcaaatattttttctgcaatcgagaagaacgataagatgaacataaatgaaattggtacttctgaaagtattacttatgaaatgtgtgcaatttcctgggacaggtaatagtaaatacatgtgttacaccactgtccctcgtactcattgaagttctgatggtccaaccaacactcaccatagtccttgaactcccaggagtttttgtatgtccattggcgacgtggaccaacctcgttgatatggaacattagtttatctgcaaataagtcgacttcactaaatttgtaacaccttcgcttgtactaaatataaaattcccacagaattgatctagcgcaactatggagcatgatgtaaagtagaccagcatgtgggataacgtcctttatgccatccaatatagcaattgactcctggagctcaaacatatgaaatgccagcactaaactctgaagatatagggcgtacggattttttgcggtgaggcatttggtgtaaaacatgtgataactaaacgattcttcagccatatgaataaaaaaggggacttatctattcgaacagaagaaagagtttcacttgaaaaaacagcggcttttccatctggacctgattgaatccaagcctttaacatatctacaccgtcctcagaaactaagctgactattttagctgctacgtgatcaggcatgttgaaatcagggaacggaggaggctgaaagaaaatgcgtaccaacgttaacaccaaatttgtgaggctatataccaattcaaaactaaattttgcaattttttgatcaatttaagtctatataaaatgagtgcctcaattcgattgaaattgtttttgagtaaacattacctgtaggttaaaatgaaccaaaggttgacgaagaggctacacggcaaattgatttcccctaacaggggcaagggcgcttgggggtcgccagtaatgtctagtaggggacattggtcgagggtgggtacattttcctttctcgcagacgatttttggcattttggcttatcaaattagtatagtactgaaagtgaacaaataacgatctaaggaatttgaagaaacaccgataaataaagaggaccgaactaggctgaagggaaacagatttgagatcgtgatgaaatgggaaccctaattctctggataaatgaatagggagtggtgtggtggagcgatgggttactgaatataattagtggatcctacaaatattccaaaaaattgttcgtgatagtaagttagatacgtccatattctcacgtccatgaatatatatatatgcatggtctataatatattatatagacgtgctatagtgatttgttacagcccatttagcgggaacttatttatggggatttaggttctaatttttttttttttcatttttttcgtaaatatgagaagagattaggttttacattcatagaccgaagtcattaaagacaaaaaataattgttaaaaggataaggcttcacttatatagaaatttagatggaatgcaaaaagaattaacataacaacaaaacagcagaaacagaagtttaaacagtttgagtaagttattatgatttgacgttttacaaacagttgtgatcctgtatatgggtaattcttcagttttagaacagttcaacaatgttccataggtgaacttaattcagacacttgattactattatactgcttaatctaagtttttgttgcaaaaattacaaaggataaattttgaataaataaataacttttttattaatatataatatcatttataaaaatattaaaacattgttgaatgtaaacataagatgtgaaaaaaaagaaaagaagatgagataacaattttaagcaacaagcactttgatagttctaagcatcttccattagtcgacaaccattttgatttcttcaacttccttaacatcaggttcgggatatatggttgatattggtgcacggataacaatcttaaaccagttacaaccttgataatatctaacaaccttccaccaagcaagtgcaataacaacattgttcttgcgaaatgctcgaaatcttttctccaagtccactgcaatttgtccataagcctcgcattccaatgtatctttgctgaaagtcagtaaatatatgatattatatactaaccttacaaccaaaatataagaacatgatatgtttggaaaaaaactgaaaattgatgttgaagaaatgtactttttattcatgatcatgaacggcagtttgaatccggcaatatctttcccgttacttgcggtattagtgagaatcccaacattcacgagtgcaccaataacatctataagaaatatgtcagagatatgtgtttaaaaaaataaattttttgaaaaaagtgaatggaatttatgaagaagccattacttaccaaccaaggtatgtttgccaacaacatcatccacaatgtagtcaaatggagtgaacttgttaagtaaatcggttgctcttgatgtggaagaagtgataatggtgtgatccatgaatagaatgcgaaactcatgaggagttgttcttattggttcgcagttaggtcgaacgagaaacgtacttatcgttttccattgattcttttcgatcctgtcaaagtagaagggagagaaacgaggtctgattgttgcttctatttgggtgtcctgttacaaacaacattttaggggtgagggatacacgggtaaataaaaattctgcaaattgcaaaataaattgaagaaaattgtttacccattcatcgtccaagacaaaacgtagttcgaaagcgttcgggttgagaaattttttgttaattctcaataccatgacacagatggtccagccagtatccatcggagacaactcgtaaagattgtgatgttgaaccatcgtgaacaggataagtaaagagtaacgaaaactgagaaatatggtaagcttttgttttgtttttgcgattgtgatgtggttgtcttgatgaaatcgagagaagcagttgaatttatacaaacaaaaacgatgtaaactgtaataacgacgtgttgattcgtcgaaggaattaaacgttgtaacttttaataaaaaaacgttgtttctataaaagttcaataaagtaaaatagagtttgaaatacggtatggggatttaatgtatcttgttctaagcagaaatttggcttgacctcggaaattcgtctagaagcaggttgcggatatcatcaatttatatgtgttcataatcttttttctgtccaaaataacatgtccaccaataaccgtccgtttggatttaatataaatatttgatttgagttatatgacccaaaagggttagcatttgagaatcttttctaggaaattaagtgattcaaacgtgctcaacagattcatgtcaaccaaaaaagttagttggggaatgaatgaatttacctaggattaaacttcaaaagatataagatatatcaaatatagaaatgtagatgacaagataacaatggacataacattttgaacatattgatttctatgcttcatactctccgtaaagctccgcccataaggtagctctatagcattcggctgcaaaattctcatatgctattggtttgtacaatacagcattcaaagcatgtggatttttggcttcaagagattttgtgaagaaatgataatagatggagtgcgtcgtggaccaccacatgtaataacgtgatttgtcaaggcgcacacaacttagagtttcctttgaatacacagccgatttaaatagtggtccagctttcacaaagggtttcaaagcatccacgctttcttcagcaacgtagctaacaattttagcaagtactggtgccgatatgtgaatttcagggataatagcaacctgtgttaaaaaaaaaagaaggtaagaaacaattggtttttggtttatgttggatgtcaaacgtataaaactatagcttatgacacgctgcactacctttttgacacctgaaacagatgagggttgttcactcatgtcgaccttcgttaacttgagcatggaagaaacttaaacgaatcgtggaaggtttttgtagctagagattattatggttagattaatttttatagttttcctgtttattaaaagttgtagttgtgaaggtgagaatatttccgtaatagcgaagtttatcagtgttatggagggaagtaaatttatattggtctttcaaggtaaaagagaataataatgttctctgtataactaccacatgatctacatatccacttaaaatttttgatttttagtttactaaattaggaatatttacttttacactgtcgctccaaatcaaaacttatctccgtaacacttgcgaaatggttaacatagggaatattctgctttacaaatttcagtttgtggggcgaaattaaaggaagtagaagaatagaagaatataaaccatatccttttttaaataagtatccacgatttctccccagtttagaaattattccttatttgatttcttacgagcatatcaattatgagaagacagaaacgcagcagtgaaccatccgccggctgttgtgtaaaaatggttttccatacattacaaaaatcataaactctcctactttatacttttatttatattgtcttattaggtttttattttttggccaggaaaccagcattcaacaatttcacatgccccctccattgcttgctaaaattgttagctacctggctgaagatggcgtggatgcattgaaaaatttgattaaagcaggtccggtatttaagccggctgcatattaagaggaaacactacgttgtgttcgacttgacaaatctcggtatttcatgtggtggtcaatgccacacacgatctattagcatttcttcaataaatgtcttgaagcaaacaatacccatgccttgactgctgtattgtacaaaggaatagcatatgagaatttcgttgaaaaatgctacagggcacctttatgggtggagccttatgcagaggacggaggatgggtacaaattgatggagcttactgggctcagccccgagtgcgagctatgaatgcaaggtgttgctgatgcaaaagtgcagcacacaaaacttgtccaaatatgtgaagttcgattttaatgttgtctttttttttttgaaccattaagaacctttgttttttatgtattagctcctttcttttttttggttttagttttccaattattctacattaccatttaagatttggaccattctactaagtaagtaacaaacctttattatataattagtatagaataataatccacatatcgtataacttatggatataaatatatggatggaacacaataatactatcaagctctattcattacaaaaccgcatatcacatgaaatccatgtataacatataaaatagagattgttccttttgggagtaatgagaaaaaaaagatagacattattcagacaacaacaattagattatgtttactattcaacaaagccaaatagaacacacacgttcagaaaatagcttacagagtgataatactcaaaatgaaagttaagatggttaatattacaaaaagcagagagagtgatcacttgttattaaaggcagatgcatcaagggggcagacaaactcctcataaatgttcatggcatctttacgcctaaaagagtcaacgtgtttatctgttattttcgccatgttctctgggggattatcacttgcctgaatctcaaggaacttcattgccactgggccacagtcaccagatcgcaaattcttatataagccatctaatcgcttccaataaaaaggctgaagaccatgattctgagaacattcgggcttacaggacctttggatgaggtatggcaagattgtaacaaaaggttcaatgaaacgtcgaacctcatcttcctcataaagatctatatttggttcaagaatttcaacggaccagactcccagatttattgcaagtcctacccagtgtttcgaatcccatatcataggcaagtaaatggtatcaatgtctgtgaaccattcagtgttgggccctatgatgaactgtttcatgggttcggaccacttgacgcgtgacttgattttggcagctttgaagctttttaattttccttgtagatggtttgcgaaccatggttgaacaaaagcggcacgttggtttgtaagtgttgtcgcaagcttttgagaaagcaaggacaccaacacctccatatgctaggtaaacaaacaataagaattagactttcacactaaagattataaaggtaatatttgtaaaataattgttgattttataccagagttgaaacccagtttgtaggcttggcaagtgatagaaggaatgagtttgaaataaagaatccacacgaagtgagatgttcactgcaaggaaaaaaaaaagcttaagcttataacaagattataactgtattgatgataaataaaatgaaagtataaccatacatattcggtgcagcggagagggtattgcgaaacagtgcaaactctgatttactcattgaaggtaaaagttcatatgagcccgttcttgattttgataacaactctgctacaagaaaaacttcagcttcagacagaattggtttctctctttctcgcgctagagatgaatctgaaacatcaacataaccttcttcctgtacattataatgtaatattagtgcaaagaagaaaaccatcataaggtttgaaagtaggaccattagtttatagtatcaaaaagatgttgtgtttatcttgtttagagcatacctggttatcatccagatcatttgcaccaatgtctcgagaatcagtgatttgatcctgataggatatgtcaaaaaggataagtaattatctgtatgaaaaaattattgaaactgatatctaaaaaacataatttttgaagagatggacaggattataatatttgaaaaaacctccgttggagttagttcactattggcactatgggtgggagaagattctgattgtttgtcatgtttggaatttgtatcataaattggatgggaatatattaccatagcctgcaataatgagattggttttgaaaatgtattagactatctttcgcaaatataaaatgaggagacctattataagaataatatcctacaaattatttagtaaccaaataatcatgtcgaataacacagccttgttgttactgtttaccttcatagggtcaccatcgaagttgacttctggtggcgtctgtgacaatgactgagatctgcagccgactccaaagtgaccaaaatgtagaagtaccaataagatggtgagaaaaacataagaaaatattatagcgtatccacaaactcctgtccaatttaaagtgaacaagagagcctaattaagtatagacataaggttgaccttcttttttgcgagctttgcaaaccctaacaatgaataagatgctgcagccgcctccatggtgtcttgaatgttgtagtacacaaaaatatggtgagaaaaacattagcaaatattatctgtaaattataacgtatccacaaactcctgtctaatataaatgattaacttgctgcagcaaaatttatttcagagataaggttgacatcctttttaaagaccataattagttcagacataatcttgacttctttaagaacataattagttcattcatagttcagacataatcttaaagtaataccttcgcttgctgttcttcagagctctgttctattgacagatctatatcagaatgtgatgcaggctccctgtccaatgagtcctgaaagtaattgtagaatgaatttgttgtgttaaagatacaaagaggaaagtagaatatgtatttttcatggttaaagaaaggctttgatttattgtgtttgtattcataaaagtacctgcattttgccatcaacatctgttttattggcattcgtttgcagttcttcagagttgtgttcttttggcagatctaaaccagaatgtgttgcaggaactctctctgatgcgtcctgcaagtaattgtagaatggatttggttttaaaaaaaacataaccattggtctgcgcagtaggtccaacaaataatatattatcttacatcaataatatgatcttggttgagagggagtagtttttcgacgcttgggtctgaccttggatcaacctatttggaaattacaatagtcaatgtctcttatatatataagtcattatgggtgtccaagaaaacctgtccacccatgattaatattaaagacagcacaaaacaaaatgtagtttttttggtaaagaaaggttttgatttgttgtgtttgtatttataaaagataaaagtaccttcatttggctatcaacatcttcgtcattggcattcgattcttgttcttcatagttgtgttcttttgatagatctaaaccagaatgtattgcaggaactctctccgatgcgtcctacaagtaattgtagaatggatttggtcaaaaaaaacaaatataaacattggtctgtgcagtaggtccaacaaatactatattatcttacatcactaatatggtcttggttgagaggaactagtttttcgacgcttgggtttgaacttggatcaacctgattggaaattacaatagtcaatgtctcttatatatataagtcattatgggtgtgcaagaaaacctgtccacccagaattaacattaaagacagcagaaaagaaaatttagttttgatgcttaaagaaaggctttgatttgttgtgtttgtagttataaaagtacctgcatttggctatcaacatcttcctcattggcattttgatatttgacatcaatgtcataaacagggttgccttcatttgcatcatcgttattagagtgctctgattgtagtggggtgacaaatacatccatggggtcatcagtaatctcctgcaataagatgtgttgacgtcgttaattctaccaagtttgtaaatagttgaagttaattattacactaaccgtgtttatcaatggggtactatcactggagtcttgagctttatctaaattatcgtctgggacttgctgtgcaacttcaggctgtccaaatacatgcttagacaacgtgtgtgactgagatgaagtctatgagaaaattaaaagatttattatgacagcctgaagttgaagtctatgataatgttcaaatatttaaaacagtttgaaatcttgaatacctctggggtttgagattggatagggacctccattgtcttcttgcgctttgatctagaagaacatgcaacaaaactggaggagagttttgtggaccgcttgaatctgacagctttttttgttttttcaagcttcattacacggttcgatagctcttccaccttagtttgtagttcactgatgagcctggacttctcatcatcagagagattgagttccggtttactacgagttgaataccttcacttggatttgggagcctcagacttcacacctaatttcttcttacggtccacaatgtgctttttatgaacaccagatagcttattctttgggatagaaattggaggcaatgtggcatcacctcctggccaatcggttttttggaatcgatgagatgcccatatcaaatcatacatgtatgcaactttcttatctttcacctcatcgtcccactctgcccaactttggtcagcattaaggtctccaactataagcggatccattggcagctgtacaaaattagaaggttattaatagtatataagactggatttataaaaagagaatattatagacacaatatagataattgaggtgaaaaagaataccttaaggttgctttccaaagcatgaatctgatgaagcgatataacttgttttggatgagttaatcgtttccaaaggaggattgtcttagaggttgagtcatctaacagcaaatctaacagtccaggtatgttacgaaatgctatgagctgcaactctaggggaaacctttcaaacggaatgttttctgctgaagttgactcaccaaactcttgatagggttagttgtcagctgtcttttaccagtggacttaccgagatttcgtttgtcgggtctcattcctactacagtcttcaaaaaagactctctaccccaaggaaatgaaaggaatttatccatatctgccaacatctctacatatttaaatgtaggcctaccgatttggttcgatgctatgagtacaccatctacaataagtagaaacacgagcttaagtctgtggtcagatgacaaggtcttgcgtttgttggttagcatgtcagaaacatcccctaaggtaacagtcttgtctggaccaattaacttgtcccagtaactcttcatgccaacaacataaactgcatcatcatctggatcataatcctcagaaaactcaccacagggcaatccagtcacgcaagcaaattcaggtaatgaaaatctcagggggtatccaccaaatactgtccacagctcatactttttctttgttaccagctgcctacatagcaaggcatgcataagcttaccagacatcgcacacctactaaccggcaaatggaatagaggtccaaagcaagattgaagaatgaaatccaatttctttgtcccataaaaaaccttccggataaaggatagaatatctggtcttgagtatatatttagccttcccctcggatattgatcggtggcgaagagtctattaggaagatttgaatcacactgagaagatggttcctgagacgttgaccctgtcattagcaagaaacaagttcagaagattaagattagattaacagataataggaccaaataaaacgagttcacaaatgtctgtctattgcttgcttagattagattaacagagtaagagtaccttccatagtgtaacagaataaacttgtctgccaatgctatcaatttagatgttaaactgtcttacaaatcttgtaacacaaacaaataaactcatcttagatatggcagcaatagatataggaaaaggaaataataactatatgcagatttttttttttttaaaacaagtctaaatatgaagtagctttttcatctccacaaaagaaaatcaagttgcaaatgaaactgacaaaataccagagagtaaacaaaacaaagtttacaaaccagcagaagattaggtgtaaccactaaactatagctaaaataaaatagaacggattagaaaaggatcactctgaagaaccagcagaaggacaactctaagaacctaacaaagcctagtaagtgaaagaaaccaaaaataattaaggctacttcagaaatgagaacaagagtcagcaaaattcatcaacagattatatggtgttgtccatcaaatgaatttgttacaaaggaattacgtttccaaaacaagaaattcccttgtttataactgaaatacgaaaaagaaaactaaacaatgaaacaattcacataaagatatcttacttatgggattgtacaattactctattattgttttttgctaacatataacttagaagcaccactaaaatgcatatcaaatgaataaagattttagttctgaagcaataaacgaaaattacggaaaatcttatgatgaaagaaagaaactctaattataacagtatggctaaccggggttcatgagccggcaaacatgtggaagcacatgcaaatatggagtaagctagtgacgctctacgagtaagtcagaaaggtacctaaaaatgtcaaaatatcagagagtaaacaaaacaaagttaacaaaccaactgaagattagttaccgaaaaatcaaaacacaatgtgaattgatgttatccaaatatagttgaccatcagatcatatccaacatgtttaaaatcacagccaaagtggaaaatgccaaactatgagagagtaaaaaaagattagttactgcaaaatcataacacaatgtgaattgattctgtgccctgtccacaaaaagggcgactgctaattatgtacagtacaatcataacacaatgagtcatattggtgctagcttacattataagacacaagcaattccactaatcactcacctgaacttggagaacactctggtcagtatttaggcccgtaaatgaacctaaaataaataaataaaaacgagacagacacaaccaccataagtaaaaagctaaacatgagagaataatcataggatcaaggtgaagtggaataacctaacaaagactagtaagtgaaagaaacccaaaaaggttaaggctttacgagaaattgcaacaagagtgagcaaaattcataaacggagtatatggttttgtcaatcaaatgagtttgtaacttaaatacgaaaaacgagaagcgagaaccgaagatagaaactaaaaaataataatcaaacagccgagtttcgacgaaacaaattttacatgaaacataaatccaattcgatataagaacatgaagaaatttgggggaaataccggtggagagatcacaagagagaaagtcgtgtgcagcagtggtggtggacaatgacggagaagttggagagaatttagggtttgggaactaaattagaagtcgtcgtcatctccgtcgtcgtctgagcgaacatagtcaccggaaaatcatctgcgtcgttgtctgcgcaaacagagtcaccggaaaaactgaagaggatgatgtcgcccgagtcgtcttctacaacaaacagtaatttgcagttttttactggattagttttttacgtgtccgaaaaagtcttcaaaagtcaaatagggtaactgcaaattcgacgagtggtttggttaagggatctctttggttaatgcgggtttggtttgaagacaactggttagggtaatagtgtaactttgccaaggcaaagtgctgatgattttaaagtgtcgaaacacgtctaaacttttgaaaaagtgtctaagtatgcaatattctcaaaatataattactagtttgacttattagtgataacagattttttttagggttaaattggaaaatagtcactttccgaaacataattggtgaactaggcagtttactattcacaattagatttttagtcactcctttttttctctaccaattacaaaatcaattataccctagatcatctctactaattacaatccatgtcattatctatcccacgattatttatgtaaattaatttagaaaacaaatttatattgatgagtatttcaattattagattagaggggttataaaaagaaaagaaaaaaaatatatatgtttattataaagagagagagtgtgtgtagagatagaaaggggagtgagtgatacacgtttctaaatctctacctcatctagtgtcatacattagtctctctcctcagccaaaaggatctcaaggtaattttcaaaactcccactaccccacccctgcttctactagacgctgttttattatacgaaaaagtaacgtacatgtttcaataattataaatagtgaactgcctaattctataattaagtttgagaaactgactactttgcaaacacaccctttttttatgttatgacagatttttatctttaaacaaaaaaatctgtgcaatagtagcagttttgtcaaattaaaaaaaattgccagaatgacatacaatcgcagacaaaatgtttaatgtgatgacagactttttgtacattatgacagatttggagtatggttaaaaaaactgtcgtttgattacaggtttattaatcaaaaaaataattgctggaataactttatatagtgatagcaaatatgttttatgcaatgacagatttaaattttaatccatcttataacaaatttttatttcttatgtgatggtaaattagtttttacaaaaaaaaatatttgtaagatatttgtcacgtgtctttaataatttatacaacaaggttataaaagactttttataagtacgacagatttttttttttttttttttttgtgaaaactaataaatgacaacacaatctaacttaccatatatttctaaagttttagaaccgtttctctctactcacgacgccactatcgtttttctctctacttacgacgccactatcgtttttctctctactcacaacggcacaatttttatttttcaaactaccttggagatgatcaagtattatttcttttagggctaaaattctacttgatcaaccttattatctcttacttttttggtcaaaatctttctcttagggttataacaagcgaaatagagtgtgaggaaggattaggtgtttctcgtctgtgcaagtggacatttgaggataacaaatggttgttcttcattgataatcgtagaggttgtcgaatctagaagtcaaccgatgttgtttttcaagcaactcagctgtgtgatacctgatgatgagagccttgccattatttctgataggcacaaatctatcgggagagcaatcaatgtggtttattcaaaggctagtaggggtatatgtacataccatgtgtacaagaatattttggtggcaacgaggcgagccttgtaccgctcaacactgccatcaggtttccgcttaacccgataagaagacccgttgttggtgcaggaattagcacctccgtcaataccggtttaaacaaagggaaatgtgaatctaatcaagaattcgacataaccgggatatcccggtttgcctattaatgggcaaaagttgtgaggtcgccggaagacctaattcaatggatagagatcgcccagccgacttcctgaacttcggaaagagaagacttccattttgaaagaagaggatcttgtaaagaataaaagaaatgaagatttaaaccttagataattagaagtttatcatattctgatatcaaggaaacattgtataaatagaggggtttgtcctctattcaatggatccagaacctaatacaaaaacactacttttctcatagcaaaaaccctaacttctttttcaagcaactttgttcttcttttccgattactttagagctaagagagaagtgaatttatctaactccttagtataaattcattgtttgatttacaaaatcaacaattggcgtgccttgtaggggattataaacaaattttctctacgctctcgcaagaaaacatggttcaaacgatcatcgatcccgtcatccttccatttaacggtgacgatacgaaatctagcctccttaccggaggagatcctccctccgcggcagaattagctgccaagacggttgaagatcaattacctcgggaagcgaatcctaccgccccagccgtcgctccattgtccttatccttggaagacctcaaagccatcctcgcgaccgtgacaaaagatctgtcgcagagactaaccgccggctcgacgagttagcaaaaggaatctcgccacgtccgaactctgaagcaacaccgccaagaacgatccaaccgcgcggtcttagcgttgacttcacggacgcacagtccaacatggtcaactctaggttcccaggatcgcaccatcccgccaatcaggacggcagaccatctatgccgcccctgatgtcatccggtcacatttttatgccagcagctttggaccatgacgggcagatagacgatatctatctgaaacttcgagagatcggatcacaggtccataaggtcatcagtttggctctagagattgatcgaatgattgaagaaactcagaagacttctttcaccgatcgaattacgtgcacgagagttcctcaagtcattcatgacctccttcatgacaacagtcgccaaagctcacttctcagatgagcagagggacatcggttgctaccaactcttcgttgaaggtctcgtcgggaaagctttgacctggttctccaggtaggaggcaaactccattgacaacttcacctagttgtcaactgccttcttaaagcattaccaagtgtgtattcagcccggagcctctagttccgatctttggagcatgactcaggagaacggcgaaccactgaacgtctatctaggtcggttcaaagaaatactttcaaaagtcactatcacagactgatatagctcaaattgccttaagcttactccctcaaataagagatcgccgttagcacttaagggtcgtattccactaagtactcgatgttcacacaatagacttatgatgttgtttgataagctaaataaagtaattgaatgttgaagacaaataagcaagtaaatgagttgtagattcaagtgattaaagcgtcgggtctaaggaattgtctcgggagatagataaattgtagatctagctaatatcaggattgttattgcaccgttctcaaactcagactatgattatagagtaaccggtggcgttccgcgaaactctcaatacttaaagctaagataacccgagaagccgagaaatcctatgctaaagtatgcattgttaatgagcttgattagtttacctagtatctaaaccagagcccttctatgagcctacatgttctttcttaaatgcctatgctcatctatgatagttcaaataacaagtacctatggcgagcatacctattatctaatatcaagttctaggtgatcaatctaaaactagcaaaaagaataatcaagatgaagaactctaagaataatcctaaggggttttcgatctactaatccatctaaatccctaatgagactccctaaacccaacaaggtgattactcagacatgataacagaaacacaaatcataatctaaatagttttcagtgatgaattaagaatagaagtaaaggagttcagaatcctctctaaagggattagattcttctctcaaatgtgtaacaaactctaaaaaacaaaaactaggtctaacaatgaccgtgcagggactactttgtcgatcgacaccagcttctgaaaaacgtccttcaagatcttcattgctgaaaagcttccaaaattccttattgtgctctatagttcccatatgtgtaagtgtacctgaaatgactcaaaacgtacgataaagtctagaaagactctaaaaactattttgaaactatgttagaaatcaataaaaaccaggacatatcacaaatgaagcagcggtggccactttcaggaagggattgttgcaaggatcccaactaagaaaacatttggcgattagagagcagctagacctcgatgacactctacatagagcatcacggtatgcgttccttaaagaagaggatgctaagttggcaggaaagtctcaaccgccgaaagccaaggataaggcgtggaaagtctaccaggagccgcgttagcattacgacccaaaggcgactaagcgattaacggttttcaccgcgacggatgaggatgatcgaaaaatttgtattgttgtttccatcggtttggacggcattccacataagaatgcaaacaccttctgaacatcctcctcggaaagtataagtcgggagaagtagaagcgatctattatctcaagaatgggaagaacaagcacaagggcgatatcagacaggctcagggcaaaccagcgaacgagggacaacaactgctggaacatcacccgaaccaagaagaggttcatacagaagaaataagggttccgaaaaacgaacttcccccccccccccccgaaaagaaggaggggacagcaaccccagcgagctcctgatcaccctcgaggaagaatttccatgatcatggccagtctattcgacgatgaagattcggtttcggccctgaagaaaagagcgcgtaggtatgtagctgaaccattgagtcaggaacccatcatcttcacttgagaagacgggaatggcattcagcatcctcacaatgatgcactagtcgtcgagctggtaatggaggacttcgacgtagaacaggtcttgatcaacactggcagctcggtcaacctaatgttcttgaagaccctcttgaagatggggatctccgaaaggaagataacacccaaggtccgtcctttgacaggattcgacggagaggctaaaatgtccataggggaaatcaagcttcaagttcaagcaggcggaatcacccaaaaaactaagttcattgttatcgactcggagccgatctacaacgcaatcttggagagtccctggattttactcgatgaaggcgattccctcaacataccatctgtgcctgaagttcccgataaccacaggaattttcaccctgtacggaaacctaaaggtctcccgaacttgttacgtgatcgaaaagaaacaacgaagaaaggagatcttatagcagttaaagaacgaagagcgagctgcaccctctgaatgctcggctcaccaatcaataaaggcgccaagttgcaagatagtctatgtgaacattgtcgagtcggatccgtctcgaaccgtcggtattggaagcgaactggaaggggagataaaggaggaactgatcaccttcttgaaatcgagaacatccactttcgcctggtccacaaaggatatgacgggaatcccactggaggtgacctgccacgagttcaacacagatccgacctttaagccagtttgtcagaagcgcaggcgtatggggaccgatcgtgctatggccgtccaatacgaggtcgaaagactgctaaaggccggtctgatcaaagaagttcaatatcctgagtggctagctaatccagttgaagtcaaaaagaaaaacggtaagtggagggtttgcgtcgactacaccgatctgaatcgagcctgcccaaaagacagttatcctcttccacacatagatcgcctagtcaaggcgaccgtcgacaacgagcttctgtctttcatggacgccttctcaggatacaatcagatcgtgatgcataaagacgactgcgagaagatgacttttatcaaagatcgcaaaatctattgctacatagtcatgccctttgctctgaagaacgcaggggcgacttacgaccgtctggtcaacgagatgttcgcagaactgctaggggtcacgatggaagtttacatcgacgatatgctggtaaaatctttactggcagaagatcatatcaagcacctcaccgcgtgtttcgatatctttgacaagtaccagatgaagcaaaatcctactaaatgaacgttcggagcaacgtttggcaaattcttgggatacatagtcaccgaacgaggaatcgaagccaatcctaagcaaattgacgcaataatcggactaccgtcccctcagaacaaaaagaggtccaaaggttgataggtcgcatcgcaactttgaatcgtttcatcgcccgatcaacggacaggtgccttcctttctataaacttctgcgtggaaacacggattttcatttggacaataaatgcaaaaccgctttccaagaactcaaatcctacctcatgagtggggcgatcttcgccaaacctgaagttggagaaatcctatatctctctgtctcggtgtcaagttcggcgttgagtggggtactggtacgagacgatcgtggaaatgagaaacctatcttcgacacaagtaaggccctgaatgacgtcaagaccagatatccgactttggaaaagctagcattggcggtaataacggccgctcgaaaactccgagcttacttccagtcgcactccatagtggttttcaccgatcatccactttggacggtactccacagtctaaaccaatccggacaaattgcaaaatgggcgatcgaattaagcgagtatgatgtggagtatcgtttccagccaagtctcatatcacaagtcctggcggatttcatgaccgagctatctccagatgtgattaacaaggcccatgacgagaactggatactttacgcagatggctcctcatcgttacaaggttccggtctcgggattctgctccaatctccgactggggaaatccttgaacaatcgcttagacttcaattcaaaccatccaacaacgaagcagagtacgaagcacttctcactggacttcgccttgctaaaggtatcggggccagacatatgaaaactttcagcgattctcagctcgtagtcagtcagttctttggggaatttgaagccaaagacgaaagaatacgagcctatctttcgttggtacaagacctgtctaaagagttcgataagttcgatctggtaagaattccctggaatgataactctactgcggatgccttagccgctctggtctcgaacacgaaccccgacttgagatgaacaattcccgttgagagcatagccaagccaagtatcgaattgcccagttcgagctgcgtgattatagaccccataacggccatggacgcagacgtcgatgcaatcgacccggagccttcggattggagggatcccataaaagcttacatcacagacggcgaagttttggcagatcgatgggaagcccgccgtctcaaagcaaaagcggcgaactacatgatgatggatggcgaattatacagatgaagcgcaacaaaggctttcctcacttgcttgaaccaaaaagaagcttgtacaatcatgaaggaaacgcacgatggaaacggaggtaatcattccggcggatgagccctggccctcaaattaaaaaaggacagtcattactggccaattatgctggcggactgcgaggcttacgcagcaaagtgcgaaccatgtcagcgacctggcccgatgaagaatgtgccacctgaaacattgccttcggttacggcgccatacccgtttatccggtgggccatggacatcgtgggaccaattcccccttcaggatctaagaaatttctgttagtcctaactgattatttcaccaagtgggttgaggcacaagcgtactacgaagttaaatcgtcttatgtcgttgcatttatttggaaaaatattatctatcgacatggtcttccctacgagatcgtaacggacaatgggaagtagttcgtctcactcatcaccaggaatttcctcgccaagtggaacattcgcctcagcaattcgactccgcgatatcctcaagggaacggacaaaccaaggccctgagaaaagaaattgggcaaacaagttggaaggcgtgctatggtcataccgacctactccttgaagacctacgtcattatctcctttttccttagtttatggcatcgaggcaatggctccgagcgaggctggaattctaacgttacgttacgagatcacaatgacttcgccaaagaactctgcgatcaagctctaattcagatccagattaccaaaatgcagcggcaaagtactataatcggaacgtccgagaataccgcttcaacataagcgatctcgtccttcgagaagtcttcagcaatacgaaaggaaaagaatgcgggaaagctcgaagctcggtgggaaggaccttatttaatatcaaaggtacttcaccttggagtctattttaggatcgaattcacggagttcttttgtccaaacagtgagttgaatgtcgagattaagctagcagggtaatagtgaaaataaaagagaacaaagtaagaaaacagcaggttgattttgttgtgaatgattaaataaagagataggaacatggttgtctcaagaaactattggttagtagatctaatgaaagctaggttgttatcgaaccattcttaaactcaaaactctaattatagaataaccggtggtgttcctcgaaactccttatatctatagctaagaataaccggagaagccgagaaattatcaacctaaatatgcattctcaacgagttcgattgttcaccttagtagataggctgattcttattacacacctaaaaaacagactcatcaaataatagatccaactacatatacctatggtcggcatatctattgtctggattcaagatctagttaactactctagatctagcattaagcataattaaagatgaagaattctactgataacctagcaagggggcaatctactaaaccatatgaatcccttatgagaaaccatattcttaacaagcacattactcagacatattgattgaagcaaacaacataattaagtatgaaagcataaacatagtaaataaaggagggaaaagaagggatctcttcactgtattaagaactgaatcaatgtttgaaaacactcgatgaatagcttgtgtctctcagtaacatggttttcaaaagcttgataaaaacttgatgataaaaactggatcctcaaaacttaggtctaaacaatgtatataaatcctaaaaacgtctagggactaataatgtaaatagggaagtcttctgggaaaatttccacttatgtagactttaaagcatctagggtttttgctgggccgaaactggtgtcgatcgacaccaagggtgtatcggtcgacactcctccctgattcctgaaccaaaatcgtccttagcttccttttccttagcttttgctccaaactgtctctttatctccattgttgtcccattgcatagaatacctgaaaagacactaaaaagactcgagaaataacataaagactcaaaatcctatacctaaaacatagataaaatcggtgaaaatccggttatatcaactcccccagacttagctttcgcttgccctcaaacaaaacacaaaagccgaacctgtggaagaggttttgaaaacaaaggaactcccaacattctctagcctattgccatgatcatccaaactaagtccatatgcctaacaagtctaatcaaatcctaaccaccatgtagttctctacaagcttacacaacattctaaattccatacttaagtttcacaactatatccaccaggcttgcatcgctgggtctcatcaaacaagctaacattcaagatccttctagactcattcctgtactataccatgataaattgaccatttttttatatgtttttttctttggtgttcttctctcccccagacttattctttttagagagtaagcaaagggaaactcgcatactggattgacaccctcggcatttttccaatctttgtaattgatcattccaaataatgtataataatggggtaatcggaaacattcctacccctatacactgtctgaaaattgtctcaatctctcattatattttctttttataaggggagaagaacatagtctttttaaaacattggtctcaatatcaggtatgaaccaggagtcaagatctatgaatactaaccgtttgaagaggtaaaatgaagagcagtgagattagctccagccttaatggttgatttggaaactagtatatcctcaagtctgtaggtttgccatctagattttccaatagtcggattgactcgaacttacaacactcatcaatcagacaataaacaagagaatttttttttttttttttttaaactttagaaacgaaaaataatgagaagcaaaaataaaaccaatattagtaagaacctcccccagacttaaacgacactgtctctagtggcattcaaatccgaagaaggcggaaaaaataaataaaaaataaaagtaaataaaagaaagggaaaagaaaaatcaaaccattgggttgcctcccactaagcgcttgttttgagtcaatagcttgacttggtggagttcaggatgtgggtggagtggtggaggattgctgctgcctcctcgccttctaaggcggtgcgtaaacggatctggttggagcagctacaagaacaataggagaaacaagctttcgaggaactctaggcttgttatcttgtgaagcaaacttcaaagaatctaaggaattaatcgaaggtaaagaacgagaagagagagaagagaacttatcacgtaggtcctcaagtggtgtgggctgatgagaatgtgcagaagcatctgtctgtgaaacccgagggtgtcaattgacaggggtagtggtgtcgattgacaccgttgctctgcaactctcattggcgagctgagcaaaagggagcgttgtgtgtggcgctgtggtgggattctgagcagtctgaggaggtgtgtctgtgctggaagcaatgccactgataggcttaataagctctgaaccatccatgccaaactcaatctctaaatcagaaaccttgagagagattctcgctctcttcacatcaaacctagcaccagctgtagctaggaacgatcttccaaggataagaggatccttgggttccatctcatagtcaaggaccacaaaatcagtagggataacagagttaccaaccttaacaggaacatcttcaagtattccttcagggattcgcttgaaacgatccgcgaaaagaagagtgatgcgagtaggcctgtaattagtcatgcctagtctttcagcaacatacttaggcatgaggttgatacttgatcctagatcacacaaagagcggctaaacctgcttgtggagatagagcaatcaagaacaaagctacctgggtctggaagcttctcagtggtctaaccaggagtgatggtgcagatgtactcagcaatgtctactctctatgccttctccttccaggtcttaggcagcatgattgcactgatgtctctggtcagcagtttagcttcatcggagctaattccattgtcaacaagtcgcttgacatacatgttgagtgaagcagaagatgtctcagaagcatctttaggaagagtatggaggatcttctccattatggttgtgcacttagcagcatgaatattctacttagaacgacgctgcctcggataagggactggagggctgtaaactgactcgggctgcatagggatttgcacctcacaaggtgttgtccggatccagtgttgatctacactagaggggtatcgatcaacaccatcgtattgactcgtctcagagaagagcgttccatatggtgtcgatcaacataagagggtgtcggtcgacaccatctctacaactgcgagctccaacttgtcttcagtgtccaattcctcccacacatcatctccttctctaatcaagatggcattgtagctcatccttgggttagcatcaggattaccaggaagaaaaccctcttgtctattgatggattgtgcagtttgagctacttgtacatccagcttcttcaggtgagagctcatattgttgatcttcccattaagatctgtttagacagcatcaaacttgccattaaactccacaacgagctttatttggctctctagaatctgctcaagcatcgattctattcttgtctctggtgagggtggaggggtgggggggtggggtgcttggtaagctgaattaccatagatcctctggaagttgctctaaggaattaccatagatcctctagaagttgctctaaggaaaggtcttttggaaagcaggctttggagtgtagttggaggaactctggttccctgtaaaccggttgccactgaagttgccttgtgactgcccaaactttgtgtagccttgaccatcgatgtagaagactccttcctctgactcagggtcaggctcaatagtctcatcctcagctgcaaagtggacatgcttcttccatgtaagcaagttgtgaaccgaatccagcttagcattcgcctatgccatatgattgcctgagatagttctcgcaatcttcttcctctcaaaatcatcattcttggtactgttgctgcaagcgaggttatctatcagggttgtagcatcaactgggtaacgtatgttgaagttaccattgcttgctgcatctagagccatctcgtatctccaatcaactcctctgaagaaggtacctagaagttgtacttcactgaaaccgtgatatgggcagtctcgttggtactctttcaaacaaacccaagcagccttgaaagcttctactggaccttgtgtgaatgcagacaacttgtttctcaactcctcagacttagcatcatcgtaaaaattattcaggaaggctattttgatgcttctccaagtcttaagggaacctgctttaagttgtttcagccaagaagctgcttccccaacaagtgaataagggaaaagcttgcacactaggtagtcctgtgagactccattagctttgatgttcagaacaaggtcctcaaagcgttcgatatggtccattggctgctgataagtgtgtattttgcatgttttgagcatccatttgtcatcactttagtatcatatcatcactgttttatacaatttctcatcatttgtcatcactttacatgtttaggataggtttgcatgcattttgcatatttgtgttgatttcaggtgatttggagctgttaacgagctaactggaagaagcggacctaatcatgacaaaccactcgacctagaggtcgagtaggagcttcaagatctcaagagaccactcgaccccaggtcgagtagaagacatcaccacttcacttcaccactcgaccacgaggtcgactgccctcatctccatcaccaaaccatcactcgatcacatcactcgaccacgaggtcgagtgccctcatctccatcatcagaccaccactcgacctcatcactccacctggaagaagtcgagtatcactttcaccaccactcgactacaccctctatggcaagcttcagagtcttcttcattctgcactcaaccagacactcgagctcaaggaagaaaagaagactccagctattcactcgacctcccactcgaccacttcggtcgagtacagttcttaatccgtcccaatacttcgtcgttttgagtattagggtttcggaatatttggctataagtagcatgtacttcacatttttgcagacaagaagtttttatctagttttatcccgcagaccttttgttctagaccttttgtaatccggatttctctttatctattcagtattcagtattcagcttttgttcttgatttcgtttactgttattcattctgttatcatcctgctgttacactgttgctatcatgttttcaacctgttcaacgtttatgctcattgttatgatgtctcagtagtgaataggtttctgagtatgggttagagtagtgtagaattctcagtatgctaggagattgagtattggttgatagatcccttctggattagttgttcttaatgcctattgctttctaatcaactggaatttgagcccagacatttccgtgcccaaaaggtgttcgatgaaatgtctgaaccactaattttagagattcgtgaccctgtaccaaggtattggttgcagggagcgttttggctttaacttgttgattcgtaatgcctgttaggttagctctcgtcaatggtgattgagtctgggactaggttaacttgagagtctctgttgcggtggcacttagatttggttaatgaacttgttgtctagggttaatttattgagcatgtcaatcacctgtaaactgaggaaacgaaactactcaattaccccatccttgggaattctttatctgattgaattc

SEQ ID NO: 196 - DNA, 89836 bp, Arabidopsis thaliana
aagcttccttctccgtcttgtgttgagtcatcctgtgtccagttccagccctttgtctcgtcaaagacaacatcacgactgaccactactttctttgtttgtggatcgagtaatctgtaagcttttgatcctgattctgtccctaaatgaatgagtactcgagacctatcatctaatttcttcaaaaactgcttgtctatctttgcatatgccgtacaaccaaagattcatatgtggtcaacgattggtttcttctctctgaagcattcatatggggttctatccttaagagctcttgtagcgactctgttgattagataggtagagtgtcttatggcttccccccacaaataattaggcatgtgcatatgcttcagtatgcttctcgccatctccaatagagtcctgtcacgtctctctacttcaccgttttgttgtggtgtatatggagcagtgagatgccttcttatccctgtcctttcgcagaaagaattgaactctccagacacgaactctcctcctctgtcagttatgaaagtttgaatcttctctccagattctttctctaccaaagctttgaagtttttaaacttaaaaaaagcatctcccttctcctttaacagcactgtccacatgtaacgagaataatcatcaatgagtacaaagatataacgatttccaacacttgtttttggtgttattggaccacacagatctccgtgtatcagctcaagcttcttggttgctctaaagacggtcgcttgtgggaatgactgccttgtctgctttccaagtaagcaagaaccacaaacctccgactcaatcactaaacttggagctccttggatcaattccttatcaatcatagactttagtgtgatgagactcacgtgtcccattcttgcgtgccacagacttgacatacttgtacttgttaggtataaacatgcttcctttcttaagcccatctttactttgtatagactattcctagacctctcagcttttaccaacagctttccttcttgatcatgcatagttagatatccatccttcaattttatttcacatcctgactcagtagcttgtccaaggctaattatgttgctcttgagttcaggaataaaatagacatctaacattactcttggtttaccattcaagtctatgaaagctattgtgccctttcccttaatgtcgatgcgtgaatcatctccaaagcgtattttcccggtaatagaatggtccatcttgtcaaagtatcgacgatctcctgtcatgtggttactagctccgttgtccaggtaccaaacattctctccatcaacgtttgtttcaaaactgcttggcatacaactttgttcatttagataaaccacttcatgcatcataagctcatccgcgacttgggtctccttattgtcattttcttgagtttcctgcaattgcaacaatcgatcaggacaatacgaagcatagtggccgatcttatcacatctaaaacatgttatatgtgatgcatctctgccaccattccgtcctcgtcctcttcccctataggatcctcttcctcctcaccctctgattcacgtttacttgagtccatacttgaatacaaaagcttgctttggtcttcttcaggatcgtcttcgtcgtaaactcgttcctcatacacctttaaacgaccaactatgtcatcaaaagttatggcattaagatccaagacttgttctaaagcagccacaatgtgaatgtatctcttccgaggaacactcttaagaaactttttaacaagtcttgattcttcaataattacacccaaagcagccgattttactgagatctcagacaacatgcctgcaaagtcatctattttatgagaatccttcatcttcagtcgatgaaattcagccattagggtctgcaatctagcatcgttcactctctctacccccacatctcttgctttgatcgaatcccatacttcttttgctgtctcaagttctccaatccgtaatgcttatgattcaggaatggattgaaacaacaaggtgcatgcaacatcactcttgtcttcatcaaacggctccgtaaccttctctatcacatcccaagtcttgtgaaccttaagcgctctcctcatcctcatggcccatcatgtgtaattcgttgcgtttagcataggacattgaatcgaagaagatctactcacttctctcattgctttagctgcgggtgaagctgcgggaattatttcactcattctgcaagatcgatcttgctgtgataccaaatctagttttcaagaaagattaagaacacaagtatataaaagaataactctcttttattatctttaggaaactctctcaaaacctaaagtctcaatctctctcaaatcccataagttgtatcacaacattgatacctccctatataacaaagctttaaccttatcttaacaattagataactcctaatatcataagataactccaaacaatatattctagatatctcctagaataataaagcttaatctccttttcctcttctttagtaacttactcctcaagttacttttctcaagcttatccaacagaggtttccagtgatgtagtagagcagcaaaaggacaaatgtctaagaagagaatgttatcttggaagaagagaaaactcagttttagatctccaaaacagaaaggcgaacctcttcttaaaaaggattgtcttgaagaaggaggtgatgatatcgattttgaccgcagacaactaagctcatccgatgagtctaactctaatgtaagtacattgactacatttgttttatagttctctgtttttataatttattgtttcttaactcttggttgattctcttgcagtggtataggtctgatgatgcagtcatgaaaccataatcccagtttggagacgttataacagatgtaagcaagacaccaaaagtgtaaaaaacacgacacaaatttaacgtggttcaccaacactttttgttggctacgtccacgggcaaagacatagatttattacttaagaaatagagtacaaaatacagggaggctaggttaagaagagtacttatacaaaagaagccctaattaaccctaaactaattgggcctaaagttaagggcccaatccaattcaagtcatatctaacaaatctccaacgtgacttgaatcctccaaacagctgtacctgacacactgctcacagtgttgtaccagacttcgcccttagatagatgtactagattaagctaccagacggttgtactatatgcattatcccaatgctagacgtaccaaccaaaagtagcagagatatgtaccaaaattctcatttgcctcagatattccatcagggaccagatgcccctgcaagccaactccttcgtcaagtcagatgcttcactgagccagaatacttattcagaagccagaacgcctaccaagaccaaaatgcttcatcagaaaccagaacgctccactggggccaaatgcttcataaggagccttatgcctattcagaggccagatgtccctccagggacttgctgccccgttaggggcctgtttgcccttcagggcgattaacagcttgagacattcagcaagtctaaacaatgtttaaacttgctctaaggaaccagcttagtgaacatatctatagggttatcagcagtccctaccttcttcacttgaaacctcttctcatttctcagaaaatgatatctcacatcaatatgcttggtccgctcatgatggacatgatctttggctaaagaaatcgcactcaaactgtcacaatacattgtagcctgatcttgatgcaaacggatatcactgaccaatcctttcagccaaataccctctttagcagcttctgttgaagccatatactctgcttctgtggttgacagcgtcacagttggcagtagagttgctttccagctaattacagaattacccaaggcaaacacataaccagtcattgatcttctgctgtctatatctcctgcataatccgaattagaatagcctgcaatcaggctcagagcctcacctctgtataggagtccaacatcagacgtacctttcaggtacttgaaaatccttttcacagccagccaatgttcttttcatgattgtcccatgaacctattgacatcactgactacaggtgcaagatctggtcttgtacagacaatagcatacatcaaacatcccacagcattagcgtaaggaacacgagacatatactctttgtcctcttcagactaaggagcaaacatggtgagaggaatattagcagcaaaaggagtatcaacaggttttgctgataacataccaaacctatccaacgccttctgaatgtagcctttctatgacaagaaaagcttattctgacttctgtctttgagaatctccatccctagaatcttctttgctgctcccagatccttcatctccaactcagcactcaacaaatctttcaatctctgaatatcagacatctgtttggcatttattaacatgtcatctacatagagcaccagatagacgtatgattcatctttcagcttgctagtgtaaacacagcaatcatacggactcctgttgtagcccagctccatcatgtagttgtcaaacctcttgtaccactgcctggagactgcttgaggccatacaaagacttgttcaacttacagacgtgatctccctttctaggaacttggaaaccatttgattgagtcatgtatatttcttctgctaatataccatgaagaaaagcagttttaacatcaagttgttcaagttccaagtcctgatttgcaataattgctagcagcattctgattgaagtgtgtctgatcacatgtgagaaaatctcattgtagtctaccccttctctttggctgaaacctctcgcaacaactcgagccttgtacttaaccccttctactggtgatatcccttcctttatcttgaagatccacttgcaagtaacaatctttcttcccggtggtcgtttgaccaaatcccatgtctgatttttacagtgagattccatctcatctctcattgcaggaaaccatttctcagcctcaatcccagaaaaaacttctcgataagtggctggctcatgagtatctacctcttctgcaacctgtaaagcataccctaccatatcctcaagacagaatcctaccatatcctcataaccgtatctttgcggtggtccaactccaatcctctttgttcggttttgagcgatacagtaaggttttgattcttgcttgatagtgtcaggtgacccatctgctgcctgtagccccttactgtcttctggtttctgtaaatcagctttctgattagctgtcagctccacctatttatcaaagctactgttctcttctgtagttgtagacttctctgaaaatcagagcatagaaactttgtcaaagacaacattccttctcaaaatcactctcttctctgatggagaccaaaccctgaatcccttgactccatctccatagcctagaaatactcccttccttgctgttggctccaatttaccttcatttacatgattataaactgtgcagccaaaaatcttaagattagagtaatcagcagatttaccagaccacatctctgcaggtgtcctacacttgattcatgtgtgcggcccacgatttatcaagtaacaggctatatttactgcttcagcctagaatcttttttctaaacaagcattagagagcatacacttagctctcttcaataaagtctgattcatctgttcagctacaacgttctggtatggtgtatctctgacagtgtgatgacgagcaaccccttcatccttacacagctgattgaactctgatgaacagaactccagacaattgtctgtccgcagcctcttgatcttctttccagtttgattttccaccaaaattttccactccctgaagttattgaaagcttcacttttgtgttttagcttgatcacccaagtcttcctagagtaatcatcaatcatcgacacaaaatatctatgacctcctagagattcaacttgagctggaccccaacaatcagagtgaatataatctaatgtacctttggttatgtgaacagccttagggaacttactacggtgaagcttcccatacacacaatgctcacagaactcaagactcttgacctcatggccacacaaaagatcttccttggacaaaattttcatccctctttcactcatatgaccaagcctcataggccatagcttagtcatatcctccttgtgaatctctgaagatgcaacattcattgaacctataacagtgaacccatgtagtatataaagaggaccacttataacaaccttgacagacctgcaaaattctgtctccaccagaatattttagacctttgctatcaagcagactcagtgatatcaaagttttctccgtcgacggaacatgtctgacatcgttcagtgtgcaaaatctgccatcatgtgtcatgatctgtatagagccgattccagcaacctaacagacagaactgttagccatcttgatgcagccgttttctacatgtacatatgttgagaactactctctccttggacacatatgaaatgatgccccttgtatccagaacccacacatcagagttgtgggcgtttccagcagccacaagagcaacatcatattgagacttagtgtcattttctgctatagcagtagatcctgtgaagcgtagatctgacttcttccaaagtaactgtaactttattcactataaatgattcaacaaagttctcatatgatagtggtaaaggtaccaacagaagcaaagcagcatcttcatcttcaactttaaaatcaatattccgcagttctagtaatactgacttcaacttttctaagtgatctttgagtggtgtaccttcttgcatccttaatgcaaacaggcgtcgtttcagaagcagcttgttctgtagaaactttgtcatatacaaattctctaacttcttccacagattgacagaagtggtttctcttgaaacctcaatgatgacttcgtcttcaagacacaacatgattgtggagtgtgccttcttgtccatgacatccatctcagcatcatcgctcttccctttactgtcattagacagcggcgcccacaagccttgttgttttaacagggcttgcatcttaatttgccagagactgaaactgtttcttccagaaaacttatcaatcttcacattcatcgaagacatcttctcaccagattacaaaacatggaatttccagaaccttattctgcacaaaacttcttatgcaaaaaattcgcaggacgaaagaagaacaaagtaacctggctctgataccagtttgttataacagatgtgagcaagacaaaaaagcgtaaagaacacgacacagatttaacgttgttcaccaacactttctgttggctacgtccacgggcaaagagacagatttattacttgagaaaacagagtacagaatacagggaggctaggttaagaagagtacttatacaaaagaagccctaattaaccctaaactgatttggcctaaagttaagggtacattccaattcaagtcatatcgaacaggagatgatgatttcgttgttggtagctgggaaaccaaagaaattataagccgtgatgggctgatgaaactcacggctagagtatttctcgcatcaattgatcagagaagcgagagagctactggagaaagcgcatgcacagctctaggtgaagtgatggcacattggttaggatccaacagagagaaatcccaacaaggtcagaatttgacagtcttatcagagaaggatcatccgagtggagaaagatgtgtgaaaacgaggaatatcgggaacggtttccagacaaacatttcgatctcgagacggttctccaagcaaaagtcagacccatctgtgttgtccctgaaagaacattcatcgggtttttccatcgagagaaatcaaaggaagaagaagaaaaagaagatgttagtctagattttcttaaaggtgtaatgtcctttgacagtatctgggaagagatcatgaaacaagaaccagaagagtcggcaagcgaacatgtgatctacattgtaagctggaatgatcattacttcgtactccttgtgaaccacgatgcttattacatcatagacacgcttggagagagggtctatgagggttgcaaccaagcgtatgtcttgaaatttgaccaagatgcagagatcaaaagattaccatccgtcatcaaagacaacaaagccgacatgggaagccagaaacaaggtggtaagaacaagtatgagcaacccgaaagatcaaaagaatcagaagaacaaggagaagaagtagtagtgtgtagaggtaaagagtcatgtagagagtatataaagagctttctcgcagcgattccaatacagcaagtgaaagctgatatgaaggaaggactggtttcatcttttcatcaccgtcttcaaatagagctttactacaccaaacaccttcatcaccgccaacccaatatgtttgaatcctctacaaccaaagtaactgtgtcagaagctactgtgtctatgacagtggcttggttattggcgagccaattcagcaatagtggtgggtttggttgcgaaatggctgagcttttggggataaaagtttaagagaagtgtatagagaaaaggagttttccttctgtgtgaattttgatgtttataacttgataacccttttggtgttttcctggctaatttgatgttcataatgtcttctcctcactccaataagtatttaataaaatcggtaactgttattctcaaatgctcaaatgttatttgatccaaagccaaaatctatatataatagaaaagttttctctctatctagactattcatatcagtgtgacatcgtttacttaaacatccatataaataaaactacaagttacaatttatttaaaatgttcatttaatacataagtggatgtgtctaaaaaaccactcaaaccttcaaaatgtccaacgatactacaaaaccaaatttcccaaatctgaccctcacatgataacctttctcggcctcaagcatagtatagtaattagtaagtggtgatattggtgtcaaaagtctctattcaatgcaatgtaaaattttattaacaaaatatatagtgagtttttaaattttttgtgtgttcacggtacttgaataacattccgcttactagatgtctagtctgtatagtggttgaataatccgccaaatttaaacgtcaccttggtatgagactctcctaaaacatttttttaaataagcaaataatctggggaaaaaaccaaaaaataagaatgaacaaatgtatgttttatgttttataaaagtagtaaacaagctgctccattgttatcatcaaccaaaagaagctatagctctaagtaatgaaaacactttcacttaacccaattttaaagcttcgatttttcttagccatcaaacaataacctcaatcccaaaaaaatacaaagtatttatttagtaaaaaattgtaaatccgaccaccattcttgtactaactcaagacaacaaaaattttacgccttttcctttcacttttgcagggaatgtgctatgctcaacacaaatttcctctaaataccataataactttttcaacctccaatgtttctcattcttctcttagtaaaattgatattttgtcgaactaacatctgcagctttttgattaataagtaacttctctattctatatagatgattgaaatgcgtttactgaagaacaacttaaacactcaccaccacaatgttcaacatcactaaacctgattttccacaatatgagtccgagtctcactctaccatttatattttcatgtgtgtgatcgcctcattcttctttcttgttttggttggagctgcgtctgcttttgtcttgagcgccgcaaggaaaaacgtccctgagttgagacagtctcagcttctatcttccaactcgtcccaagcaaataataagaaaaaaccaagcaaaacataagaatgaaaaatattttttcaagactcatatcttagccctgtcatctcggtcgatctttggttctccataccatttcttcatatctcaatacaaaactaaacagtaaagaaaattataaatagttaaatactcatatgttactaatagattattattttggaaaaagttgatatttttacgttttccacctgtaattaacaaaacaaatgttttgatatattttttatatcaaatatttttaataattatgaattaatatgcaacgggtattaaagacagtttctttggaatcgggcaacgaggcgggccttgacatgattcagaattcccaataaaagatcaacaattcaaaacctataaagatcaacaattcggaattttttgaacggccctatcacttttgaattctaggtaataggtttatctcaaacttactagaaaaaccaaaaaaaaattttcaacctacaattgacactcttgacaattcaacagtttgtaattgcaggttttgattaaccaaaaccttctctattctatataaacaatgatcgaacaagaagagcgaagaagaacgaaaaccaactcaccaacaaaatgtttaacttaacgacgccaaattttccacttccaccaaatcactctcacactcccgccttagtggttctcttcggtgtgatggcaacttgttcatttctcatcgtggtggtagcggcagtgtgctactgtctggaccaccgcgagcaaactcgtccatgcgtcgagcaataatctggaaaaaaaaagccaaacataaggaaaaaaaaaaagcaaaacataagaatgaacaaatgtatgccttatgttaagtagtaaacaagttgctccatgttcatcattaaccaaaaaaagctatagctctaagcaatgaaaacactttcagttaacctaattttaaagcttccatttttctcagccatcaaacgataatctcaatcccaaaaaaatacaagtatttatttagtaaaaaaattgtaaatccgaccaccattcttgtactaactcaagacaacaaaagtcttacgccttttccattcacttttgaagggaaggtgctatgctcaactcaaatttcctctaaataccataataactttttcaacctccaacgtttctcattcttctcttagtaaaattgatattttgtcgaactaacatctgcaacttgttgattaataagaaacttctctattctatatagatgatcgaaatgcgtttactgaagaagaacaacttaaacactcaccaccacaatgttcaacatcactaaacctgattttccacaatatgagcccgagtctcactctaccattcatattttcatgtgtgtgatcgcctcattcttgtttctcgttttggttggagctgcgtctgcttttgtcttgagcgccgcaaggaaaaacgtccctgagttgagccagtctccgcttccatcttccaactcgtcccaagcaaataataagcaaaaaccaagcaaaacataagaatgaaaaatatttttttcaagactcataccttagccctgtcatctcggtcgatctttggttctccataccatttcttcatatctcaatacaaagctaaacaataaaggaaatttataaatagttaaatactcatatgtttctaatagattattattttggaaaaagttgatatttttacgtttttcacctgttattaacaaaacaaatgttttgatataatttttatatcaaatatttttcataattatgaattaatattcaacgggtattaaagatagtttctttggaattgggcaacgaggcaggccttgacatgattcagaattgctaataaaagatcaacaattcaaaacctataaagatcaacaattcggaatttttttaacggccctatcacttttgaattctaggtaataggtttatctcaatcttactagaaaaaccaaaaaaactttttcaacctacaattgacactcttagcaattcaacagtctgtaattgcaggttttgattaaccaaaaccttctctattctatataaacaatgatcgaagaagaagagcgaagaagaacgaaaaccaactcaccaacaaaatgtttaacttaacgacaccaaattttccacttccaccaaatcactctcacactcccgccttagtggttctcttcggtgtgatggcaacttgttcatttctcatcgtggtggtagcggcagtgtgctactgtctggaccaccgcgagcaaactcgtccatgcgtcgagcaataatctggaaaaaaaagcaaaatataaggaaaaaaaaaagcaaaacattagaatgaacaaatgtatgccttttgttaagtagtaaacaagttgctccatgttcatcattaaccaaaaaaagctatagctctaagcaatgaaaacactttcagttaacccaattttaaagcgtccatttttctcagccatcaaacgataacctcaatcccaaaaaaatacaagtatttatttagtaaaaaaaattgtaaatcggaccactattcttgtattaactcaagacaacaaaaatcttacgcctttccctttcacttttaaaaggaaggtgcaatgctcatctcaaaattcctctaaataccataataactttttcatcctccaaatcgatactctgtcgaactaacatgtgcaacgtttttattaataagaacttctaactctatatagatgatcgaaatgcatttacttaagaagaacaacttaaacactcacaccacaatgttcaacatcactaaacccgattttccacaatatgagtcttcactctaccatttttattttcacaccgtgtgatcgccacattcttctttctcgttttggttggagttgcgatctgcttctgttttgaacaccgcaaggaaacacatccctgagttaagccagtttagacttccatcttccaactcgtcccaagcaaataataagtaaaaaagaaggcaaaacataagaatgaaaaataatttttctagactcatatcttagccttgtcatctcggtcgatcttcggttttccataccggttctctatatctcatacaaagctaagcagtaaagaaaatttagaaatagttaaataatcatatgtttctaatagattattatttttgaaaaagttgataaaattagttttttcacatgttattagaaaaacaatttaattgttttgaaacatttttttacatcatatattttaaataattatgaatgaatcgtaatataagaaatttaattatgtctaatatcagttaattaaaaataaattaaaaaataaaaatttgggaacaaaataaaaaaagaagttagaacattttgtaggaagagagagacagacatagtagccggcgcagagaattactaggggaaaaatgttaaaaaaatcatgaactttcaaatttgggacaaaaaagcatgaactttcgaaatgccatttaaatcacaaagtttcgtttgacgttttgaaaaaattgtcaagtttcgttgacttggccattttggacacgtcgtaaatttccgttaacagggttaaccttccgttagaagtttctgttaaattgagacgacgtcgttttgaaacatcgttttggacgttttggtaaaaatacaaacatagcatatctatactaacaaataaaactacacaattaattgaaaatatatgcaagaaattaaaaattacaaaactacacaaaaaacaaatatataaaaatttaaatatacctaccatacatatatattttgaaatttgaaatattaattttctatataaatgttttttatatttgagaaactatttttaattttcagtttttctgtattccaaatataggaatacaatagaaaatacttatgcaaattattttcaattttcagtttttatctattccaaaaatacaattgcaaagacttatgtgaattctatatagatctataatttatcaaatatagaagatgtctttatatataaaattaaatatttgaaatttataatatattatggtaagtttatttaatatatttcgttttttaattttgttattttaaatttattgcatatatttttaattaatagtatattatatttgttagtatatgtatgcaatgtttgcaattttttgtaaattactgtcgtagctcagcggtagattgctccatgtgagtccaataggtcagatgtttgattctctgcagacgctgattttgcatcattattttctaatgaaacgacgtcgttttggagttttaaaaacgacgtcgcttcgatttaacagaacattccaacagaaggttaacctcgttaacggaaatttaacgacgtgaccaaaatggccaagtcaacaaaacttgataattattccaaaaagttaaacaaaactttgtgatttaaatgacatttcgaaagttcatgtttttatcgtcccaaatttgaaagttcgagatttttttgacatttttcccaattaccaggccacaagcccaaagtttttaaaagcatgttatagaaaaaagaccaaaaaagagaagaacactatacaagttctctgaataaatttacagtgtcttaaccactaggacaagggaaatcttttactaaagatccgatttattgtatttgtatatataatctacagccgcacgcaaataagtttaatcgagttgttcttcttctttgtctcggagaaggatttgtgtttgtatcatctcattttagcacggagagattaattgatttgaatgagaaagatgaagagaatctttggtgcaaagaataacaaagagctagcctcctccgtctattcaggatgcctctgatcgggttcctctctctctctctctctctctctctctctctctctctctctctctctctctctctctctctctctctctctcttttctttcaatttcattgttttcctcagctttatttgagaagtaaggattagtatagtgttcttcgagagccgtcgatttctgggttttatcgtaaaattagcgatttagcttttgagtacggtgatcatacttgtattacgtattacgtataagcatttgatgttgcattatctattgcatatcatattctcttgaatttaactttttagtcactaatcacaagaccgatttgctatgtttaaaatgttcgaaaaaataacataaagacggatttgctaatttggaaaatgcgcaagagaatattgatttttttttcttaatggtaagtatgtttgttattcttgattgtatttgatgtgataattctggataatttaataataaagtgtctttgtggcataaaaaaatttaaagggtaaatttgtttctttactaggttattaacccccgcgtatgctaattgatatcaaattaactacctgactgtttaatataatccccgagttaatataatcctcaagacatcagcaaatattaagagcatctacattgcacaacataagagaatgtctttaattacaaatgaaataaaagaaaaaaataagaaccaatgacattgtgccacataagctaagatgtctcaaaagaaatgtctttgatgtctccccagagacacaattctcttttcagcattaatttaaagacatttacctttttattttattcattaaaatctaaagacactcacaatttgttgggcaatggaggtggcctaaagaaactcttctttgatttcagttttcccatagaccttaagtatccgtgttttgaggattgagattatgtcactggtaagtttttagtcaatctatgttcttatcattttaagaatgaaattttattagtagtttatgttcttatttttttatatctactctattaacatctaattctatatttagatgcaatgagtgtggtgtcaaatatctcggctattaagaaattcccatttgtttgtcgccaaggtgaaaccgactatgaatcgagataattctcttttgatattttggacaatatttaagttttagtatttataagtatatttaataatttatctgccgtctgaaaattgaacttagatgtattgattagtgtatttttgtatcatattggttaggggagagaaaataaaatgctttgctgttggaagatgctgtgaaatcttggttacaaagtggtctaaatgtatcggtttagatgcatataactatgaaccaattgttgcaattgttcggttttggagaatcgctgagattgagggttagtttttttcaatactattgcaatcctatttacttatgatttttatatttattatctaattctaatcatgattttgtaacaggtggaaatgtcttgatgagtgaatttggatattcaaggctttacatcaatccaaccactttccatgagatagatattcgaagctacatgtaagactttaaacatttttctattgcattaattaaccataacatcaattaatcaatacaattttttctttttgttttttacagccgcagtttcaaagattatgatgaagttccagagaacccaatgatggaattgattgaagagaattaggagtttgacctagcagctcctattcttttttaaattacattttgaacttctgtttattttactccaaactttgtcattttaagttgttttttttgttgaactatgcttatgttttgaacctatataattattgtattcccgttgcctttattatctagcttactttttgttaaactcctaacaaagtttgcaattatgacattaaaaactcctaacaaactcctaacaaagtttgcaacgatgacataaaaatatagttatagttcttcatatttttgttaaactcctatgcttatgatttgttatttccgaccatgtttagcataaatataattactgatgattaattttaacattttaaaaataatttttttggtaccaaaaataaagcattaaaaactttgagacaaaccattcttggaaaaattcaggatcattatttattaagttcattttttcaactcaatgtcattgtcttatcaaaaacaaaaaacaaatatatatgtactctttagatttaaaaccctacaaaagaattatcttccaatgtcctttctatcatttaagagaaattttttttgtggaaacccgtgtactctttttaaagtttctttttggatagatatcattatcttttatgacttaaaaagaaatcaatacatatatcatagttaaaatttaacttcttttaaatgtaatatatctataggatttcagtctattatatatatatatatatatatatatatatatatatatatatattgtgctcttatacatactaggttattaaccccaatgatgctgagaatgtcgtggatgaagatgaagatggtgatgatgatgggagcgagacgaagagaacaagaaagagaaggacccgaaaggaatgcgggcgtttaagtttgctttagttgaggttgtaaaagatcttttaaaaccagcttggaaagaaggtaagcttaacaaagatggttacaaaaacatagtgaagaaggtagctgagaaagtgactggtacaatgcaaagtggaaacgttcctcaaacacaggagaagattgaccattatctatccgcttcgaaaccaaagcttaccaagctcgttcaggttctttcatacattatactcttttgctttgttaaacttaatccaccgcaaaacataccatgttgttaacccttgttttgtctctccaggcatacgtcggcaaaatcaagaagacctaatatgaattgtactcccatgttgtcttaatacaattccgtatctttccatcatcataaagcttgagagctgcagtggaaagtgtttgttaatctttggaggaagattagaagagcaggtgatgctttgttgtccccattagagagattttgtcccaattcttttttcttctttatcgacataatgtgagatggtccaagtctgataatagaccaaaattgcgttttatgtcctttgttttcttatatagaaacttagaaccaatttcggtgatctctttgtgactatatatgttgaatttgtcttttagccctttttcttttcttacagaactacgaaactcgttcctcaactcaaatgtatgtaactaacatatataccgcgggttaaatatttttgttattttttttatcacaaaatagaattttatgtttgtttttgtttccgttgattaataattattgataaggttgtgtatgctttttattgagtcataattatgatattagtaagtcaaatatgtgttattttatcttttaggatttgatttgtgatagacataaccacgggataatatttattttttattcataattgtttttttttaaaaatttaaataatttaaaattttggtgttttcaaatttaacccgtggaacatatgtaatttagtaactttgtattaaaattacacattaatgtatcaaagaagaataacattcagaggtgtcaaagaagattaacatttatactataatgttgattttatgtattttttgtaactaaaaatttaaaactgaaattgtatttgttatgttattattgttttgtttttttagtattgtatagttgtaatttgattgttaattctaggagtacacccatggtatccaaatttgtcccatctaaactcatagcaccatataaactcgtctcatccaaatccgtcctaccatgtaaactcgtctcctctaaacccatcccgtcatataaatccgtctcgtgataactaaaaataaaattgttctttttctgtttaataatatttttatttaagatacttcgagtcaatttacaattccaatataataagaaaaattgtatactatattgaaatttcaacaattacaatctaataagaatcaatatcggatcgttttgaagattttatatcgaattctttgaacaaaaaataacacaatttcttgttaaatattttgtatcttttaaattaatatatttcctatttgtattttttatcttcaatatatttggttttgataaattttagaaaacctgttcaaataattattaaatttgaatcccgaagatatttatgtgattttttaataatttaaagatatatatatatatatatatatatatatatatatatatattgtgtagatttgattatagaatttgtagattatgtttaaaaaaattctgtaaattataagtttaattgtaatggtttaaaaattccagaaaacaatattcatattgatattaaatttattttgaagtttcaaatttataaatatttgaaatttataagaaaatgacaaaattaagtttaacttcacgggacggggttatattgtgggacgggtttgggtggataataacatgggatgatatattacggagaaaatcttaaaattaaaaatcataatataattatacaatcttaaacactaaaaaaaattgaaaaattctttctaatgcccttttcatgatgccccttttcaactctaccttttttaattatttttatttctactctatttaattttttaaagaccattttactcctatttggaaatttttttaggttaacaaaatgaaattttaatattgttcgcctaaaatattctaaaattaatttctcgccaaatagttttttcgcaaaactttttttttggcgggaaatagatttacaagggattttaaaagggttttaaaagatttacaatggattttaaaagggttttaaaagatttacaagggattttaaaaggggtttaaaagatttacaagagattttaaaagggttttaaaagatttagaagagattttaaagggctttaaaagatttacaaaggttttttaaagatttttaaagggtttaaaagtgttttataagatttacaagggattttaaaagggttttaaaagatttacaagagatttttaaagggtttaaaagggttttaaaagggttttaaagggtttaaagggtttaaaagggttttaaagaatttacaagaagaccctttaaaaacttttgtaaattgttttaaaaccatctaaaatcccttgtaaatcttttaaaatcccttgtaaatcttttaaaacccttttaaaataccttgtaaatcttttataacacttttaaaatctcttgtgaatattttaaaaccctttgaaaatcccttgtaaatctacttccgccaaaaaaaatttacaaagatttttaaaagtttttttttggctgagaaaaaatttgttacgaaaaacaattttggagggaaatttgttttttggcgagaaaaaagtttggcggaaattttttttttggcaaaaaaaaaaaaatttggcgggaaaatttcagttttcaattacatgttcctattagaagagggtaatttggtcattctgttcaagggaaggggtatttttaaaaatgtacaacataaaagggtattgttacaaaagagtagtaagagaagggtagttttgcacatctcccaacaaaattaacaatattaacaaaacaaataaacttaaaactttaattttttaaaaacacatctcgattctttataataagtttaaacattataatatttaaactttatacgacaggttaaatttttgattgttttatctagaatttctaccgtagtatatcgtcacgtattaatagattttatatatatttataatgtttaaatttcttgtaaaattcaatttataattttcaaaacttcataatctttaaaattataaatattttaaaaacaactaaagctaaactttataaagtttgtaaaattataatatttaacttttgataaaaagttaaaaaatatttataatttttgaaactttgtaaagtttctattctttaaaataaagaatcaagcttcctgcttatttgttactcgaatcattttggttctttttatagtatggctttgaaccaatgtctaatttttttaagcgatatgggacattgtacacatattatttcatatcgattgaataatatatgtctatttaaaaaaatttgaattacatcaaaaaaatataatattttattaattatttatattttatataaattctaaataaattaaatataagatcaaatatttttttaaaaaaaaatcatatatttatgcttgatttaggtaaagatgtttaggaaattagttcaggtaaataacaaatatggttagtttagagatattatgtatataaatttggtaattaaattaataattttatatatatatatagaaaatggtaataaaaaccaattatgaggtgtgcaaattgtcctttaaccagtttaaatcggcctgaagagcttccttaaccggcctataccaccgttattcccgccatttaactcttctctgaaacttttttgggaaacacaaaaaaaaatgagaataaaaaactgggatctcatagagactgattcacttctgaaacggagatggctttgtcgacacctaaaaccctaatggatttttttcaacctgccaaacgtctcaaagcttccccttcttcttcctcctctttccccgccgtctccgtcgccggacgatcccgtgatttgggttctgtagcaaactcgccgcctcgtgtaaccgttaccactgcggtcgccgatgattcgtctggccttacacctgaacaggtcgctcgcgccgagttccacaagtttgtcgccaagtccaagagtaacctcgccgtttgctccgtgaaggtcacaaaagcaaaaggtttgttttttcttccttcttttagttaattgcttgtcatattgtttcccccattaagggttttgcgattttgaattgattttgggttggaaattacaactcaaggaaactgctacgtaccattgagtgagctcttagtagaagaatcatggcttaaagctcttcctggtgaatttcataaaccctacgccaaaaccctttctgatttccttgaacgtgagatcatcgctgacagtaaaagcactccgatttccattgcagtacttgattttcaatgctcttaatacaactcattttgaccaagttaagactgttattattggactggacatgtacatcatttgaaatgaacattgatttttcggagtttctgtttttgattttaacaagttattactctgtttgatttaggatccttatcatggacctggtcaagctatgggtttatccttctatgtgcctgaaggagaaaagtccttctagtctgttgaacatattcaaggagcttcataaagatgttggtgataagctgcacatggtgtacttcagaagaaacaagaaggaaaatgtgtcacacgtgacgagtttggcggttgaggatgtgacagggatcacacgtacgaagggttaaggttgtgccttgggattgatgagtataaataaagaagagatgctgtggagagtggcatgttgaatcaagtggcggattagtcgacatgagattatcatatggagagattagatttgaaaagatgatgagaatctaatctcatctttcatttgttttgattccaatctttgtaatatttaaacattgagagtttcattaatctgaggaaacttattaagataggcttgattattggtttccaaataagtttaatatcactaaagtctatcaattggtgcgtcgtgactgggtgacacgtagagggagaaatagccactcatcaagaaattaggttaagccgcaattttgggggctctacacctaaaaccttgtttctctctctatcgacaaacaaagctatggcagacaaggcgattttacctccgattcgaaaggtttcgtcatcggaggaacaatcagacatgtttggtgatatttatgagaagataggaacaatggcgctacaaatcaaagacgttggtgagggaaaacgtttaccagacaaaaagttggatgttgcgacaacaaatatcgaagctttgatgtctcgtttcaacacatctgacgcccggatgcaagagtttcaccgtcaactcgacatgctcatccactcttttccaagccgcgacagtggcaaggaacatggcggatctagtgcgtccccccaagtctcaggactcgcgtttccacccatcagcaacgttcgcagagccaatacgacgagatctgggttttaacaaccgcgacaagcttcttaagaacgtggatatgccactgtttgacggtgtagacacttacagctagattgcccgcgtcgagcattttttccggatggggggtttctcgagctggtctccgtcagcttaacaggggatgctttaagttggtataactgggcggtgaaccgtcaagggtttacaagctggccgcagttcaaggttcggttgttactgcgttttggtaaccttaagagtcgtggtccaagtcaaagtctgttatgcatcaaacagacaggcttcgtggtggagtacatccaccagtttgaggatctctcgtctcaggtctcaggccttgacgacatcaaacttgaagagatattcttaaatggtctttccttgaaaatgcaggagatagtacacatgtggaacctgcagaatctaccagaaatgattggggtagcgagagatatggagtccagtctgattcaccgagtggtactgaaagaactgcagagtggcaaaggagggtccaaaatccagtccgagagcagagcgttggtaccctaccagcctctggtttggaaatctaggcctttcatcacagaaccatcgggaaccaaggagagagcaacacctattatatcaagaccgcgaaaacatttcacggatgtagaacttgatgagaaacgtcgcaaagggttatgctttaagtgtgatgctcactatttcaaaggccatgtttgtgctaataaggacctacaagtgctggctgtggttcatgggtatgaagaagaagagccacaactcacaaatatgtctttatcctacacgtactttgttggtcttccatctgagcacacaatgatgatgcgtggcactatcggtaaacacgacatggtggtgatgttagatagtggggctacacacaacttcatcacaccaaaagtgacagagaaaacaaagtccggcactcagcgggccaagggctttaacattaagctgggtacgagtatcatggttcagggttctggtgtctccaaagatgtccatttcactgttcagggtcacgaatttgtcaatgatttcatcactttggagttgggaaatgttgatctcattttaggcatcgcatggcacaagacaatgggagacagtaatgctaattgggataaggagaagctgttttttctggcaccagggcagatagataacattgtcgggtgaaccaactttagctcagacaaagttgtctctcaaatcattaacgcctgttccaatatcagttcacaagcgttgcgagccaagtggggagacacaagagtcacacattctggcacaactgtcctcagtgttggaatcttatgcagaggtctttacaacaccaacgacacttccaccagttagaggcagggaacatgcaatcaaactcttaccacaagcaggctccattagcatcagaccgtacaggtacccccatgctcacaaagacgctatggagactctagtacgtgacatgcttcaatgtggtattattcgccccagtaagagccctttctccagtcttgtcttgctggtgaaaaagaaagatggctcgtggaggttttgtgttgactatagagccctcaacagagtcaccgttcttgacaaatttcccattcccatgatcgatgaacttttggatgaattacatggcacaacaatcttctccaagttggatctttgtttgggttaccatcaaataaggatgcgggaagatgacatcgagaagacagcttttcgtactcatgacggccattttgagttcctcgtgatgccttttggcctcacaaatgcaccagcttcgtttcaatcactcatgaatgagctttttgggccttttctcgggaaattcgtgctggttttctttgatgatatattaatctacagcaacaacctcactaaccatgttaaacatctcacattggtcatggaagtgcttgccaaacatcagctatttgccaaccgcaagaagtgcctacttagacagtctcagattgattatttgggacatgtgatctcggctcacggggtagccacagatccgtctaaaacagaggcaatgattcactggccaactcctaaatcagtcaaggaattgtttggattttcggtctgacaggatactatcgtcattttgtcaaagggtatggggtgttagccaaaccattaacggaactattgcgcaaggatcagttccagtggtcacatgcgcctcagttggcttttgatacccttaagactgcaatggtttctgctctggtgcttgcattaccaaattttgagaaaccttttgttgtggaatatgatgcatcaggttttggactgggggcagtgctaaagcaagatcatcaacctatcgcatactttagctatgggctcactgcaagggaacaacttaaaccaatctatgaaagggaactcatgacaatagtgatggcagttcagaaatggcgtcattatcttttggggagacgatttgtggttcatactgatcagaagagtctgaaatttctgctggagcaacgagaagtgtcactggaatatcaaaattggctcagtaaactcctcaactatacctttgacatcatctataagccaggcatcgacaacaaagctgcagatggtttatccagaatgatgcctacttcttcagctacggtacactcagccatgtttgctttgaaagtccttggcgtgattcaacttcaagacatctataaggaaattgagttggatgcagcactccaacgcaccatcaacatcattatgtcgggtttgtcctacaaacaaggttttgcagtcaaagacaacagattgtggtacaagaacaggttagtcattccaaacaattcccagttcatacctctaatcctatctgaaggtcatgaggggaagcttggaggacactatggtgtctttatgacaatgaaacgaattcaacagtcatttcattggaccgggttggtgaaagacgtgcagcgttttttggttgaatgccaagtgtgtcagactcataagacatctactcggtctccggcggggttgctgcaaccactacctatccctgagaaagtttgggaggatctcactatggattttatcgaagggttacccttttctaatggcattaatgtcattctggtggtggtggacagattgagcaagtatgctaacttcattgggttgcgtcacccgtttactgctgctgatgtcgcctctagtttcatacaagaaatagtccgcttgcatggctaccctacttcatcgtctaagatagggacatgatctttctaagcaatttctggagagagtacttcaagcaggcgggtactaaactgaaacatagcacatcgttccattttgaaactgacggccaaatagaacttactaatcgcagtctggaagcttacctcagatgcttggcttcgtctcatccacagacatggtagaaattcctggcttgggctgaattatggtacaacacctcttttcacacatctttaaagacaactccttttcaggttgtgtatggtcgacctcctccaactttgttgaagtatgaagaacactcaacaacaaatgttgatttggagcgactgctcaaggacagtgacatgatgctaggacggattaaagatcagctgactcttactcaacagctgatgaaaaacaatgcaaacaaacatcgcggagatgtggagttcaaggtgggtgactttgtttatctgaagctcagaccttacaggcagcattcagtcactcgaagagtttgccaaaaacttgctactaagtactatggactctttgaagtgcttgaacgcattggcaaggcggcttacagacttaagcttcaagagggatccaaaatccatccggtctttcatgtgtccttattgaagttcgtgttgggacaagcagcagaagtgaaccctcttcctgatatttatggtgaaataggagagttcactatggaaccagaggagatcttggatactcgctacaatgaggaggggtacttggaaggtttgattcaatggaaagggttgtcgtcccaggagaatacatgggtcattgtgaaggagttgttggcgcaattcccaacctttgcacttggggacaagctgcatttcgaatgcgtgggtattgataagctgcatagggtgtatttcagaagaaacaagaaggacaatgtgtcacacgtgacgagtttggcggttaaggatgtgacagggatcacacgtacgaagggttaaggttgtgccttgggattgatgaatataaataaagaagagatgctgtggagagtggcatgttgaatcaagtggaggattagtcaacatgagactatcatatggagagattagatttgaagagatgctgagaatctaatctcatctttcatttgttttgattccaatctttgtaatatctaaacattgagagtttcattaatcttaggaaatgttttaagattggcttgattattggtttccaaataagttttttttttttttttttttttgtctctcaacttatattaatcttaatatgcggttacaatacgaggaatgaaggagctctttgccaaagagtccacatctcaaaacttcaaagttgatacaaagctaaaatacaaagcatagataaaataagatagaaggttaaaatctaggataataaccggaagcaccttcgaggggacttcatagttgatcgcttggacatcgattttccactctcggatctgtagaagatctgaggtgaaatgttcataagccatgaaaggcgaatgaacaaacctttgagctcttgaagtcatcacggccaagcttttaaacaacttctccaagtaggaggaaaatggtggtaagtgcctctccaaagtggaggaaggtaaggaaattgatctctccacgagggaggaagttaagaggttgagtcgtaacaagccgaagaaatacaaggcagcatggccacttgagtagaacaaagaagcaaccaacttgaaaaactttagacgaaagcatgtgtagaaaacacttactaggcaccataggcccaatagatgcaaaagcccaggcccatctcagaaaaatggcccatccaagaggaattgttcatcgttggagaaagcgtcaccacgtcccgtcttggtcttccatcgtcaactgtcttgagaactgtgaggatggctgaggatgagaggatggtggtcggcggggggtcggaggaggcgccagagaacatccctgaatcggggaaaagcgattccagggggacgaaggagaagagaagagcgacatatctaacctcgtgaaaagcatatctggggtatcctagcggctggtgaaagggcctctggtaacacaccgggaatagatctaccctagatgagagcaaggagacaccgaacaacaagtcggtgaaccaactttgtaggatctgggcgaaagtcaaatcacagaaaatgattctaaattgaaaccaagttgtaactaaagagaaaaaaatggaaaagcagaaacaaaagaaggaaacccgacgccggtgagccatggcttcatcggcgtcagagaacttgagcaaagaagaagccttggtaattgtgcctgggagcgtttcgactagggccgaccactcgtatagggttctgagaccaagtgacttgaaattgactaattttatgtcccaaataagtttaataccactaaagtctatcagttggctgttccatcccacgtcacggtaatcttcagaaatgggttatggaggtaaatggaacatctctacttattggtgccatcaattctcagttttacttggagaaggtaaagcaattcacttttggttttctttttagggtgtgttgttgctgaatgttgttcttacaggtagtgtctcttatcgtgtgacgaccttatatgtataaaactgtcaaaatcctaaaattcttctcacaaatatgtcggttaacttgctttctaattcagtaaagtgtaaacagcctaattcacatgcaaagaaaggatgggaacaattcactgatactgttattcaaagtatctcacagcatcagtgaattgttcccattagcaaatattaacaactcatataactcatatttttggtatatcattctagtaattaaacctaacatatgggtcttcctagtaaattttcctttttttcctatattaaaaccttgatactatataaaagttgaagctatttgcttttaaaggcgtccacatagcatttaaaataacaaatctggagttggtacatcaataattaacatatttagccgctaattaattaatatttttgaaaatagtaattactttctattttaaaataataaaaaaggaaaataacaaatattaaatttaaacttttagaaaaggaatttcagtaattttaattatgtaatattaaacccaaacctgtataggattttacctaactaatccagagcagccacattataagtcgatgctatttgcttcttaggatgtccttattggatttgaaacaacgaatcgcggttagacatgtcattagttagcatttttagctataatgttagtcatataagttgaggtcttttaacctgggaagcataaaagtgaagataatctaaactgcaacatcaaagtagaaaactaatagagtttaaaaccaatttagaagataaaacattttgttagaataataaaaaaacaaaacaaagcaaaaccggaattttattcttgagagttcaaacaaagagtttattgacttgactcagctacctatcgacttactaacaaggaaaaagggattttcaaaaaacaaatatagagcatgtgaaaagtttggaaggtagggtatgcagagcttagacaaaatgataagaaaacagaaatagacattgtagataagaagtatataaaagatttgttcacaagaaggtgaagtgaagagagattaaggtgtgtttggtctttaagcgttaaagaaacgtaacaagaacgtggtttgatggtggtgtttttattcgtatcaatttgaatcaggttctcaaagatataaattgaggtctttcagtctaggaagcgtgaaggtgaagaggatctaaactgcatcaaaagagagaagtgatagagttcagtaacaattttgaagcttataacagaaaacaaaacaaagaacatcttgcttgaaaaatgcttatactaacaagcaaagaaaaagagattttcgaagaagatatatggagcatgtgaaaagtttagaaggtatggcacatattgcttagacaaaatcaaaaggggatggaaagagacactgtaagaaagaatgaaacaaataaaatgagtgcttgcaaaaagattgggagagtgatagctcttcgtagaaaaatatgaatctatactatataaaagttgaagctatttgcttctaaaggtgtccacgtaggatttaaaatgactaatcgagagttatcacatcaataattaacatattttgcatctaattagttcataaaatgatggaaagagacaccgtaggaaagaagtatgtgaaagattttttcacaagaaggtgaggtgaagagggattaaagagtgtttggtttgttaagcgtacattatgatattcaaattctgccaatccaatatttagtcatgagcctatcatgatgtgattgaaatactagatttacaaatagactagctctaatctagcgtgggttcataacctagttttattatataaagtacggttttgaaagttactaactcacgagatcatgacacgtgattatttgaacgatctcagattttgacatgtgtttgattttttttttttagtttttcctaaaagaaaatagaaaactaaaaaaaaaaaaaaatttacatttattaatttatatgtttatatataaaaaataaacttataattttcttaactaaaatggaaaactaacaataagatagaatgtctagaattaaattatatagaaaactaacaataagatggagtgtattgaattaaattatatattttactatggtaaaatagatatttaaattgtattgcaaaatcgaatttgtaagattgaaatttggtttaaagaaatactaaattacatactgaaaaacatatgagttacattactatttaaaattcaaataacatcaataagatatatgtatcttagggacaacatagtcgaggttactcatgtatatagtaaagctaatcgcatagtgaatggattagcaaactatgtgttttaattactgctcggtttgtatttatttgatgtttgtccgacagttgtaagtccgacattgttagaggatacaaacgggatgtcgtttccatagagtgtccgaatgtagtttttatgttatgaataacaaaatagtttattatgatgaaatagatagttaaaatataagtaaaattgaatgtctatgattacaatttatttcatacaaaaattactacattaaatattaaaaaaagtgtgtagattactatttactatataaagtttaaatattattgataaatatttaaataaattttataaatttatatcatacacccgcctatttaggcggttcttatctagtcttattatataaagtatggttttcaaagttactaactcatacgatcgtgccacatgtcaagtcaaacgatcagatgtttacatgtgtcattcaaaatttaatttagtatgatttagtatggataagaatactaattaaaaagaccattgaagtttaaaatagtaatataattttctaaacattattttagttggataaaattatatttgtcaatgtaatacaatgtttttattcgtcaaattaaaacacaaaatattaatgaacttataagaataaaattttgaatacttatattttattctaagaattttaactcatcgtatgatggagcgtcttgcatcttttgatgtgatactatatctatgttttattttaagaatttttactcatgtaatcataagtgaaaatagaacattttgagaaaaaatagcttagcttataggatttaacttttcaattatttttaatgagaatattttcatttattaattttaactcatttgatattaatttgcatgatgtaagattaacttacgagattaccgcatatataaaaaatatattttcaacaatgtttggttttaaatatttttgtggatttctatttttttaattaattattagccctaagcgttttggtattcgagtcaggttcgggtcggctattttgggtttgggtttagaagtttaggacccgtttgggtaatttaagatttcaggttgggttagggttcgagtttatttatatattaaaatatcaaattttgtgtgcaaatctattaaattacttgaaatttttaaaatatttccaaaacaacacgagtagttttgcttgaatatatctaaaaataaacaaaaataattaaaatatccgaaaaaatcctaatattttctgtatacaagtataaatataactaatatatacttatatttgagatatgtttggatacctattcaggttcgggttttttgggttttgaagtttagaaccgctcgggtctttgaaaattttgggttcgggttcgggttggttcttagggttggggtattatgcctagacctattaattatgttttgttaatttttaattatttttaatactaactaggatatagatttgatatgtcataaatattattttgatatgaaaatgttatcactcaatatgaagtgtgtagaatttaaatcgagtttattatgatgacatagatagttaaactgtattacaaaattgaatgtgtaagatataaatttattttttctttttcttttctagatattaaattaaatatagaatgatgatcggttactttttagaattcaaatatcatttataagattgagtgtgtataattaaaatagaatggataagactgaaattttgtttaaaccaataattattaaattaaatatcaagaaaaatatattgattattatacaaaattctatcgataaaacttgatttttgtatcttagacccgcctaaataggcgggccttatctagtactatataaaagttgaagttacttgtttctaaagctgtccacataggatttaaaacaacgaatcaggagctaacacatcaataattaacattttttgctattaggttaattgacaattttttagattttaatgattttctatatttttgttttgtaaaatgaaaaagaaatatatggagacataagaatattttgtcataaaaatccaaagtttttatatgtaatagtttactaaaattataattaaaaatatttaaaaatatggaaaatatcttaatttaaaatccggaaacagaataaatattaaaataattttaatattaacatacataatatatggataaacaaattgtaaaatgattttatataaaagttactaaaattataaacgaaaatatttaacggaaaaatatactaacttaaaaatgaaaacatttattaagaaactaatggtcattattagtttcattaaattattagtacttcatctttaaagaaaatagccatataagcacaacatgaatcatatagattgatatttttaaaatttatgaattttatgttaattgttttttatagatacaaccaattgcataacttcacatcagcatttaattttgttaaaacaaaaatcgaattaatttaaattttttaaaataagtaaagtcgaagctataaacttctaagattgtccacataatattgtaaacgatcaatcgcataacttcatgtcatcaacttaatttttttttttaatcattaattttgaatttaaataaatatttccttttttgtcaaacaaatgaatatctttttaccaaaactttcccattagcaagacaaagagaaatatgttaatgtttaggtaaaaagtgaattttagtttcccattaataacgaaaagtaaaaaacattaaacaacaaaaaaaaaataaagttaatgtttacctaagaaagttattaaattaaaagaaaaatgttattaaaaagaaaatttgcaaaacaaataaaataagttaaagtcaaccacaaaaagctttgggttaaaatgagaaggaaaaggctaataatgaaatttaaaacttccataattaaagtattgattttatgtatagattttaaatagacatgttatatagtacagggaaccatattgaagtgggttcgaggagaaagactcgtattaagaactctctctactacatgtatagacaaatgctagagactccggcgacttctcggctcttatatggccacaaagtcgaccgattcttacagcaatattaaaattgccgatcgggttggtgttgagattataaagacgccgttatatatggcaccgatatatgttaatggaaacgaatatgaatcagcaactgacgtgtgggcgttaggatgtgatgtcgttgagatgtttagtggcaaaacgacatggattgtgaaagcaagatcacacttcatgttgctttgatatgaatccgagttaccgaagattctagaattgttgtcggaagaaggcaaatattttttgtcgaagtgttttgttaaagatcctgagaaaagatggacgactgagatgtttttaaaccattcgtttgtagccttcgatcttgaagatgatcaccgaaaagactctgttgtgcacgttaaggaagaagagaaagtactgatacctccaaagtgtcattttaataaatctgttttgacttatttaaatagtaaaattttactaggatagaattgatcggctggagaactataaaatacattcattttatttttcatgtcatgatatcaaaatcgaaactcacattcatataaaaactagaaaagattttcttcaactcattattttattgaattatatttggtgattgtttatagatataaagaaaaataataattttaacaatcataagtgcagtagcaggttctggttaatggtgtgccggttggtggttcacacgttcctgttcctttccatttatcgcgacaatctaggttacagtctttaggatcacagtgatctccttcaagataatcatgacatatatggccttgcgtcttctccaccaccattcctaataatacatatttaaaacatatactatcatttaaattgtttctcttataaaactaaaaaggtgataaacgaaaaaccatcaaagcataccaataataaatagtacaataaaaaattgtaagaaccctatttttagccatctttgatggtacaaataaaataaaactgatggatgttattgtattgtgaacaataggataaattggatgcatacatatatataaatatcaagaattaaaataaaaatgaaagaaatcaattgttagtaattaatgaaaacaaatctaaaaagtaatcaaaagtaagaaaaatatgataaagtcaacaaaaaaaaggatgcatagaaaaacgttaaatagtgttgaccaaaaaaggagagaaatcagttagtacttaatgaaatgcttgaataggaacaacccccccataaaaatgaaatatatctagaaattaattaaaagtgaaaacaaacaagaacattataaaccgtagttaataatactttatcataaatagaataaaattttgataatgtcaacaaatatgaaatagatgttagaaaaatatatatacaaaacaagatatatatttattcatttaatttgaaaatctataaaattataactaactaagtaggtaagcaaacataccatgagctcacatgtaattcttctattttctaattttatgaatagtttatttaaaaattaaattataaaatcatttaatatctgtctaatcaggtttacatactcataaaataaattcgtagaatattaatctttaaaccgatttaaaaaaactaattaattttgcaatgaaatttgaatgcatcctctaatttcaaacaaaaagattatcataaaacatcaaataaaagaaatagagagagtattcaacaattttccacttttctgccttcaatatataagacctttaagtttgacaaaaaatgctaagctacataactaggttatatttaaatttttcgatatactatagaaaagttgaagatatttgcttttaaaggcgtccatgtaggatttaaaacaactgactgagagttgaacatcaataattaacatatttaacatctaattaattaacatttttgaaaatactaattattttctatttttttttaaaaaaggaataacaaatattaaatttaaagtaataaaacaagaagcaaagtaattttaaataagtcctcaccaaaaaaaaaagtaattataattatgtaatattttctttatgggattttacacaactaatcaaagaagccacatcataccttaacatttttaaatcttattaattaacaaattaatatatatttaaccaaatttctttttaaaataaaatttaatgcaattttatttaattaagcttctagatccgtccacgtgggatttaaaacaacttatttggatgccacatcaataattgacatatttaacatctaattaattaacattttagaaaatagtaattactttccattttaaaataaaaaaggaaaataacaaattttaaatttaaacttataaaaaaaggaagctaagtaattataattatgtaatattatttttataggaatttacacatctaatccagagtagccacatcataaattaacatttctaaatctaattaattaacatattaaaatatatttaatcaaaatacgttttaaaaataaatctatactatataaaatttgaaactatttgcttgtaaagccgtccacgtacgattttaaacgaccaatcgggagctgccacatcaataattaacatatttagcatataattaattaacatttttgaaaacaaccaatcgagagctgccacatcaataattaacatatttagtatctaattaattaacattttaaaaaatagtaattacttcctattttaaaatataaaataaaaagggaactaacaaatattatatttaaacttataaataaggatcctataattataattatgtaatattaaacccaaactcttataggattttatacaactaatgcaatatttttaaatataacttaaagaaacgtaacaaaacattttaaatataactttaagaaatgtaacaaagacgtggtttgatagtggtgtttttaatcgtatcaagttctcaaagatataaattgaggtctttcagtccggaaaacgtgaaggtgaaaaggatctaaactgcataaaaagagagaagtgatagagttaaataccaatttagcagctaaaacattttctttaaataacagaaaacaaaacaaagtacatcttgacgagcttgaaaaatgcttatactaacaagaaaaagaagagatttttgaagaaaaaatatggagcatgtgaaaggtttagaaggtatgccacattttgcttaaacaaatcagaagaggatggaaagagacattgtaagaaaaaatgaaacaaataaaactagtgcttgcaaaaagatagggagagtgatagctctctgtaaaaaattgtgaagacagaaattcatatatatattgaaaaaaatgtgagaaaaatatgagttgttaaaagaaagtgtagataagcttatgaatatacttctatataatatcttatttctagaagagctatactaactaatgttgcgaagataaacgaaaaacaatagtaaatttacgggtaccaaaatgagaaagtcgtcgaagttattttccatacgacaattaatttcatacgtaaaacgacgtcattttcctaaacatctaaagataaagagagagtcatgaaccaaaaaaatgttcatttgataaatattgtaaacctaaaagttgtattaaagttacttttagttatgtatttaaattgtaaatatttgtcatggtaattttaaaattcaaagagtttataatattaacaacatgtagacatataaaaacatatatttcaaaattttcaataaaaaattttagtcacacaaaaatttattaaaagttttacgaatagaccaacgggtagcgtgggttgataacctagtctatactatataaaaattgaagctatttgctttctgaaggcgttcacgtaggatttaaaacaacgaatcgggagttgccacatcaaaaattaacatatttaacgtctaattaattaacatttgtgaaatattaattattttctattttaaaataaaaaaggaaagaacatagaccactgaccactaaaaataattaacatagtatttaaaagaaaaaaggtacattgaccctaaattaagtaataataagggaattttgcaaaatcttccatattcccctctgaaacttacattccctaccatattctacctcaccttataaagtctaccacatttggtaattcgtggacgaaaatgcccttaaggtgggtcagggactctgacttagatggtgacagcttttggcagatgtgatgatacaggacgaaaaatcatgatggaagcataaaggattaggagaaaaaataatagagaacagatgtcttctactgttgttattgggtatttaaaattgacttgtataagaaaattggttatccaaaattttgcgggggacaacgtaatagataatacattagaagatatgattacctgctagcgggggataacgtaatacataatgcattaggagacatgattacctgttagcggagaaatttcgcgggggacaacgtaatatataatacattaggagatatgattacctgctagcgggggacaacgtaatatataatgcattaagagacatgattacctgttagcggagaacaattggtgacagacttttgttttagtctccaaatcttgtctccgaatagaaattctctgttacatatacgttttgtccatcatcttgctctattattatgaatcctacatcttatatgcaattattttcatttaagaattttgaattttatttagatttttcgccatctattttggtgtacagattagttgagcgttattatcttcatctacatatttacatattttaataatatgttatattggggataagttcatatcgaatgagtaatagaattagatcggggacaaattcagatcgaatgatagacaagataatatgtaataactggatatttttgttattttacaatacaagaaaaaaaaaatcgtgtcggtgaaaacaataatgctcagctaatctgtggaccaaaatagatggtgaaaaatctaaatcaaattcgaacccttaaatgagaacaattggtagataaaatgtgggattcatgataattttaaaagatggtgaaatcggggacaagatctagacataaaagagaatttttttttgggcaaagagttgttttcattacattaggttagaacccaaatacaaagataataggatgttaagatcccatagtttaaagcacaacaaaaagggacaaaccccaaagctacaataagaaagatagaaatatacataaagttaatcaacaagaagtccttgagagctttgagccaaaagcaaacatgctttatggaacttgtgagatcaaagtttgtcgatgattcctccaagagcgagtcaatggatgaaagagttgccaatgtcaatagacgaatgggcgttgatgaaagggtcaaaggtgagaaactcgccggcacgagagtaactacatgaggtagtgctttgagataggttcgaacaatggtgaaggttttcagctgcttgcgtttgcttgctaaagtttcataggaatgagagttaaacttgggccaagctgagcagagggaaacattaaagagaatttatgatgattaaaaattaggggacaaaatcaattaaaagttatatgtaaagaatttgtgcacgttgtcgggagaagtgagagagagacaaaaacgtttcattttgtattcggaaagataatgatgtgtggttaaagcgcacggatctcgaggaaggagagatgaaatagagaagaaatagtgagggcaatatagatattttaagtggaaatgtggtatgatgtgtaagggaggaagaattatggtagattgcataagaaattgaaaatatatggtagattttataatttttcctaataataagatgtcttattgtcagcatttaatcaagcacactctgtaaattattttttcagtaacaaagaatctttaaaatcattttgaatctgaatattcaagcttcaatactttataaatttttaaattcttagctctttaagaaaaagatgcatataatgtaaataaatttttttttgttatataaattttaaataataataataataataaaggacaattgcaggtaaatcatatttattttctttatatactatatatttctattttcttcttggtcatatttgtttattttaaagtgtttggacgcttactggtatgcctttattgcttgtcaagtggccatgttgttctttatatgtttagtggtatatgctttacttttattctttactcaattcgattgtcttattttcttccaattttaatcacttgaaaagcaaagcatatgcattgtaatggatgttttgattggattccactcacgttagtcaataataaaaggtccaataagtcatatatctaattaaaaacaactatactattttttaataaaacaaaattaaaatgttaatattaggtataattaataagaccaagtgaactcccaccagttagtaatatcattgggcattattgaactgaagatttttgtcttatagttcacattattcaataattaaagcaagattccattttcttattccctgcaaagatgcttggttgttgaatgaaacaaaaatgcttttccataaataaaataaattaaccgaagtttttgattcagctttcaaatggagatccatctggttcgtttaggaattaagtatctttaatggaatttctgctcatttactaacttctagcatctttttacaattgtatacacacattcagtacaaatatataacaaaaccacatcgacctcaatataatttcactggtcaacactcctggaacactctaaaaaagcactgattaccaatatatttccaacggattttaaaatattacaaacgatataatatatgtatatatatatatataatacgtgatgtacatgaatgaatcttaatctatttaattttacctaaagttttattaataataaaaaaatttacatttattttaatttattaaaaatactcactatgtttcaatctatttttgggggcaaaaggcttccattcacttgaatgttcaaaaagcgagaagtttgtaaaagttaaaactaaaacaatacaaagagttttttcaaaaagatgctcaattttgaaaagctcgcaatttttaaagaatctcttgaaacttcggatgattcatagtattaatgtttggttcacacacaagtatttatataatttgtggatcaaaagtcttaagatcaaaagtacaagatggaatatgtatacagaaagtatagaaatgtttttataatcgtgtaagtaaacatagaagcgtataggaaaagtagacaaattgtattaaaaaaagatagtagtattgtattgataatatgtaaagatttggtcccaagataagaaatgatatttagcgtgattatttgaaatatgacaatggttatgtctaaaattgtggtgaaaaactgagaagacgttcacacaaaaaaaaaaaataattgagaagacgagatccttttttttgaagtcttcacctctcttttatactttatttctatctctcaatgtgccttacttattatttctagtataactcagtgaataactctcatggtatatatgatgacaaaaaaaaaaaactctcatggtaattaatttataaagttttattcctttgatcatgagaagtaattcatgaacggaatcacaaattaatgtcaagattttaccacctcttttatgcactgtagacatttttggattttctaaattgatggtcctatcatgctcaagatggatccaaagcatctacaaaagtttttctcctcaaggaattctcactagctcaaaatttttgtgaacctcttagctagacttttcaatagtatgaggtatgcttccattcttgcatcctttacttcgtaagcgcatttgaatttattacaatcttttactttgcaattatttattcactactgatcccgagtgaaaggcaaattctggctattcgggtttcgtattcagcttagttgtcgaggttgacatggtgtagttttaacttcaatcttttacatgaaagactacacctaaactacaagtgcacaataaatcagtaatcgtatttgaagatagatcccattgagagtgtagctatagaagatcaggcgaagacaaaactaaacttaggggttttggttctcggtttcctaataactaatgcaatgaaagcaaatgaaagcaatgaatgaaagcaagtaaatgaatgaaagcaatgtaagaatcggttaatagtggttgtaagtatgcgatttaaggctttcggcattctaggatttctactggtatcttggttctcgataaatagggatgtcaaccagaccttatgtccacgggcctggtccgtttagtaacatagtggggtgggtacaggcctatgtagtgaagtccaaaaaatagcgggcctagcaggtatgatccgtttggattgcggattaaacaagacatgcccattaaatgtagcgggtttgcgggcgacccgaaaaagacctttgcatcttcgtcgttcaatcgttcgcgcttcaattcttcttgaatccttgatttattgaaataattttgtagtgaattggaagtaatctttcatttgttgcttcaattctaatcgaatccttgtttgttcttttatcttttgtagtgttcttgtttgttcaatcgaaacaaaaaagctaagatcttactatgaatctgtgatcgcttctaggccagcggtcgaggttgtgaaattgagaacgaataagcagagagattgagaattttgggtttgttatagttaacccaacaacttcttccttttcaatttcataccatgagcctgctgttgagaagataattcatgttttctggtctcgcctagattttcacctcctagtttcacttattaagtctcttgaaaaggaaagttgagagtcaagagaaagcatgttcaaacattgctccttttgataataacttcaagatcgaatgaaccttattttttgcaatctttattcaccattctacatgatgtatccctatttttaccggttttaactatgttttaggtataggttttagagtctatttgttatttctagagttttttctagtgtttttcatgttattacatgcttaggattcatttggagataatggagcattgtggaggaaaacagagaacttatgctgcagaagaaatcaggagactaaaaaccgcgtaggtgtcgaaccgagtgacaccaataccagacggcaattcagagacgcaacttattaaagttttgaagattttcaaattaggtccagaactttcccttatttttaaagaatgcccatcacgtttttaggtcatatatatagatttaaaggtcattgtttagacctaagcttggagaggctattccccttatctcttttgttcttggaagcaaaaccctttggagactccctttagagaagatctttcttactctttctcatgatatatagccgtttttactttcttgtcttacaacctcacaatctgctattgctttcttctatttctttttattttcactactattttacttagcttaattcaaaaccttggtctattttgtgatctgagagctttgtggaattcaaccattaagtgctacaatcgatctcttatttgagagagtggtcttatggcaatttgaaccatatcaaatttggcgccgttgccgaagttctctacgattcaccattaaattttgtctaagcttctatttttctttttctttttatttacttagtctttctcttttctttttcttgtgtgtttcaggtgtttgtctaatcacagaaccaggaactagagagaaacatgaacgagagtaagaaaaatattgtctcagaactgatgatagcactgaattgtcaacatgctaaggaaagtcgagttatagtactagtgtcaattgacaccaccactcgcttcgatcgacacacatcactggttgaagcagagtcgtctccgatagcaacttttcaagttgggatcactcctataagtccattcactactgtcacgtcacactgcacttctcatactttatccacctcttaaacggctaaggtactcctctcctcctcataaacctccagatatcctcaataagactttaaaatttccaacaaatgtttcacggttaagcaagctacaagtttctcgtcgagcggtagttctttcttttgatgattatgcaggaaaaagaagtattccagccatacttgagcccaccctgctgatgctcctctcttcctagatagacctcatacactaattgcttatacaccagcatggatgataagaagtctttctccgcgatatttactaccaccatctgatccacctgatccccatattccatcaaagtcaagctattgactataaacaagcgcttagtgggaggcaacccactagtatggtttctttttctttttctttttctttacttttttgttttaattttctcgcttactccggatttgaataccactggggacagagccatttaagtctaggggaggcgcttactaactacgtttttctttttgagtcttattcttattcttatgtttctttttgagtcgttttattgagtcaaaattttgtaaggaattatgatctctattctttagattattgcctggttgattaatgttgcaggttcgactcaatgaggatatcctggtttccaacacaattcattaaggccggacctaatctcactgctcttccttttacctcatcaaaacggttagtgttcatagaacttgactccttgttcatacctgatattgagaccaatgtgaaaaagaaaagtattcctctccccttataaaaaaaaaagaagaagcaagagattgatatgattttcggtagtgtataggggtaggaatatttcccatgaccccattattatatattattaggaatgatcaattacaaaggttggaaatatgtcgagggtgtcgatccagtatgcgagttcccctttgtttactcttcaaaaagaacaagtctgggggagagaaagaataccaaagaaaaaaaatatatatataaagaatggtcgattcatcatggtatagtacatgaatgagtctaaaaggttcttgaatattagcttgattgatgagacccagcgatgaaagcctagtggaaatagttgtggaattaggtatggaatctagaatgttgtgtaagcttgcggagaaatacatgttggttaggatttgattagaactgctaggcatatggatttggttaggatgatcatggtaataggctatagaatgttaggagttcttctgttttcaaacctcttccacgggttcgccttttgtgttttgcttgagggtaagcaaaagctaagtttaggggagttgatatatccctattttttacttgttttaactatgttttaggtataggttttagagtatattagttatttatagagtcttttctagtctttttcatattattacatgtttgggattcatttggagataatggagcattctagaggaaaacagagaacttatgctgcagaagaaatctggggactaaaaaccgcgtagatgtcgagcgacaccaataccggacggcatcttatagacgcaacttattgaagttttgaagatttcccaattcggcccagaacctttccttatttataaagaaggcccatcacgtttttagttcatatatatagattttaaaagttattgtttagacctaagtttggagaggctattccccttatctcttttgttcttgggagcaaaaccccgttctttctcatgatatattgactattgatttcctattcagattatgatttgtgtttctttgatcatgtttgagtaatccacttgttaggtttagggtttcttattagggattcatatggtttagtagattacccccctgctaggttatctgtagaatttttcatctttaattgttcttaatgctagttctagagtaattaactagaacttgaatccaaataataaatatacccgccatagttggatctattatttgatgagcctggtttataggtatgtaataagaatcggcctatctactaaggtgaacagttgaacttgtttagaatgcatgtctaggtataagatctcttgacactttgcggtcggttcgttcgattgcaggcaggcccgtctgccatctctatcgacaaactaggattatgatctcttaagtttctattgttttgttctagttaataactacgaaggcagaataaacaaattaatctaggttataggactaaccgataatctttctatactccgtttctcaacttacgcatgcaacaacgcagttcaatgcattaggatcggattcgctaagtactttatgtcttgtcactcaacttatgaagacaacaacacgaaggattggtaacactatgttcgagattaggtttactaggtcagagctctaaacctcttggatcagcgtttggtgatcaatctaaacccatgcattaagtaaaagatctcccaaaataatctaagtgagaaagaaatacggacctaacaacctaatatgatttgaaccataaatcccgtttaaatcaactcataaaacccaacaaagagaactacttgctcatgatgcaaagaaacgacatggaggtgaagtagaaaagcatcttaaacgaatcaaataaagaaagagggatcaaaggaaacttctttaggtgtcacataagataacttgtctccccaaaagttgtataagaaagagtagaagaagagaataaagagatcaaagaagaacaagagtagatattttcaagggacgacaaacttcaagaacatggagggcttctacgaattgagtttggaggctgagagtctcgtcggggttgtggctgtgaaggaggcgaagatatgctctaagaggtttctgtaaaatcatgttagggtttcatcatttagtctcggtttttataggcttcaattaggtcaaggggcaaagtcgtctttctgttgattaggtaagtggttggtcgagcttctggctttgtggtgagtcttagtgaccagttggaagagtgagagacaacacggatgcaagcttcatgatcggtattacaagttatttttcattatactttaaataatagtataaatttatacttataaaatattaaaaaaaaaaaaaccacacaaatatatatatgtaactcgcaaatatacttggcttgaccctagactaaataattaactaaatatattaatatacgaaagaaacacataaacacgtcctcaccttatccaatcaactcataaatcatggtttagagcaagtccattgggagatccttaccagtttttaacataaatctttaataattttggaaaaaaataaatctaaaatgtgatttaagcttgggatcgcaccttattttagagttttttcagttgttaaggtgctcatacgtggcaactactcattggttgctttttttgacaaaacattttttttcttttgccgtgttttgcttttcaaattgattctcctctcttctcttctcttgttaactccggtggcaattgaacgattggtgatcatcatcatcacgcgtttatatcatcaaatcggaagagattatcgacggaatttgtctcttatcctccgtgctcatcatctcaaccgacgctgctcaacgtcgatgagtttggtgaacttaatcggagaggactgtgaaccaaatcggagatggggtttttcactttttggggtcttttagtaaaacaatctcattttcattcattagcaaaagatcacaattgggggtttatatacaattagacttggcctaaaccataagccactaaaccaaattaagattggtttatagaataccaatctgcacagactctataataagaagaagctaaactatatacaaaatctatgctatatacattaatagtccctcttatctcaattgaagttgcttggtaccaatagtgtatcagaaattcacaatcattatcttctttgcatctttttggagttgtcaaggaatcaaactcatttgatcattgtaggtaacgtggatatatgaagcatatgtttttggggaatgataagtgcttaaccatgattgaaccacataagacatggtgaaagagaaaagaagaattgataagtgcgttatttagatttaggagatcaagctccacgtttccatattcccactttgttaattatgttctttggttttaggattagttatcgatcccctttgctttcctttgtgtacttaaaggcttccaagttatgagaaggaattatacttgatttgccaaaagaaacttgtgtttgtgttgtgtgtttacacattctcttagctttgaagaaggaccacctaacagggaatcaaagttttgtaaatagaacccacggcgacgtcgaaatgtatgtatgcttcaatcttgtgtgggttaggggtagaagaaatgatgggattggtcgaactaaggatggttagattcttgttgatcttcaaatggagaacaagatcaccaaagacatggctgaggatgaattggaaacgcagagtctagaagatagttgcttggacttgattttgttggtttttattttctctgagaaaaagtgttgatcttttaaggtttctctgaaaatccttaatgagatgattctaccattggaggaggaaaaaataagaatctccttatgaagtccttaactttgaattatgcaaaaagtatgattaatatattgaaaattcctaatgagggactctaccactagggatgctcttaggaataacaacatcagcaatatggttcaaaaatgatcccggtctacatcagtttagattaactggtaaaggattaaatcataataatatccaaaacttaattcattaaaccaacccaaattctaaggagggtgtatccaatcttatattttgagtgatttgagttattttgagtttttatatgattttgaaaaatttgggggaatttaaggaagttgttataatctatggtaaaatcttctcaaattccacctaaaactatgggatttaaaattctgtatttttaactaaggaaatccactaaaattcatttaagtctcttcaagtcactacaaatccaatccttaaaatgttttcaataacagggaattttaaagtagattttagaatcactagttaataacattaaattttatgagatttgtaaaaatccatgattgaataatataggatttgttattttaacacaaattacttgaaatgtttgattgaatacaccccctaaatctcggtaaaatagattttggcgtctccttaattatatttattagaaccggtttaataactaaattaatctgtgaatttaatattaatcgcccaaacacgctatgctaagccacaccataattcaattcacgtgaccataatattacgtcaccggttttctgtactttaattacttggtttagttccctggttcaataattaacaaaagcaacacaagtaaaccttcgcaatttaacattttaccaaaaaaataaaaaacaaaagtgtaaccttcgccgtttacctttgccggcgtttacactcgacggttcatgacgtctcgacgaagtggatctgcaacggttcaaccccatggtggttacgtcctcatgactcaacaattaaacaacaacagatgaacaaaacataaaacaaacatgaagcttcatgtacaagctgttggaactcaattttacatatgtggctccgaccaactttccggcgacttttccggtgatgtacgtcaccggaatgaccggatgatagagtctttggattccttgtaatgagcactataagatagtatagttacatgtaaatattgaagttattatgaatgagtaattgagatctaaagtgtttagcttgaaagtttacaataacaaatattgacatttgtcccacattggatgtttgaagattctcctctagtatatatagtgttatccatttaaaatggttcactagctattgggaagtgacactatagtgttggagatgcaagtcctttatgcaacaacacacatgcgctgtcgccgtgtcgggtcgggcttgagcttgggctcttggggaataaccaatgttctttttggagaaaatacttatgaggctttgttgcattatttgtaacatttggaacacctcttcctctcattctcttcactcgttttttgctacaagttaaacgaaactctctccctctcctcctttcttctcaaagtaagtcaagagtatatcatttgtttcaagtttgcagattccgctatcgtgtgttgcgataccgatcttatagtgattgtatcctgcgatccgctgctcataaaatcgccacactgcgagagctagcaagatcctttgggaaagtttggaaacactgtacaaagtcttcaatgtgggttctggaaaattcgccactgggaacttccttaactacaaaatggtagactcgagacccatcatggatcaagtcaatgagttgcaattgatattctaaggcatagctgatgagggaatgaagatctgtgaaaccttcacggtgaattccattgtcgagaagttacctccaagttggagtgatttcaaaaactaccttgaattcaagcaaaagcctttgagcttacagaacttgatcgctaggctgcagaatgagtcttccgagagagacaaatcttgtttcgtagctcatgatgcaaatgtggctgagtacaagagaaagggtaaagccaaagttgtttataacaacaagggtgaaaaacctaacaagggtggtccaaagataatgtcatctaaaccctccactagctttaagaagcaaggtgatattaaaaaaaattctgggaagtgcacctactgtggcaagcaaggtcataaggcgagtgagtgttgcagcaaagctaagggaaaaggtcagctaaccaagcgaatttgactgaagatgacctctatgcggtggtcactgaagcaaatgtggtgacgactgatgaaaacccaatggagtggtggtacgacagtggagcaaccacccacatctgcatcaatatagacatgttcagcacctatcagaagtgcaagtctgacgacaaactgatgatgggcaatgtctctcactccaagattgaaggcactagtaaggtggtcttgaagctcacttcgggaatgactatcaccctttccaacgtgaagcatgttccaaaacatgaggaagaatctgatctctggtactctgatgaacaagcacggttttgctatcaactttgagtccgaccagctgatcctaaggaagaatggtgtgtttattggtaaaagttttgttaagggaggacttgtcaaaatgtgtgtttagacaatcctcaagaaagatgatgtagcttctacttctgtttccaacaatgctatcaataaaaattcagttgcttatttggttgagtcttttgaattatggcatgagcgtttaggacatgtgaattttaaatctatgcaacaattaattaatttgaacctaataccaaaatacaaaataagcaaagaaaaatgtgaaatatgcgttcaagctaaactcacaaaaacaccatctcctcgtgttgaacgaaccaccgaacctctaagtttaatactcacagatttgtgcgacttaaaatacgtacaaactagaggcagtaaaaagtatttttttaccttcatagatgattttacaaaatactgctacgtttatttactacatagtaaagatgaagtcttggagaaattcaaacaatataaaaccgaggttgaaaatcaactctcgaaaactattaagatagttagaagtgatagaggaggagaatatgatgggccatttaatgcgttatgtcaagaaaatccggttggttcacctcaacaaacagaaccgaactggttactaattaaaaaaaatgtttcccagtgggtataagcataaaacaaaaccgaacaaaataatcaaaattccggtatgattattattttttagtttttcttctataaaatactgaatccgattggtaaaataaaactgtacaaatattttagctgtaagcttttctgaaatagtgcaaagctgtaaaaaagaattgtacaagaaaattatacaataaagctgttacaatccgatgactctaaactcgattcaacacaactcaaacaagcttcaattcgcagaaactcaagagatcaatcaaagaacgaaaacaaacaaagaacaaaacaaacacacgattgtttacccagttcggatcaccgatgtgatgaacctacgtcttgggtcagaattaatccagcaatccactacgaatcaatgtttactcaagctcaaaacccagtgctcaagatcgtttacaagagagaagaattgagataagaattttccgttacaacgaataattgaagaagacgaagactatttataacagagtaaggaaagtcaaaccatctaattccagaagagtcttttgatccttctgttattctgaaactaatttcttcttcttcttaaaccaataccaaaccggcactgaaccatgatccaccaactaaccagctaaaccaagtcgacatcaggctaaaccaaaagtttgaatcatacctttacaattctccaccttgatacaaatcttcttcaacatagtagactgctatgcttggacttaacctccagcaatgcaagcttaaaagcttacttccattcgatcagcttcagagtatctaaagctgaatcaaaactcttcacaggtatacacttggtcaacatataaacaggattgatagaagtatgaatcttcactacttcaatgtttccttcttcaataatgtcactcagaaatgacctcttgcgtgcaatatgcttggtcctttcatggaacactctgttcctggacaaacaaattgtagactatgaatcactccagacttgtgctttatcctgctgaaaaccgagatcttcaagcaaccctttaacccatatagcttcttttactgcttcagtcaaagctataaactctgctttagttgatgacaaagccactacggattgcagacaagacttccaactgattgtattacctcctattgtgaaaacatatccactagtaaacctttttctatcaagtctccaccatgatctgagtcacagtaaccaatgacactgagatcttttccttaggtataccccaaactcagatcatgtgatccttttctgtaccttaacagccacttgattgcttcccagtgaactaatcctggtttactcatgaaacgactgactagtcctattgcataggctaggtccggtcttgtgctgatcatagcgtacattacacttccaatagcacttgagcatggagtttttactgtatctatgcattctgaatcatcttgtacagatgcaagtttaaaatgtgtaccaataggagtaatagctgacttacaattactcatattgaatctcttgagcacctttttcaagtatcctgcttgagataaacacaaaactccattcactctatctcttttgatttcaataccaagaatcttgcttgcagctcccatgtctttcatctcaaactcactactgagtctcttcttaaccttgttaacctctgacatattcttagctgcaatcaacatgtcatcaacgtataacagaagataaacaagttcttcattgttcactgtcttcacatatacacactgatcatgatcacttctctgaaacttctcatctgtcataaacttgttaaatcttttgtaccactatcttggtgcatgtttcaaaccatacaaggacttcttgagaagacatactttgtcttcgtttccaactgacaccacaccctctagctgctccatatacagctcttcttccaattcaccatgtaagaaggctgttttaacatccatctgttcaagttctaagtcaagattaaccaccatagacattaaaactctgatagaagtgtgtttaaccacaggggcaaatatttcttggtagtcaattccctctttctatgagaatcctcttgcaacaagtcttgccttgtatctcttggatttaacaccagttataccagctttgattttgaataaccatttgcaactgatagcctttctatcctttggtctgtcaacaagttcccaagtagcattctttgttaaagaatccatttctttacctatagctccattccatagctccgagttttcatcctttttagcatcatgaagacattgtggttcttcttccacattcagtacctcatatgtcattaatgcaaatgaaaattgagaatagtctttcattttagctggagctacaatctgtctgcgagttatatctcttgcaagttggtagtttgttaaaccactcggttctggtgactgagtttctgcaggttctgcaggttcttcagaatcttcttcagattcactttcactgacttctactggatcagtagttactccaccttgcttagagctgactcgcttcttgaccaattctgtaataacaccaaaatttgatgttgatgcttcagagtctcctgctactgcatcattcacatctttgtttaagtctttatagaccatgtcttcacgaaatatcacattttgaattatcacgcattttctttcatcaagtagccaaatcttataaccttttgtgcctgcaaggtaacctaagaacactcctttcaattctcttggttttagctttccttggtcatgatgaacatatgcgattgaacaaaatcttttcaagtgtttgtatcctggctttctgtttagccatagctcttcaggaacgttatgatcaatggctgaggcaggagatctgttaatgatgtatgcaacagttgcagctgcttcagcccagaaactctcatccagaccaaactcaattagtaaacatctcactttctccatgatcgtcctgttcattctctctgcaacaccattttgttgtggtgtgtaaacacatgtcttgtgtctttcaataccatgggtcttgcagtacctgtcaaacttaatattgcaaaattccaacccattatctgttctcaaacacttaacctttctatctacctgattctctacatgttctttccgcttctccaggaccttcattttccattttcttctttctagcaaaacagtctttcttaacatgaccttctttcttgcaaaaccagcaggttactcttgttttagaatttgacctgcttctacctctgcctagaccacctttctaattgttttgattgtttatcactagtggtctacctctttcagtagtatacaagactgttgatgagcttctttcaagatcaagtgattcatttagctctctttccaatgacttagcagaggagataacatcctgtaatgacaaagctttattctcatacttcagtgtatgctttagttgagagtatcttgatgtaaacccattcaagaacaatattgcacaaacttcttcacctaccacaatctcaagactgctcagctttgcaactattttcaagaattcattcacattcttattaattgacattgtgtcattcatcttaaatgagtaaaacttaagctccacatagattcgatttggtaacgatgtttccatatacagcttgttcaagggttcccacatctctgcaacagacttgcaatgatcaatctttctcagaacaacatcaccaacatgaacgataatcacattcatagcatgttctgatttctccatcttttcaagatctagtactacctttgtttgtgatgattctgatccatcatcatcaccttcctcaaccttctttccttcacttttagtaaacggaacaacttttgttaatgtcaaatcatcgatcactcctttaagcctagctaagctgagatgtgctttcatccttttcttccatagcgagaagtctgagttctcgttaaagacttgaaacgacgcctttaaacatgagttaaggtttgcttcgctcgtcatcgccattaaagaaccttaggctctgataccaatctgttacaatcctatgactctaagctcgattcaacacaactcgaacaagtttcaattcgcataaactcaagagatcgatcaaagaacgcaaacaaacaaagaacaaaatgaacacacgattgtttacccagttcggatcaccgatgtgatgaacctacgtctggggccagaatcaatccagcaattcactactaatcaatgtttactcaagctcaaaacccagagctcaagatcgttttcaagagagaagaattgagataagaattttctgtttcaacgaacaattgaaaaagatgaagactatttataacagagcaaggaaagccaaaccctataattccagaagagtcttctgatccttctgttattctgaaactgatttcttcttcttcttaaaccaatactaaaccggcactgaaccatgatccaacaaataaccagctaaaccaaatcaacatcaaactaaatcagaagtttgaatcacacttttacaaaagctgaaagtaaaactgtttgtaaagcttttgataaaaaatttataaatgaaaactgtcaaaaactgtattgctttaataataaattaccattcaaaactaatattgttatccgcattgtagagtttaattggtatgggtcaagacatgcctacctaaataacatttaaatttttaattacaatagaaattcaattaatttcgctattttattgtgagtttatatataaacatgtttgacagcaacgaaactcacatacaaatagaaagcaatatgacaaaagaatactattaacgtaaaacccacacctagtgcaaatgttcatacaataaaaattttttaaagaaataccacttaacgtggattggcttaaaacaacaaactagtattaacaaagttgacataataaaacaaattattgccttatcactagattttaaccaaccgaaggcatagcaaattattttaagtctaggaaagagtacaatttttgctacacatatttttagtgtgtatcaacaatggttctatcaaatgaggaaaataataatctgaaatgatgagtcaattatagttgcatcacccctttttcttttaggctcacatccatataacctctggtttctatcaaatataaaaaatctattttaatatgacaagtcatgttcatggggttggatagatacattacactaatggctttatgaatgtcgtctgctagttatgttaagtcacattattcttaaactaatcaatttcccaaaaacatttgggttaaatcagaattcatatggatagttataggattaatgttgtttgttctagaaaggaattttttttgttcgaggttgtatagtgattgatcccaacacaaatgacttatgattgctaaagagataaaatgtgcacgtatatcttttttctgtttccatataaaattcttaaaagtttaatatatccggaggtgaatctttcatgcttggtaatagtagtaatgaaatttaatccaaagaaaaagtttatagtttctatttctccaaaatcattcgctacggcaactttctgcatattttcctgcattgtttgctctcactcgatttgttgtttcaatgtgcatttcaagtttaaatctggtcttaaaaacaaagacatttgaggatttaattgtccattaccattatgcataaccacacgtagtagggacttccatcgactagtgatttgttcacttttggaataacaaaaatatgatcattgcatggttacttgttaatcttagaaatccgaaattaaccaaacttccttaaactcgttgagattttgttaattctactgaaaacaaatattaaaaagctttgcaaagctcgtttactaattttcaaaataacacaagtaaagctattaataaaaaaaatatgaaaactcaaaatataatcttaattgataaaatattaaaatctaaaatataaataaaacaataaataattgtcaagttttaccctacatttaattgatatataatgtagataccatgatcgtcttctctctaacatatgaacaactttctccaaggaaatggtagatgtcgtcaaccatcatgtcatccaaaatagaacttaattggattaagaaactaaataactgatctcaactgatataatagtgaaaagttctaagtaagagggtatagacgatacacaattttgtttgaaacgcgtcaaacaaatgttttttacttgttcttattgataataaatcttttacaaggattctattacctcggcaattacttgacatattctacccgaatgatcaaccccgactaagaacaaatctaagcctaatcactcctctgtttcttatcacacgcttgtgaagaggagggattacaaacacccactttctaagcttttactaggcttcgaaagctttaaacgtatggcaatattctagagtgcttaggcggctcaatgcctaatcctagaatatttatgctattctcgctaaccctaattcctaggatctctgagaatcaatgagcgagatctttcttgaatcgtcaagcctatccctttccttgttgggatcttccttgatcttcaagcctatcccttttccttgttcgagatactccttgatattcaagcctatctctttccttaacttgttgagaagaatattcaccaaatcttctcaaccaactttcgtgtttgatcaccatgccaattcagcaaagcttcttggcacgtcacatcaaccactccagcaccgccatgtcagctcacgcgtccatgtcagcaactcagacgtttgatgtagatttgatgcaccgtcctgatatccaacagctctctgatgtccaacagctccttgatgtccattagttcgttgatgtcagaatctgcatcctcaatctcccctttttggacttagtttgatactcaagcatccttctggctcaacctaaaaagatactaaacaaaccaaccaaaaagaaacagataaaacaacatctagctagagattaaagcttgttcatatcagaactgtgttaagaatgcaaaaaatcaataggaacgaaaatcaagttcttaaccgttcacatcactcagaaggattctaacaacgaactcctccaataccaggcagtgaaaatatgtctaaacttaaaacgcattaaattgaaacaagtctcccccataaatagtgaacactactcatctagtatttagtcaacaatactcatcaagtgatcagtcaactatgaacattactaagtaatcagcagttagtcaaactcccccacaatcaagcattctataaaccagactcatctcctcctgcttgagtgcaaaactaagttaaaaacaactagttacaaaagatctacatcaagataagtagttagaaacacttacctgatattagtgtatcgtgaaaacactttgatgaccaaccacttctcaaactactgcagccaaatccgggtttgatttcaccagccgtgtgactcaaccaatcttcgtgataaaacctaaaagtcatacagaaggaaacccaaacacaacaacaagacaaaatctagaaatgtttctagcatacatatcaaaagataagattcgtccaagcatctgtgtttaacttattacatacccaagttttcagatgatacatatcatcagttcaaaaagaacaaaaacaaaagcatggtatgaaataaaaacaaggttgtcaaaaactagattttaaaggttaaaaatatcaatctcccccacaaattaattcccccatcttgagtagaatcaaacacatctcctcctgctttagtgcatgaattagtcaaaaatcacacaacatcagcaaagatataatatctcagagaaaacagagaaacacttacctgcatctagagcagcatgctgataacactgtattttactcattttaggtgtatgtttatcatcatttagctttgcatttgctcattgtatcatatcattttgcaccattttagcttgttttgcatacttaggaatctaggatcatcttgcattcgcattgcatattttggtgtgctttcaggtgcaaaaggagcttaaaaggactttactcgatccattcactcgatccaggcagctatagaagaggcaacattctactcgacctctttactcgatccaggatgctacaaatgaggctaaagtttactcgaccctcttaatcgatcaaggtaacctcagatgaagcagcagattcatctactcgcccctcctactcgatcaactactcgatccatatactcgaccaagggtgaccatctctacaagacttgttgagctatcaaagcgtcttcggatcctcctcattccccactcaaccagacatatgagcatacagataggagaggatgaagcatctagtcgaccaattgatcactcggagcatagacacaaaggcgcagactttgcagcaccctctttactcgatccccaaggtcgagtattcgcccaaaccgcctcaagtctcttgtcttctagtgaatctagggtttcaacattttagtataaatagatcactttgggatttgtccaaaggatctatgctttatctattagtttttctttgtgtttatgaatgttgaaactttaattactcttaatctatttcgtttttgcatttgtttgtttaagtatagttgtttagcttgtttagatctacattttggtataattttagtaatttctgggtttgtgttcttaagaatgttgcttgagtagtgattagggttcttgacgatggattagattagggtaatctctaggttagttaggtggttagtgtttaggtttatacccttctggattcgcttggcccctatgcgatttttgctggctaatgtggagatccgatcatagacgtccagcgtccaaaagacgttcaaatggatatctgacctacgaattcaagagatatgtagactcgaccaagggattggcttgtctgcctattagctttggtagattgtttcttaaaccatgctatgctatgtttcatcaacgagagttgagattaggaagtggtaaagttatggggatctttgtcacaagagtggattgacccggtttttgaatctatcgtcatgggtatctacctttcgcctattagccatttgatgaaccctagagttgcccttatcaatgaatccatccttagaacttctattagattgatttgtatcccttgttgattgcacttttatttacctgttatttgtatcctctgtttattgcattttagttcttaattttgtcacctgttggttctactcgacccaatgatcgagtagggctgttaagttctcatttttacttgtttgaatcttgacctaggattgttactagaaacccaccatctttataatctggcttgacttagttgtttttgtacacatcttgattgctagcaatatagtggactggattgacaccctctataactgcatcgacatgtttgtgttttagaggaattgaactgaaactcacatgcagaacttcaatggccaagttcaatggcacatgcttctcaacatcaaacttcacaggatgctgcatctgaaagttgatacacatgactcggaaaccgaatgtagaactttgcctcaggtttcaaagcaagctgcagaatatgctcatacaccatttgccaaagtcaaaagccaacttttgtgcaatctgatacacaagcaaagccgtgtctatacttgcatatccctcgctggttgttggagaccaatttctgcacgaaaactttaacagcttcctatagtttttcgagaaggtgctcatgggaggagtctgaagaaccttcacttgtccatcagtaagatagttggtgacctcatcatcaatcaaaccaataatttgcaactgttaagctctggcatcaactgattgtagaccaaacaaaactttgatcttggcaggagagaattcgtactccatgcctcgcacacataccttgacagaatcgtcttcgacctcttgttagcatcatgagtgataagtcgcaagcggtgaaagccaacttcatcagcaacacttgaaccagcagcttccttcccttttttagtcttctgtcttttcaccttcttcacagcaccagactgtttccttttcagcaaacgcgaggacacagatagatccgtcgagttagcagctggtacggattcaaacagagatctgggaccacttgaggattctcgttgttgagtggtgaaacttggtcacacgtctggcttttggctcagcaggaatgggtgtctcagatctatgaataggaacaacaatagattcacactcggtggctctggagatacggctgcctgttcatcttgtttctccttgtgtggaaggtcagatctgagaggtgtcagttcgggctcagcatacaacaccatagctttgtttagattttcttcctcttcagctttcagagactgtgatggatcctcctcagaggctgtttctgaaaggtccgacgacggtctcacagatcttttttgcacgagccgttgaagtccagagaatatcgcattcatcttcaagaaagatttaaacttgattctctttgagcacaagtcttcgagttaacgactccctaggcaggtttgatttgacatgagaaaccctaactctttttccctccaacctagacattaagtaatgggcttaatttattcatgggccttcaaaacaaatgggcttaaactatacctaaaataattagagcctgaaacactaaacaaaaacattagtgcacacttgcaaataatcccattgattcatatcatcccattcatcaacatcacatgttagaatagttctgattaaaaatcatttagcgaacaaccattcactcatgaacagagtttagtgacccagaaagttattgaaacatgtgagtacactacgttggattcaaaacatttttatacctttgagatctgttccgtgttacgtgccaaccagttgttcagaactcagcaagaagctaccataaccactcatatctttgatagatcaactctgggtacagtggctagtctttcacactgtcatgccttcaattcaagtagatcagctcaacgtgtaacaggcagctggaattttcctttggagattgctcaaagaatcaggagtgtgctgcttttatttccacacttcctcagatttagatacaacagggttctcctttttttttaaactttgaatccctgttgatctatcagtttcatatcagcaacatcacttgacttctcaactgctgatatcagtgcatgatggtcacttgacaccaaattaggctttagatacccttagtttggtttgcacaataagttgatctcctcagctctttgacctcctgttagacgacaacgttttacggctgactacagaatcagcatgacaggcagctattttccacacatctttattcacatagtgttgatcttctattcatccttggatttccatggcctgttcttgcattttttgttcctgtcttagatcaacacatctcacgaaacagattagatctcacgcacaccaattaactttctcagatcattgaggctaataaactccaagattttggtacacaaatcagatagttgatattcagtacttagatgatcaactactatcagtttcgcctcaacaagttcacgaatgaaatggtgtaatatatcaatatgcttagtgcgtgaatgttgaacaagattatttcttatgtttaatgcactctgattatcacaataaattagtaaagaaccagagatcataccatagtcagctgccatttgtttcatccacatgatttgagtgtagcaactccctagagcaaagtactttatttcaacaatggatagagacacaatatactactccttactctacctcgagaccatgttgctacccatgaagaagcatcaaccacttgtacttcaacattcttccatggatccagtccagtcagcatcttgcactgcatcaaactcttgtaatggtatctatgcattgcaactcccctgatatgtacagagactcatcaactttgactctggatatgtacagacatatgtacaaacaccatcagattcagttccagattcatccgccacaagcaggcttggtaactttctccccccgaatccttcgcatagcatcatgtgggatatgattcgaacacttaccagactgctgcaccttgctactagtggcaaagtcctggctatgttgacacttcaaattcagaaaacctctctgaacaaactactttgaatgtggattggatggattccacatgtaacaacagttactagttcacacacttttgagggtcgtacgtccttgtttatcagcagcatgacggcaaacatcaggtttcttcatccaatcttgactagatatacaaatatatctgtgatatttgttttgcttcagcaattcagttactcgattgtaacacaagttacaactagctgtaatctctccttggtcactatagaaacatttcctcgttcttctgctcaactgtttgacactcgactgactaattcatgcttctgatcttgtccttgcctttacataaccagacttagcaaagttgtaaacaagaatagctctattcataaccttagttgaggtacacgaatatccaccattacgatgaagatcatctttctttatgtagacttgattcccttgcttatcgttcttgtggcgatgcttgtggtgtctgacttgcgtaacacgattcaggaagctgtaacaatcagctctgtagtgttttcgacttccgcaataccaacatcctgttcttttgctcctcagatgattgtgatcaacctgataatctgaatgtctccagttatgagtaggcatactcatggtcaacgcctttcgagccttcgaaggtgcatccatgcgatgtgcttctgctggttggatatcatcagatttctcatctgaagttgtccctttgacaaaacgcgttcctccttttgaacttgctccatcatattcaagaccccaagtaacgtttgaagttcttccagcagtcaggagcttatcaaagtctttagtccccctactcagcatcttgatgtttctcaggttgtcttctacctccttaggatttgattctctcttcaccaagctccttttcaagtgcaaaaacatttttcatcacaattcccttttcagaaatgagcttgtgatgttccttccttttcagaatcaactcctcaattagaatcctgactttctccaaagtgaatccaggctcatcgttcactgaatcagtatcatacgcctgcatcatcccaacgacctgttccgactttaatgaatttgagttcagagatacatcaatctctgacttgtgtgactgaagcttgtctggcagactcttgagaaatgttttcaccatcttcttgtccttgtacgtttttcctaggacaacagcctcttgtgtgatggagctcagtttgtcggtgaagtcatccacagattcttcaacttccatggtcagattcacaaactctaacgcaagcatgtccagacaagtacgcttcacattgctggtgcctttgaatgagtcttgcagaatgtcccatgcttcttttgctgataagcatccttgaacttgagtgaacttattcattggcaaagatccaagaatcacagacagtgcctaagagttgtgattggctgttgtgttctcatccggagttcattcagtccttgatttcaacacagtgtctccctttgcatcctttgtggtaggaggcgtccaaccatcttctactgcaaaccatgcatccatgtcaatactttgaattgattgcctgataaaaacctaccaatacccgtactgcttagcatctagcttcagtggcttaggtatcgcaacgaaccgttgtgctttctccatccttgtcgcaagatctcacttgttgaaaagattaacaaattcttttatcaggtgtcctctttggtaccaattaagagggtatagaggatacacaacacgctgattttgtttgaaacgcgtcaaacaaaagctttttacttgtacttattgataataaatcttttacaaggattccattatctcggcaattacttgacctattctacctgaatgatcaaccccgactaagaacatatccaagcctaatcactcctaagtttcttatcacacgcttgtgaagaggagggattagaaacacccactttctaagcttttgctaggctttgaaagctttaaacgtatggcaatattctagagtgcttaggcggctcaatgcctactcctagaatatttatgctattctcgctaaccctaattcctaggatctctgagaatcaatgagcgggatctttcttgaatcgtcaagcctatccctttccttgttgggatcttccttgatcttcaagcctatccctttttccttgttcgagatcctccttgatattcaagcatatctctttccttaacttgttgagaagaatattcaccaaatcttctgaaccaactttcgtgtttgatcaccacaccaattcaacaaagcttcttggcacgtcacatcaaccactccagcaccgccatgtcagctcacgcgtccatgtcagcaactcaaacgtttgatgtagatttgatgcagtgtcctgatatccaacaactccctgatgtccattagctcgttgatgtcagaatctgcatcttcaatctccccctttttgacttagtttgatactcaagcatcattctggctcaacctaaaaagatacttaacaaaccaaccaaaaagaaacataaaatgcaatatctagctagagattaaagcttgttcgtatcagaatgtgttaagaacgcaaaaaatcaatagcaacagaaatcaagttcttaaccgttcacatcactcacaaggattttaacaacgaactcctccaataccaggcagtgaaactatgtctaaatttaaaacgaattaaattgaaacaagtctcccccataaacagtgaacactactcaactagtaattagtcaactactcatcaaatgatcagtcaactatgaacattactaagtaatcagcagttagtcaaactcccccacaatcaagcattctataaacaagactcatctccccctgcttgagtgcacaactaagttaaaaacaactagttacagaagatctacatcaagataagtagttagaaacacttacctgatattagtgtatcgtgaaaacactttgatgaccaaccacttctcagactactgcagccaaaaccgggtttgatttcaccagccgtgtgactcaactaaaagttatataaacggttagcttgaatttccgaaaaactgactaaaacttaaatcattcaaaatgtaaagtctaatacaccctcataagtcttctaaaactcaatgagattttaatacagtgtatctactgaaaaaggattaaaaaataaataaatttaaaagtcttaccaaaactgatttattaagtgttgtttatttattaaaaaacttaaaaattatagaaaacctaaaaactaatcttaattggaatatactgagacaacttcttcatgtacaccagtggactaccatgtggtgtgctttttgcctccccacatcgacactctcatgtggggttacattttaatgcaacataccaaaaatataacaaaattctcaaatctaattctgtttgttcatgatgatgtattatttgattgataacatgaattgttgcatgtgataagatggttaatcaatcacaaaataatgatctacatatacattttttggtagacgttttggccaaaaatcccttaactatttactaattacatttaggtccttacaaattatatcttaaccaaatattctattaccaaaaatttacaatttgttagtttgcattaaatatttaaattaactttgtcctatattacatatttagtccctacaaaacctatctaggtttatatccttaattaaatcttatcattattgaactacattcaattaattacgaatttcctaaattttatctatctacattaaatataaatatatgctttttctttcacttttagttgttcttatatctaatttatttgattttatataatatatatatagttaataaaatataagattttttctgcatatgatgtaattcaaatgttttaaaacagacatatattactcaatcgatgaagaaaaaaaagtaagtgtaaaaggtctcacattgcttaagaaattaggcaatggttcagagtcttattataaaaagaaccaaaatgattttgaataagaatgaactggaagtttgatttatcaggcatccaaaaataaaaatgttatccggtttactgtgattctctattttaaagaacttaatctttaaaaaattcaaaatattattaatattttaaatttcttaaaacttaaatatcaaaaaatttataactttggaaaaattatactttattaaaaaaattaaatatattaatattggacaatatacaacggatgaaattctatatataacaattaaaatataattataaagtttggatcaatattattaatatttttttaatttcaatatcataaacatttaaaatttagaaaaataacaaaatgatgtttaatttcacgtgacagaattatatagtgggacgagtttgagttgatattaatacaggatggtatgtactataggtgaaatcctataattaacaatcaaatataattatacaattttaaaaactaaaccaaagttacaatattaaaatatatatataacttgaaattttaaattttttagttttaaaattgttccaaggtgtattatacgtgaaaaaaataacatatgtctatagatcatcttaaagacaaaattcattttttgataaaaatatacacatgtggtatatcttttaatatgttactaggtcagtacccgtgttacgcacggtatcttatgtttagtcaataatcaaatctcagttctgtgtattccacagaaactttactttattttcattatctgtaaacatgtagttgtatatcatgtattattggtatcaactaaatatatttagtctagtcaaaccatattttgtttagtatatgtagtttcctcggtttgtagcatggaaaatatatgtctatagttggtatgtacatttgggaacgtaattgtatattttgtatatgtaggtgtacacatagtagttttgtacgttttcatgtatgtaattaatatagaagtttaacattatctcataatcaaaaaatttctaattttatatatgtttatatttacagaatgtgaaactaacattttttgatacaataattatgttaaatgagacataagccatttttgtacataaatagattttactaaattttgcaatttgatagtgaacgacgaataaataaatatgttgagttagatatatatagtaataataggtaatatatagtaacattcttatttattttaggcagaataatattaaatttagtcaataatagcgatgcgatattgtaagatatcaaattttagaagatattataaattggaaatatgtaaaagtcttaaccaaaatcatacacaataaataacaaaacgaccattagaccggtaccaaaaaataaaatagaaacttgttcatacagaaataaaaataatacaagaccgagttcataaagataaacacaaaaacataattttaaatcgatgttcaaccgccattccttgcaccttcatcacggaacctacaaaacaaataaatgtggcatgcaattatcaataataatattacattccgtttatacaattactgataggtctataatttgcatgttttacacatcctattatcaccattttgagtctagtttcatccatctttcataacattcaccatcatttttgtacattttgcatctttagtcgagtctaggactagtcttgcatacattctgcatcttggagttgtttcaggtgttttggagctattggtgctcagaaagaggaaaaacagaacagaaaatcacacttccaccaacatactcgatcaccagtggcagagagggaagcagtcagctcagcagtccatccagacacttctactcgatcccagaggagaccatacagtccattctgccagatatactcgatcgcagaggagaggaggcagtccattctgcaattctactctatcgcagaggcgaccaggcagtccactttgccagtccaccagttatactcgatcacagaggagaagaaccagtccatcctgacagctgacacacttactcgatcacagaggccaagaagcagcccaaaccattctgtcaaccaacctactcgaccaccacctcgaccctgtgatcaatccgcactcaaccagacaacctgagcatcaaaaagagaagagaaaagaaagcccattcgaagcccattcgaattccatcaggaagcccactttaagccaacactcttgatcacgccgtccatggtccgttaagtgggctcgaagcccgctttcttatcttagtataaataagtctctaagggtttcgccctgagacatgcacgtttagagacacaaatttcgcactattattcagcagccgcctttcattcctgcaactttgtatttcaacttttcttctaagttattcagattttactttcatttgcttgttcatctttgtttcattccctttaatatttttagtatgcaatcttcaatcgtttaagcatgttgtctgagtagtgattagaatttctgaggatgggacaaagtagttgtggaacccctggtcgaatctgttgattaagtgtagatttattgaatcccttctggattagttgtgtttactgcttattcctttcttatcaactggaatctgatcccagacgttccagcgcccataaggcgtttaatggaacgttggatctactaattccagtgataatcgtctctatcccaagggattagccgtttagagcggttattggctttaacagtcggttcttattgtcttcttagttagagatccctaatgggaattaggtcagtgtctagctatgcttgaggatttctattacgggagttaattaatctgttgttgactttgttgtctagggataccttaattgagatttgttaaccaagtgaattgattagagagaccacactattcgattaccctatccttaggagttcctcatccatttaatttctctgtttacttacctgcttgattcacttgctattgaattttagtattttttgttttcaaccattctactcgatcacacgagtctactaacagtgagactgcgtgatagagtaaactggtccatttctgcattttcaatctctgtcatcctgttgtactcgatcacagggtcccttctggcagtcgaccctgcgatcgagtatttcggtcatttctgtgactttttactgttttctgcatcaacactaggactgttagaaaaccaaccaaattctgcttggcttgacttagcaacttctgatcatatctcatgtgtctgcatcacacccatttggattgacacctaaaatacttcaacgataggatagtgttttaagattaattgagtaaaaacctactatcaattactaataacgaaatgtaataatatacgaatatatcaaaacttacatctcatggatctggttagacttgggaatatcaggatccggaaagacggttgatatcgggcctgcggtgcaaacacgtacgttctttggaccatcaaaataacggtcaatcttccaccacccaagaacaacgacaataactccaccaccatatcgacgatagttatgatcaaagtcaagagcttccttcttagtagctagacattccaaaacacgatttctaaacagataataaaaaatagtattagaatagtttaatttaggtaattcaaattaaactaacaaagacggaaacttactcattgtcacttattttgaaagttaacgtcaaataatcgacgtggttttgcttaagtctagtgtttatcaattctccaacatcatagatcgctcccaccaagtctccaaaaaattacagaaattaattaaaataaatcagagtcaaatttatacgattgatattgaatatgacaaaactaatgaacactaagatgcatgatataaaataatgcacacaacaaattcataaaaatctcaccgactaaaacagatgtatcgatttcatcatcgataatcgaagagaaggatgctagacgataatgcagaatagcgggtaccggacttgttaatatgacgacagtgtcaacagcaaatcgaattttgaaggcatgagttgttggcctgacaggactttggttatcaacaactccaaaactcgttatcgttacccattctctttcattaataaaatctttatagtgatccaacatcttgtatcaaacagtatcttcaatagtcataccctacggatcaaacatactaatcaaaactctaaaacatgcaaacctaaaattttcataaccaaacagtcaaaacttacatgttcatcggcgagaatcaaacccataacctttgaagatggaaccagcggaactaagaatgtccgcacaactctcacacgaatacaccatcctgtaatagacagtttcaacagagtaagagcatgaaacgattccatcatttcgctgaaacttttaagttattttttttattcattttatgagatgctaatgataacgatatatatataagaaagactaaaacaccgtagaggcaggttagacgcaactttcaaaatagtaataatagtcacgacgtttcaagtcacttattaatctagaagatacggtaatatatttttaataactcaattattaataacatggtaaatttgtcgattctcataaattaggaaaattataaaaatattttatcgttattcttaattggagttgttatataaataccaattgtcttaacactacaagaaaacaagcgattaacgacctacaagtcagtcatttcgtagtcgtaaataatgataatacgaccaatctgcgactaatgactgtagtcagtaatccatagtcgctaagtataggggtggttaattagtcgttggtcaacgacaataatacgacaatagcctaaacagtacaagttcgtcgttacgtagtcgtactaaatcggcgactacttgacgaccatcttacgattaatcatactgtacagagtgtgtcagaacatggagtcgtttagtagtcgttaataacgtatgacgactttacgactacgttgcgattaaatattctaaaccctgggtatgtttccagttgtcgtaaaatagtcgtaaaattttgtacgactgtttgacgattaattgtactttaccaaggatttgaaacttttagtcatatcatagtcgtataagtatatacgactattggacgtctgttttacaattagattatgactaatttggttagtctgataattgtcctaaagttatgtgactaattgacgactatgctgcaactaaattgctacttatttactagttttttgcgactaatagtttggtccgaataaggatttggtcatcaattgttgggtttcttgtttgttgtttaaagtcatcaattgttcttgtttgttatttgatatgctataacatatgaaaagacactactcatatattgaaaatcaagttcaaaacataaaattatcttgtttctacatacaacttattgaaagatacaactagtgtttggaaacctaaaatctatggatcattagatggtggagtaattgggatacgctctgtggatgtggaagagtgtgtggcgatgaagtccaagaactgcggatcggtttggcagagatacttctcgaccaaggacaagtgcttgagcttgtccttttgctcagctgtgactcgggctgactcggcttctcgggcagcaatctcagcatctcgcttctcgttatatgcagcttgctcttcaatttgccgctgagcttcctacagccgttcttctaaggctttaaaggttgagtctccggggagttggcggttggcactgcctagagtttctttaagacatccaagtccataaggattgcctcttgtatccctttctgtggactgcaagaaataaagaggaagataattagtgacagatcctcaaagtctctaagactctgaaaaagacaaagaacatcttacctcgagaaatatggttgtatactcatctagtgtgagatcccgaggaagtgaagagccatcagacacagcagaagcagccgcttctagttcagataacttctctctcacattttgctcatacgccagagcaatcttctctgccttctgatcaacataagtcccatccgacttagtgtgtgtctggatgaacacctcaccaagagggacaggtcttcccattttttcttcttgcaaacacagatcacaatcttcattactatcaacagactaaacatcacacagtaaaacgaacatcactaaaacacatgggaagattgcggaaacacttaccaattcaatttggatttcttggaaagactttggcccagagtagtggacgtgaggaccgagaccattacggtcagagagacgagctttggaataggtcttactccttttttttgcttcttctgtgtcccagtaagcacacattgttccccacagagtttctccaatccatgaaggctgctctcgagttctcctatcggtgctaaccatgtccttcaagcgcctcttaacgatctcattaaagtagtattggactgtccctgttattcagggatcccagtggtgagttttctacaaaaaaagtgtgaagttagtgaacacttgacagattaaatagtaaagtctaaagaaagttggagaaatacaagaagcttaccgcaaactctaaaaacaatctttctcttttatccaatggcacacaggaccaattatagtagggagcattgaacttttgagtaaaaatccttgtgatctttctaaccaatttagatcctctgtcgcgagtaaacctccaaacacatgcaacacagacagaagtaaacatgtttaaaatccaaaacactacaactacagtagactatataactgaacaagaggcaatctacaagattctagacaagtataagccgacaagatcacacacagaacacaatagtcaacataacaagatcacacacagtaaagaacttaacaagattctagacaagtatagaacaaaggcagatcctcaatgtctaagccgaaaacatgctaatttcaacaatcaacaaatgttccacaatagtctatgattcacaacagaacacaatagtcaacataacaagatcacacacagtaaagaacttaacaagattctataaaagtatagaacaaagacagatcctcaatgtcaaagccgaaaacatgctaagttcaacaatcaacaaatgttccacaattatgttcatgattcacaacagaacacaataaagaacataacaagagcagacacagtgaagaacttaacaagatcacacacgagtatagaacaaaggcagattctactatgttacacaacccataacaaacatccaattccaacaaccatcattcacaactatgttccacaacaagccattctacataacagaacacgagttacactgcacaggctgagaacacgagaataaaatagaggaagagaacataccactcggtttttggtttgggaatcggagacaagacacaacaccacagctccctgtttggcacggagagtgtcgcttgcagagccaccgccgagtcttcttgtagctccggcaacgtcccaggaacttactcttggaagttgttcccttgagatgaagggtggctgtttgctggagcgtctgaatctggcgactgaggaggatcttactgagctggcgctgttggcggcggattgtagtggacctcttcagatagaggcggaggagcttgacgttgtggttgagtcgttgagttctggaacagttgaagaggcggtggatagttgcggacgtgggggccagacgttgaagggccatgttgttgagccggctccgtcgcaggaacttgaaccgccggcgccggagtgaagttgtattggggaggaagattcgccggtcttgatccgccggcgccggctctctgagtgacgttcggcgtcgtcttacgctttcgggagccatctcgaccggcgataggcatgatagatcgacggagaatattgaaaagaagaagaagaagacgacgaagcagctcgaagaggttgaaggtgagagatcgaagaagatcgatcgatcttagcagaagaagaagaagatcgatcttagaaggagaaatgattgagaattggggattagggtttgagagatgaagaagatcgagaattgggattagggtttgagagatgtagaagatcaagaattgggattagggtttgagagatgaagaagagcgagaattggggattaggactagggtttgagagatgaagaacttcgagaattggggattagggtttgagagatgaagaagaagaagaagaggaagttggatcgaagagaaatgactaagtgtttggctcaaagagaaaggaagtttggatcgaagagaaatgactaagtattcgcataattgtcgcataattgtcgcataatcatttgggtttgggcctcgaaatttgaagccctactaattaaatcagcgtcagtgaatagtcgcaattttgtcgcctattacactgggtttgggcttcaaaatttcaaagcccaacaaatcaaaatggtgtcgtaaaaaggtcgcatttttgtcataaaataataatgggtttgggcttcaacatttagaagcccaaaatatcaaacatttgtcggccaataatcgcaataacgtcgcctataataatgggttttggcctcaaaatttaaaagcccacaaaacaaacttttgtcggtatttagtcgcattatggacgcctataataatgggtttgggcctcgaaatttaaaagccccaacatatcaaacatgtgtcgcataatagtcgtcgttttgtcaccgtttttaatgggtttggactccaacatttagaagcccaataaatcttatattgatataattataaatgtgaaagaaatatacatatatcataaaaagttcaatgatattatgaaacaaaattcattctaatatttattcaaataattatacatatattcacacatttatacatcttcatcttctacttcatcttcgtccgaggacgataaattacatcggacttcgtcttcttgttcagcatccccgacatcgtaatcaaggattattgggtttaagttggatactggattttcaagtacaagatcttcaattgtagtgagcaaaacatcatcatcattttatgtttgcaaaagagttggatcattgttttcatattctccagaaatgttcccctcggattaacttttaaaacattgagccaaatgttctttggtttcttcgtatatggatacggaatataacaaacttgatctgcttgagatgctgtatacatatatcaaacaagattattaataattaacaaagaaacgtattttggacttcagaattacgtaccaagaataaatggctcgtatttattgtatttcctcgtagatagaacgtctacaacgccaccatggcttcgtcgagtgcctctcccagtctttgggtcataccacttacactaaaaaagtgtgatcctcaaattgacgataccctcatactcgagttctataaaatcagttaaggtaccgtagaaatccgcttcatcagatgaatcagcgtaattttcacctttaacacacaccccatagttacatatctttcgtccagcgccatgattttgcgtatgaaacaaatatcctcttgtgaaatacattggccaagttttaaccttgttcaaaggtccttgcacaatctcttgaacccaagtaggaaatggagaagtagtgttccaatatgttacctacataatagataaacaatattaattagtatatattaaatgatcacttttcgaatgaaccaaaattgagatagacttacatattctttaacccatagatgatattcttccactcttttcgcgtagagttctttatcgggcaagcatggatattttgcagaaagataatcctcgaacatattacatttacaaacgaagaaatatttatcaaagtgatcttagtgaaaaattaaaaacaacaagtgattaaaaatacctctcaaatggtttaaaatagtcacaatttcttaaaacatatgcatgtgcgctttggtagtctttctctgaaagccaatctacatgcatttcaccacttggacggccgacatgcataaatatattaggtactccagggacatgatatacaggaattttaccttcattgaatcttgttaacctgatccatgtaagtgaattaatatcgaagaatatctaatcgttaaataattaaatatatttaccttgattttgtttgaatatgatcggcaaagtagtgctatgaaaaataagcaatctcgccattgatatatgactcaacaattgagcatgcagcatatcttttgttctttgcttttcctttcaaattttttaaaaatctctcgaatgggtacatccacctatattagactgggccacccaattcagcttggtatgggagatggataggtaagtgttccataacataaaaaaatgatggtggaaaagatcttttccaagttacagatgattaaaactatgttctgtttgagaatttgaacgcgacttgtctgtaaagttctcgaacatagatctcggaaaaatgctctaattcctaaaatatatgtgcaagttaaatgattagattaaaaaaatgttggaataaaaaatagtaagtattgtacctgatagtgcaaggtggacattccggtcaaggagttcagcaaagataaatggaagtagtcgctccataaatacatgacaatcatgactcttcatgcctgaaaactttccattatccagatctacacaactagccaaatctgaagaataaccatctagaaatctaatattatgtttcacatattgtaataaactctgtttggcttcttctgtcaatgtatacgctggaaatggagctttgccattactatcaatatgtaagcctggccgtgaacaaaatttctcaatatccaatcttgacatgatattgtcttttgatttacccttaacactcatgagagtgttcatgatgttgtcaagaaaattcttctctgtatgcatcacatcaatattatgtcgaagattgaggtctttccagtaagacaactcccacaagatgctttccttgtgccaattatgttccttcccatagcctcgcatcttcttttcatgaccgttcccaccaacatccttcgtttttggtggatttacactagccaaccgctcgtaataaacttgctcccctgtcaaagactcaggtggatacttgctagaagcatttcttcctttcagaaagtcttttctgttcctacgggatggatgaccatgaggaagaaatctacggtgacaatcaaaccagcatgtcttccgtccattgggtagataaaaagactttgtactttccatgcaaactggacaagacaatttaccatgagtagtccatcctgataacatgctatacgccggaaagtcgctaatcgtccatagtagtactgcttttagattaaaattctgactcaatgaaacatcgtacacatcgactccagtagaccacaactcttttaactcctcaataagaggttggaggaagacatcaaggctagctcgaggattatttggaccagaatttagaatagtaagaaataagtactttgtattcatgcatataccagggggtaaattatatggagttaggatcacaggccacaacgaatgattacgagacatgccaaatggattgaacccatcagtacacaacccgagataaacgttacggggttctttggcaaactggggatgtaactcttggaaatatctccactttgctgcatctgaaggatgattcatttctccctcctttgattggtgctcagcatgccatcgcattgccgcagctgtcttatggctctgatacattctcttcaaccggtccccaatacgtagtaccacatacgactatatggtactttggttcttcgacggtcgtccttaggcttccatcttttcgcgccacaaaatcgacattgatcttctttttcgtcttctttccaaaatagcatacaaatgttctgacaaacatcaatcgtatgatatggaagtcctaaattgcgcatcaacttctcggtctggtaatgtgaagtggtagcctggtttccttctggtaaaaaatctgtaaacagttcgcaaacggagtccaccaacttttcactcatattatactccgccttattgtgcatgagtcaagatgataaggataactgcgactgcccttcacgacaaccatcgtacattggattatttgcaccttctaacaagtcgtagaacttatttgaatggttacgaaccggttcttccacattctaataattatcatcatgatgatagttatcatcataccccacgttaaaattaaatgcatcgttcaccatatccacatatggatcttctacaacattacccacttcttcatgattctcactaaaatacgtcctatccgtgtaactcgttcctatatccatattcatttcttctccatgcttataccaaacataataatcaggcataaatccttgactaaacaaatgactactaacttttctacccgggatgatgtgtttttcattcttgcatacactacaaggacaatgaaatttacctcgactactctgtactattggctgactattagcgaatgtcatgaattgctcaactcccgcgacgtattcggctgacaaattttccgtcacttcattaaatctcttgtacatccaatctcgatagaaaccgccactaccgccataattgtagtttcccgccattatacaataaactaactaattttttttttctatgatgttgttgttttaatttgttggtgaaaaaagagttctgtgaaagtttattatataggccaatttttgtgactaatttacgactacaactaaataattaggtgtacctacttaccaatgcgaaacacgttttccaactactttatacgactcctatgcgacgtttctacgactacaggacgactaagaagagtagtcgtccattagtcgcccaattagcgactaaattaaatagacggtagaatagtcgtctattagcgactacttaacgacaaccttctcccttcaataatacaatcgtcaaatagtcgttacttgccgactatgttccgactacttaggttagtcgtaaaaaaaccactatgtaactacaaattttcgagttgtcgcactgtagtcgtaaaaccgtcgccaaactgtcgtttaattatacaactacgttgattgtcgctgattgttgtcgtcttttacctgttttcttgtataactgcgtggataaattattaataatcacaagatcctataatgtttgacacctttaataaaaaaattttaataaaaatatttagttatggagacaaagaaataataaatatttttaatatttttaatgatggaagtgattaaaaataaggaaatcatatatatgaaaatatattgttaacaaaaaaatctataatttaattctattagggcacaacataaggaatgtatattctaatttagtttatctagtctattattgtgcaaattagaacacaaattaagagatgattgattaagagaatcctcgttcaaataatttatgttttcaacttagaagattctgtaacattttaatgacaaatttctttggacaaatcttttaataaactctaaggtttggtttttgtttttctttgtttaatagtatagatatctaactcattttttagtttacattttaatcaaaatttgcaatctgaatacattgtgttaaaatcaacaaaatatctacataacttaaatcaaaataacctaataattcgccaatctaaaaacagttataatttgatctaagtttacggaactatagtaatttagtaaacattaaataaaagaaagcataataaaagttaatgtttaacagaaataatgcataggaaatgaaataaaaacataaacaaaatcttaatagtacaacctttaaacataatagaaatgtttttataaaaaacgatggaaaggggtctggtgttgcatcttcagttctcatcaacaacttcacctagctcaggtggctgcatccgttcaaagaattgggttctaaaacagtagaagaaaaaaataaccaagactaaaaattttaaaaatacatttttaaaaatacaataaacaattaaatgataatgaaaatataaacgttcttacgtgatgcgatccatgttaatctctgggtaactttgattgaaaataattcctgaaacaccattatgtgagattagacattgacgacttaaaatattaatgtttttattatatgagttagctatataaattattgataagatgagaagagtcttaaatataccttcatgatcatcaacattccaaaatcgaagcacacagtttgtaggattcataccgaaggtccactgataaccaaggtttagaccaagtttcctccacaattgcacaaacaagtcacaagtatatcctcttgcaacacatatcagagattttcccctaataacaatatcaaaattatttcaccaaaacatctaagttctatgaattaagccaactataaagataacatgatttactatgtttgtgcatttaaatatataaccaaatagatgtcgaactatatagtggaaaatactaaccaagtatttttaatctcaaactcgagaaattgagaaagtgtaggattttctgaagcttgaggaacaaaatccggtcttcttatattcccaactctcacgacaacaccataagcatctacaaaaaaaaacgataacatgaaagatatatatttccaaataaacagacttaatatttttaaaaaatctaaataagaaaattaccatggacaattaaagaattaatagtcttattttcgattatggagaaggcaacaaatcgaaaaaagttacttggaaccaatctacccacatgagacagtttggtagtctgaagaaacttgattctgaacttattatcggctaagggaggttgtctaccgacagatgctctgatcagatgtatgttttccatgaaaaaaaaacctccttcttcgagaactctagggacgtcatatccagggtagaaataaggacaaatggcatcaatcattgtgccctaaaaaaaaaaaaattgacttatgaattaataatagattagatccaatgaatactttttaatttagacttacaatctcgttgcacaagatcattcggtatgacttcccaccctcatgaggaagtgttacccaccaacatagtatcttcacaaaaaccttccacctttttttttttgggaaacttgagagagatatgagatacctttgtaataaccacctctatcatctctcaacgttttttttttttttgaaactaataggttagaagaaagatgtcgaagataaataatggatataaataagggaggaggttaccttgttttcaagttatgtgtcccttgacaattttgaatattacttgtatattaattttataaaataaataaattaaatagaaaaagttaaatgccatgcaaatcttgtcaatcgaatttggaatctcgatggtaagttatagttgtttttatggttactttcgaaatttaatgaattttgtaagaaacaaaatgtgacataagttgtcatatctcttggatgagttgtcaaatcttgttatcaatcttggaaaagatggtaagaaaagatgtgaagaatagatttaattgagaaagcaagtcttataaataaattgaattcaatatagatgttaatatttgtatctactcaattattccacaaaatatgtataagagcacaatatatttataataaactgagatcatatatatatattacattgaacataaattaaattttaactgttatatatgtatcgattatttttaagtcacaaagttaatgatgtcactttgatctatatccaaaaagaaactttaaaatgagtacctaggtttccaaaataaataatattttaatatgaaagaaaggatattgaaagataatgcttttgcagggttttaaaatataaacaaaacaaatatatatttttacttttttgtataagacaatgacattaagttgaaaagaaatgaacttaataataaatgatcctaatgtttccaagaatgatttatctcaaagttttaaatgttttattcttggtacccaaacaacttttatcaaaatgtaaaaagaatcatcaataattatatgtctaaaaaaacaaatcataaggatagtattttaacagaaataaaaaaaaactacaactatacttttatgtaatcgttgcaaaattatataggagtatgtttgtatttttttatgttatacttgtaaactttgttaggagtttaacaaaaagtgaggtagagaaaaatcaaacgggaatacaatacttaaataggttcaataccttagcaaatttgaacaaaaaaacaacttaaaatgataaagtttggagaaaattaaaagaagttcgaaacataatttaaataagaataggagctgcgaggtcaaactcctaattctcttcaatcacttccatctttgggttctctggaagttcatcagaatcttcgaaacggctgtaaaagagaaaaataaaaaattgtattgattaattgatgttatggttaaccaatacaataaaaaaatactaaaattcttacatgtaccttggaatatctatctcagggaaattggttggattgatgtaaattcctgaagatccaaattcactcttcaaaacattctcgcctgttctaaaattttcatttaaaattatataataaaaataacaatcataaataaataggattacaatagaaaaaaaaataactaaccctcaatctcagcaattctccaaaacctcacaatggcaacaatgggctgatagttataagccgctgaactgatacatttcgagaaatttgtaacaaagagttcacagcatcttccaacagcatagcatttcattttctctcccctaaccaatatgataaaacattagactaagcaatacattattaagctaaatttttagacaaaagacacttccattcttcttgttgccactctcttttgttaggttaggaacgcagtaactcgaccacattactaaacatacttaaaaacactacaacttacatattgtccaaaagatcgaatgagacatatcttgattcataatcggtttcaccttggcgacaaacaaatagaaatttcttaatagccgagatatttgacaccacacccattgcatctaagtatagaataatatattaatacaatagttcaaaaataataacataaactactaacaaaaattcattcttaaaatgagaagaacatagattgactaaaaacttatccgtgacataatcccaatcctcaagatatggatacttaaggtcaatggaaaaaataaaatcaaagaagtctcttttcacaagttccggaaaagggtaaacacttgtttcccaaatgaacttgatgtggaaacgaaaggaagaatacctaaccattcctttaggaacaacgacccgaaagtgagagatatgaatccatgtgccaggcttgagaaacggacggaagagattctgatagtttccttgaggaattgttgcatcaacacggttattctgaaaaaattccaaataacccaaagattaagtaatttgtgatgatctgtttcaataataacaaagtaaattgggattaaaagaacaaaacaaagggaaaatacaaaccttgtcatcatgaagaatcatggtcgtaatttcaccatgactgtttggagcatgattccaaattgacaggatcttcacgttaatcttccagttagtcgagttatccctcaaatcggtgagttgtgaacagacatcatatgtatccaaggaagttttttcttgttttgaaagataaagagttaaacctaattgttttaggtttgaggtttttgattttatataattgcgaaaagatacaatgatggaaagttgatgtgtaaaaaggaaacgaatcgtctagaaccaatagaatttcttataggttagaacaataatgatgacatttatttcttagcgtgttactaaaaattgtaattattaaaatgagattctatgaaaaaataggaataggtttgttgtgtttgagttctcatgattaatcatatttaataagactgatgatttagtgtacaaaatatttgctaattctaattttgttgaatatttaacacaaaattagcaaaattgtttatagttcttagtatgattaacattgtaatataaaataatgtgtttcttaataatcaacaattttgttttctcaaaatttgatgttttgagtttttttcttgtttcaaaaagattgatgttatacatcaacatcattactatttttattgttaactaataaaaagaagagagaaatataactaatattatagttaaactaacaaaataataatatttcatgaaaagttgtttttcttaatttgtgtgaatattctacaacataaaatttggtggaacagagggagtataacttaagaaataaaattgtttaacaaaatgacatatcaatgaaataactttattaattccaaaaaaacaaataaaataaagatagtttacagcttaaaaaaagaaaacaacttcgataactttaagcaacgaaataagaaagaagaaaacgatccaagctagagtagtcattgagcatcattccccggagccttcctcagacatggtcatcttagaacacttcttcctacttgtggaagcctgatcatttccatcaacatcatctgaatctttttgttttgatgatagagtagaggttgacgaccaatccacatcagaaagatcaacaccattagtgagcataagagaacccaatataaaaatacaaaaacattttaataagacaaccctaaaatataaatagaaatgattggaattgtttaacgttattagtcaaacatgttcgatcgaaattaaggatgatggatcaacgtatgcatcagagtcttcttgaacgatttcatcagcaatgttaccggtgtagactcgcacaacagtgaatgaatcatatccaccaaatatgttttccctttgaatacacaatagaaactgaaaagtcttccctttcaaaccattgatcacatcaagcaaaacagttgggtcttcgatctacataaaaatatagattagtataacatgaacgtagtcattttaatgaaagagtttattttaaaaaaggcaatataactcatcaaatgaaccatcaagcaattaaggggcagtagtaccaagaatttcctttgcatgactatcgaataacatgcatctagcttcaccggttttgtccataatatggaaatgtaaccaaaacctaaaagttagataggattattagcttctaaacaccaaattataattcataatacattcaatataaagatttcacaaagactaacttggctacgacagatttttgcaaaaccattgcatatttcacaccaaaatcttggcttctgaggtagcttgacatcttcaagtttgataacttcctctttgacaaccttcttgttgtgagcacgacaacaaaaatagtaccacggccaatctgtatcaattgccaaaacagtgcaaactgtttttgcacttacccaccttcaaatgaatataaataggaatccacaaactaagttaaaaatatgaaaaatgtaataaaaaggttagtagataaaataaattaatgaatagtacatcagaagatgtgaggacttccttaattgtttgccttggataatcaccatcgtcatccccagtttttggtgcatagagcctcttgtgaaaagatcccgaacttcccaaagttaacccatcggttggtatgctatgtataaagaaaatatattttgtttaatattatctagaagcaaatatatttagtgaaatataaatacaattacctttgcttaaaaagacccaactcagccaatgtgggatcaacgaagacttgtgaaacatcaaaagaattggaaacaatcctactatctgttttataaataaaaggacatgtttttataaataatagtatagatatgtagtaacacataacaatatatttaccattgtagagattgatcttcgcaaatcggattaagcaaacaacaataccatcagttgactcctggcaagctt

SEQ ID NO: 197 - DNA, 110941 bp, Arabidopsis thaliana
aagcttctaaatagcttccttgggattgatcttcgacctcctccatatatcgatcatttgttgcacatgatcaaaatcctgacccgtgagattctgatttcccatctttgttggctcatatttcgtcgatcgtgtttgttgcagcacctccatgtgtctgagaaacctctcctcatacatttgttgatgtctcagaaacattttcaaattagatgagaaaaaacttgagttgtgttgaaccaaggattcacacaatagatttgtttagagagggaaaacaaatctagtaatttctcttcattaggtattctatccaagactcgattacaaaagatgttctaatctcttatgaaatacattagggttttgctcaagaacagaaaaagagttagggttttaaaaaggtatagctgcatccatgatggattgcttacgtaccctgtgaagggatcaagccattcgtagttctcaataggtataaagttatgtgttcttgtgagtatccaaagatccccctcttgtgaagtccctgaggcactttatataggatccttaaaccgcccccttagcgatattcttcggaagattcttatttatccttaggtcggttctagaggataatcgtcctaaggatattctccttattcttcggaggttttggggagatttcctgatttcaacattatcttcaaagattctccttaagtctttgcctcgcgtgttcttcacggctcggtggtcgtttgagaggtggcttcggggcaaacggtatgtaccggctcggggcgcgcttgatgactgtccattaagctcagttggctgtctcccgagccgatatagatgtttcccgcagcgttctcgcgattggctcgggctgtgttcatatgattaacacccgagccattttacaaactctcttcgggacggtcgatcgaataaggtcccgaggtgctttgttctaggctaggggccaatcatatgtttaaccatgaggtgattgttattcttagactgtttggctcggtcttgcttgtgggggaatccgaccccaacagttagccccccagctcgttggttaagagttaatgccacgagcttcatgaatggtgtgaccgagccagctgctttcgcatctaaactgactaatccgtatcttttgaaagtaaggcttgttttttcttggtgctacgagattctgttcttgacgggtgttgctatctcgaactcaaaatgttagctgttgacaagttgtgagctaggaaagctgctaggagacttgttgaagaactccaagctgttgacgagctgttaggcgggcaatagcaagctaggaaggctgccgacgagctgttagctgggcgaactacgagtcagagaaactgcagacggactgtgagctaggaaaagtgcagactaggtgctagctagacgaactgcgagctaggaaagctacagacgaacaaggagctaagaaagctgcagacgagctgttagctaggcgaagtgcacacgagctgctagctaggaaagctacagacgaactgggagctagaaaggctgcagacgagctgtcagctaggcgaagtgccgacgagctgctagctagacgaacttcgagctaggaaagctacagacgaactgatgtggttggctcgggtacaaattgcgtgagtcaaagctgggttcagtatacttcgttccgagctgatcgtctcggtaccaggttattcgggataactggatttctaagcagaccaaagcagataagaaactgtatttagccgaagcaaaagctcggcaccagtgtttatgataactgggttttagtttccgaagcggttgactcggtaccagtgtttagagtaactggatttcagtagacttgaatacccacggttgcgacccgatttgattcaatcttttaccagcgtttagaaacgagctggggcaccggtgttaagtataaccggatttcagaagatagaattcatagcctgctcggaaaaacattcgagcagattcttatcttgaatatttatatagcgcgctgtaaccgaagcggtgtaaatgaaactttgaaaataataggccgtcgcccgttaaaatatttcaaagtaaaaagatttagaaatcaaattccaagaaaattcgaagtagaaaaattgaagtgggagtatggatatacggaccccactcccccccctttttgctcggtagacgagtgtttttgcaagtttacgcaaaaaatatagcagagaatgcatatatatgattaagctgtacttgttagattataatagataacacttatcttattggtttggacatagagatgatgaaatctacggcatggacgatctgaatctttgagattgtaaacgtcgttgtatgaaaatctacatttaagatgttgttcgttagaggagatctcatctttgcgtagaaagagagaaggatgaatgcttgtgatataagtgagaatgtcaatcaagcttaattaatatgtaagaaagtaattgaacttatcttttatgagggaggtcgtcgagacagaattggagatcgcatcattgatgaatgagtggaaaccttgagcgattgctagtgatgatccattgtcacttgttggtgtaatgtacttccttttgctgatttatagaagaactgataacttccgtttgaaccgttaaactattgatcccaccgttgaatctttagctgatagtcccaccgaagattttgtctgaattttagtcagatcggatattgcctgaggcttctaccgtcttatgaagttgctgtgacaaagtgaatttttcttcctttgctatatttgttttttggtttcggttgctccggtagcaacatacgatcctcagtgaatataggaggcagtatccagtgatgcttactctttggctgacttctagtgatctttcttctttacttctctttcctatgaattttcccggctggtgcaatagagctgtgatgaaatcggtttctgtaaaggttgggtcctttgcatttctccagtttatctggtgatatggcctcttaactgagctctttcttttgaattttcattacacatgtttttgtgagatctgaacaacgtcttgtgattaagataaagcagaagctctccaaggcgaggaagggacaatttttcttagatatatgttaagacgagccgattgtagatgaaagacgagcttgaggccggaagacgatcttgatgtccgaggaagaatagagtttattcgtcttatagctgaaccttgtaaaaggttgcctacgtacccttagaaagggatcaagctacacgttcatatcgtgataaacgagctaggccattactggaggaaggtcgtatggtagatgacgagccggcagatgtgcgacgagctggatgaaccgtggtagagaggcgaattggacaaaccgagttgtctgctgaaggtttagacgagctgggcgacgagttaggtggactctgcagtcaatggacgaactgccgctaggcgaggaggtagatgagttttgcagtcgagggatgagttgatagctagacgaggagttggacgagctgactagctgacagctaggcgaggagatggtcgttgagtgatgggaagagcttgaagacgagctgagcttgaggacgatctgatgagcttgagaacgagctaaggagcttgaagagcttgaagacgagctgagggacttggtgaagagaacgagttgagaagcttgacgaagaggagcgagctactcgagaagggcgagctacttgacacggacgagctgacgtgctacttgagacggacgagttgacgagctttgtgagacggcattccccccttttgacatgacatgatattctgtatttatagcactacgcgtgtagggcattcatcgagggattgaaacttattttgggcttttgacttgggttacagttgattttgttaaatctaaacaacgaccttttttgttgcgttcttagtgattaagatatatgttgcgttccatgcctccatgacacatggtccgtggtgatgaagtgtggcgatgatgtgaagctttcgtaaattgaagaccatcggtggcgaggtgaagacgtgaagcctaagatgggcatgttggtggaatcgtcctggaaacgacgatggacgtaaaatcggtcacaaaggtggctgatctgatagccgcagacatgcatctttgggctacagccaggacgtgcttgtcgcagaaaaacagtaataactcttgttagacgtaatcaattgaggcaaggatgagtccgttagaaagataagccttgtagcttcaaaatgatgtgcagatcggctcctggttccttttagatcgccgggaaatcgatctgaaagcagacagatcgggtgtagacggatctatgcatgtctcgataaacaacgcatgcttgagagaaaaacctataactctcggaagacagcaccaaatggagcaaaatcgatcttgttggaaagataagcctcagagcttcatgatgatactaagatgggctcttgatgttttctgaatcgttgggagtttgctttctaatccagttgctcccacagttcgaatctgcgatttgacaggtgtcatatgttttagtgaaacagtgataacgcttagtaaacagctcggaattggatgaggtcggtctctattgaaagataagcctcggggctttcagttgatacttaggtcgcctcgtgatgccttttagatcgccgggaagttgattccgaggtcaacagatcggatacagatcgatctgtattttgtcactttctgcagataaacggcagtatctccgagaaaacagaccctaacgaagtgagctcgggcttgtttaaaagaggagcctcagggctttaaattgatctgtagatcgtcttctgagtctctctagatcactgggaaattgagcttgagttcggctggtcggatagagacgaatctcggatcaaggcgaggtcgacggtaactcctaatagacatctcggatcgaggcgaggtcggattctttagaatgctgactcttggggcgatctgtagataggtatatcattgcctagttcatcaggattttcaaggaaaacgatcccgaagctgactggctggctgtctgctcctcgaggattttcaacttggagtgctcctcgaggagttttatagagttgggtctcatgactggctgcacttgcttgaggtaaacgtttatatctctcagcatatatcttcgattaaggcgaggtcaacttctccgaaaagacgactctttgggcgatccgtagatgtattaacccttacgagattccctgtgatttgccgggaaatcggccccgaggcgaactggtctattcggacggatctgttaagaaacagacagcatcgacttcagcagcgataactctgagcagagatatccgatggagttacggttagattccctggaacgctgatctccggggcaatccgtggaatggttatacgtcatctggttcattgtatcttgacgggaaatccccccgcaagtagacggatctgattgtcttggcttgatgagcgtacatcgaatacttggatgaatgatatgcgaagagagttctttgtcgttccccacagacggcgccaattgttgaaccaaggattcacacaatagatttgtttagagagggaaaacaaatctagtaatttctcttcattaggtattctatccaagactcgattacaaaagatgttctaatctcttatgaaatacattagggttttgctcaagaacagaaaaagagttagggttttaaaaaggtatagctgcatccatgatggattgcctacgtaccctgtgaagggatcaagccattcgtagttctcaataggtataaagttatgtgttcttgtgagtatccaaagatccccctcttgtgaagtccctgaggcactttatataggatccttaaaccgcccccttagcgatattcttcggaagattcttatttatccttaggtcggttctagaggataatcgtcctaaggatattctccttattcttcggaggttttggggagatttcctgattttaacattatcttcaaagattctccttaagtctttgcctcgcgtgttcttcacggctcggtggtcgtttgagaggtggcttcggggcaaacggtatgtaccggctcggggcgcgcttgatgactgtccattaagctcagttggctgtctcccgagccgatatagatgtttcccgcagcgttctcacgattggctcgggctgtgttcatatgattaacacccgagccattttacaaactctctttgggacggtcgatcgaataaggtcccgaggtgctttgttctaggctaggggccaatcatatgtttaaccatgaggtgattgttattcttagactgtttggctcggtcttgcttgtggggaatccgaccccaacaagttgtttcaaaactctcaatgaaaacaccaattgataaggtcagaatcacttatcaagcaagtaaccaaaaggagatgagaaaatagaagaattaggttgagaagcagaagaattcagaagtagaaagaagaagaacaagagagaagagagatgatgaagaagataaacatattgttatgatctatttcgatagtgttcctgtaagggagaaagagttgttaaatacaaaggttaagggtttaagatgccaacaaattggcagcccaataacatactaaaagaggcccaataaaccacaatcggatacttatcatatttattagcttttgattgaataggtaaaacgtaatatataatacataccatatgttcgattaaatgtctgacattgtgtttaacttttgatttttgactcatttttgctttgtgatttaggatttcctgaaaatattttaaggtttgttttgagaattgttacaatgtaatattagatatgcttacttggaatttttaactttaataacttcacaagagattgctttgagaatcagtcatgacccatgagtctacataagggacccatttgagaatcagtcagaaggaaaaataattataatggtcaaatcgccgaaactgaaaacggtatcatcattaactttttatcatcaatatacgaattactaagggagatttactgtgataaagtacaaattaggtgttattaccagaacagacaaaacttttttttattattgtcatattatcgtctttttttaatatccagcgtgcccttactaaacgttaccgaaaaaacgtaattacaaggaatgccactgtcatgtcagaaattgctgacgtggattaaatgaactcagccgtaacgcgatacaacggcaattacggctgaggtacggtatgttgcggctgacttacgacaaaaatatatgagtaataacaaaacggtaaagtatgagtataactcagccagacgttacagctgatttataaaacgttgcatgagttatacgataactcacgcaattgtatggctgcgttaaggaatgttgtccgagttataagaatttatagcataacccagataacgttatgtccgagttatgagaaaacggctgacttattacctcgacacggttgagttatatttttggacggcttagttatgggatgatgtgacggttgagttatgatcgagtgttataaatcagccgtaaagagctcgattactaaataactcagccttgttacggctgacttatgtgcaaaagattaattactataatagcatgcagttacaaccgagtttttaaacggtacagctgagttagttgagttacgacattacacggctgacttaactttgtttttttcctttttcaattactgtaatagtattcatgttgcgactgacttatagatttgcttgatggctaagttatcaaatgttcgtttggtggcttagttgccacctcatcaattcaaaacgacgttggctgtaatattccatgtcatcattccatgtcagcatcatcaaaggacaaaaaaatagggccaaagtttttcaactcgtcttcttcacctgactttttcacatcactagaaaatctaattcctcatcgttttcctcattttttttcaaattctttcatccttctcccgatatggttgatccggttccgtaatttttgtttccgagaattgggtatagaaacacaaatacatatttacaccgatgaaacagggtgtagacttgtgcagatagatgcggaaacaacgcacgacaaacttgtgaagttgtcgctcgatgataaagttagacgaaatgttgcatctcttattgtttcgcgacaaatttacatgtctcggctcagttatatgcttaagggaagacgaaaggttcagtcaatttacatgtcacggctgagttatatgttccaagaaagacgaaaggttcggtcaatttacatgtcacgactgagttatatgttccaggaaagacgaaaggttccataaaattacattacggctgagttatatgcttaagggagaacgaaacgttcagtcaatttacatgtcacggctgagttatatgttctagagaaaacgaaagattcggtaaaataacattacggctgagttatatgtttaagggaagacatctgtaaatttacatgtcacggctcagttatatgttcaagggcaaacgaaagaatgagtgtaaattatatgttacggctgagttatatgcttcagggaagacgaaaagtttggtaaattacatgtcacagctgagttatcattcagggaagacaaaaggtattgtaaattatatgttacggctaagttacatcacgttacagctgagttacatcacgttacagttgagttacatcactttacgaccaatttataatacagatcggaatacaatatgaaatttattggccaaataacaacaatcaaataaagaaacgtaagaatatgtttgagagatacataggaggaagacgaaaccgtatgaatcaaaactgataactgtgtattttgcatgttttgagaatccatttgtcctcactttagcatcatatcatcactgttttataccatttctcatcatttgtcatcactttgcatgtttaggataagtttgcatgcatgtttcatatttgtgttgttttcaggtgattcggagctgttgactagctaattggaagaagcggacctgatcatgcaaaaccactcgacccccaggtcgagtagacgcttcacaacctcaccagaccactcgaccccctggtcgagtagaggacatcaccacttcacctcaccactcgaccccgaggtcgagtgtcttcatccccatcacctgaccatcattcgatcacatcactcgaccccgaggtcgagtgtcttcacctccattaccagaccactactcgatctcaccactccaccttgaagtcgagtatcaccatcaccaccactcgactacatactcgatagcgagcttcagagtcttcttcattccgcagtcaaccagacactcgagcacaaggaagaaaagaagactccagctattcacttgacctctcactcgaccacctgggtcgagtacagttctttatctgtcccaatactgcgtcgttttaagtattagggtttcagaatgtttggctataagtagcatgtacttcacattttcgcaaacaagtttttatctagttttattccgcagacattgtgttctagaccttttgtaatccggatttctctttatctattcagtattcagtatttcttcttgatttcatttactgttgttcatcctgttatcattctgctattacactgttgttatcatgttttcatacgtttatgttttctgcaatgatgtctgagtagtgaataggtttctgaggatgggttagagtagtctagaattctcagtatgctaggtggttgagtttgatttatagatctcttctgtattagttgttcttaatgcctattgctttctgatcaactgtaatttgagcccagacatttccgcgcccaaaaggtgttcgatgaaatgtctgaaccactaattccagagattcgtggccctttaccaaggtattggttgcagggagcgttttggctttaacttgttgatttgtaatgcttgttaggttagctctcgtctatggtgattgagtctgggactaggttaacttgagggtctctgttgcggtagcacttagatttggttaatgaacttgttgtctagggataatttattgagcatgtcaatcacctgtaaactgaggaaacgaaactactcaattaccccatcctcgggaattctttatctgattgattttattgtttactctactgttgtttactgcatcttgtcatctgttgtttagtttctgtaattctttaccgttacttgacctgatactcgaccacccagttgtctggcaacagactgtgcagtcgagtatccctgttatcattttctgtctgttactcgacctgtcactcgacctcacccagtgctctgcaaagagctgtgttggtcgagtgttttattgtttctgcttgaatttctgttttctgcatgttcacttagaactgctagaacacaccaaaacctgttattgcttggcttgacttagtgacttctgatcacatcttgattgttagcatcacacccatttggattgacaaccttcagtactacaacgacatgatagtgctttaggattaattgatcttaaaaacctattatcaaaaacattgatagaagtagaaatatctttaaatagatcgattgagaggaaaactaaacgagagacatataaaatcaaagtaaaagagtagttattcttgattcaactcaaacatgtaacgaatcatataaaattccatagatctctttgatttgggttttgatttttttgacttgaaattcgacaccaccgaaggagtttcggccgaaagagacgagataagtatagaacggcgacgaaattagggttccgtcgactgaacgagagaagagagcggcgttttttttttttttttttgtgcggatgaacagtgaaatatgctgaaaaaataagaaactgaaagttttaagggaatttttggtttcggatgacgtggattagggtaaatgacctggataattattgttatttatttattttttaattaaaataaatttaataataatatttaattaaaactaataaagggtgttaactgtaattacacaagtactgaaaacatgtgagtaataaaaaaagatatgttttattgtatgaataaacatacaattgtgttctatcctagtaattattttaattactaatagatatatttgtttgtatttatagttggatgagaaatataattgactatatcagagacctatatttagttttggatatattgaatattaagtatatcgatgggccatataattgactatattacctattttatatttttgacaatgatctttttatatttttaaaattaataaaagaaaattattgttttacatatttctaaacaaaccttacttcgataatttaaatgttcatattgcgatctaatgtaaacaattaaaattatcaaattcgccgctgaacacggtatcatcattaattttttatcatcaatatacgaattaatgatagatatagttgtctgtatttatagttgaatgagaaatataattgactacatcatatacctatatctagttttggatatattgaatattaagtatatcgatgagccatataattgactatattagctatttacccgaaaacaaactacaaaatcctagtatagtatatcccaaaaatataatatttttacagtatgatatttaaacgttcatatctgtattattgaattttaagaatttatttatatctatcgcaagaatgtataacactttctaattttaatgtgggctagatagaaacaaaattgtgacaatatgagatggtctatatctagttatccacatcatgtaagtttttttatataaatattttatacttattcaaaataatatcaaataaaagtgaaatgatcatgatatatttatgtttaaattaggtagagaggttttaggaattagttcaaatttgttatataagcattaaatcttcatatttttcacttccacttcatcttctttatttttccctatatcttctccattcaatgaatttagtgcctactcccctcataatgatgacttgacctctcttccgaaagcttataaaaccatgacctacgtaactgtaccaatcaaccaaaggcctatgcaatcagcatatcaaatccaatcatggcatcaacagctctctacacttcttcccatccatcatatttttattgcatcaaaagtgtatctcacaaacgttgctaatatattatatatataatcaaacgtttaaccctaaccaattaggattaataatgggccaaagcccaataactctttttattgatccagtttgcttaggtgtgttaccctgtaggtttgtataatattagtaatgagttataactcatagattataagcggtctctagcaaaacattataatcacctaatattatacaaatgtcaaacctcgacattacaactttaactagagtaaagtacaactgatttcaggacattcccaacaatatttttattgcatcaaaataattagccaaaaaattagatcactaacccatgataaaaaaatattcataaaagtataaaacaatgaatggtttcatacataagcttttaagaagcacaaaccatataacaaaattaaatgttcctgtaaccttgttgattattttatgaaataattactagagtagaacacaattgtatgtttattcctataatagaacacatcttttttttattattcacatgttttcagtatttgtgtaattacagttaacagccttgattaattttaattaaatattattattaaatttgtttttaactaaaaattccatgccaccaatccatgtcatttaccctaattcacgtcatccgaaacctaaaattcccttaaaactttcggtttctcattttttcagcatatctcactgttcatctgcgcaaaaaaaaaaaaaaaaaaaaaaaaaaaaaatttgttgctctcttctctcgttcagtcgacggaaccctaatttcgtcgtcgttctctacttatctcgtttcttcggccgaaactctttcggtgatgtcgaatttcaagtcatcaaaaatcaaaacccaaatcaaagagatctatagaattttatatgatttgttacaggtttgagttgaatcaagaataactactcttttactttgattttatatgtctctcgtttagttttcctctcaatcgatctatttagagatatttctacttctatcaatgttttgattcatatagtttcgtcttcctcctatgtatccctcaaacatattcttacgtttcttaatttgattgttgttctttggccaataaatttcatattgtcttccccagaaaaatgttgttttccgatctgtattataactcagccttaacgtgatgtacctcagccgtaacatataatttacacaacctttcgtcttccctgaatgataactcagccgtgacatgtaatttaccgaacctttcgtcttccttgaagcatataactcagccgtaacatataatttacactcatctttcgtttgcccttgaacatataactcagccgtgacatgtaaatttatagatgtcttcccttaaacatataactcatccgtaatgtaattttaccgaacctttcgtcttccctggaacatataactcagccgtgacatgtaaattgactgaacgtttcgttctcccttaagcatataactcaaccgtaatgtaattctatcgaacctttcgtctttcctggaacgtataactcagtggtgacatgtaaattgactgaacttttcatcttcccttaagcatataactcagccgtgacatgtaaatttgtcgcaaaacaataagagatacaacatttcgtctaactttatcatcgagcaccaacttcacaagtttgtcgtgcgttgttttcgcatctatctgcacaagtttacaccctctttcatcagggttaaatatgtatttgtgtttctatactcaattcccggaaacaacaattaccgaaaccagatcaaccatatcgggagaaagatgaaagaaattaaagaaaaatgaggaaaacgatgaggaattagaagtttcggtgatgtgaaaaactcaggtgaagaagacgagttgaaaaaatttgaccctattttttttgtcctttgatgatgctgacatggaatgatgacatgaaatattacagccgacgtcgttttgaattgatgaggtggcaattaagccaccaaacgaacatttgataactcagccatcaagcaaatctataagttagtcgcaacatgaatactattacagtaattaaaaaaggaaaaaaaacaaagttaagtcagccgtgtaatgtcgtaactcaactaactcagccgtaacgttttaaaactcggctgtaactggatgctattatagtaattaatcttttgcacataagtcagccgtaacaaggctgagttatttagtaatcgagctctttacggctgatttataacactcgatcataactcagccgtcacatcattccataactaagccgtccaaaactataactcggtcgtgtcgaggaaataagtcagccgttttctcataactcagccataacgttgtctgggttatcgtataacttcttataactcggccgacattccttaactcaaccataccgttgcctgagttatagtataactcaggcaacattttacaactcagacgtaacgtctggctgagttatactcatacttcgccgttttgttatgactcatatatttttgtcgtaagtcagccgcaacataccgtaactcagccgtaactgtcgctgtatcgcgttacggctgagttcatttaatacacgtcagcaaattctgacgtggcagtggcattccctgtaattatgttttttccggtaacgtttagtaggggcacgctgggtattaagaaaaagacgaaaatatcacagtaattaaaaaaagttctgtctgattctggtaataacacctaaattgttacccaccacagtaaatctcccttattttataccccacgttgagccttgttaactagtttgcatttgtcggtccatttcttctttcgtcaagatcaaccttctcgtaatcaaaacaaaacaggaaacaaacgtaagaggcaaaatccttgtttgtatgaattaagttcaacgtctctgtgttacggttgttaaggcaaacacgatcccaactagaaatcattacgacgtcgttgctttgagtccacacaatctgacctaatccaatgcttttaatatctttcacttttatccacgcctttcctcacctgctctttaaaacccataatccgtgataatcttcttgatctttgtttatccagtgacgaataagacctagcttcccttcgtatctgaccaactctatgaaaataccaaagttggggatacgtaagaaagaccaagtttcagttttgagacataaccggatcacattgttgttccatgatctccaatgcaagaaccccgaagcttgtaccgggtttgaaagaataaaacggtctgttattggtagacgctgattttttaacctcttccacataaacgaatcggaataaaaaacttggcacccaaaagtactgaaacgattcatacccggcgtgttcaacccagttaccgttataccgagttacttatcacggctacacaattttgggtttggcatgatctgatactattttgtggttggtttgaagactatgtatttagatatttggcctgtataattaacaccatgcaatatcatgtgacttgcatcacaagctttgatcagggagagcgaaagttcaaagcttgtgatgcaagtcatgggatattgctttgtgttaatccaccatataaagaaaattaaataaattaacaaaaacatctaaattgcaaagaaattcataaacattataacccaaacaatgatgttgtcaacatatattagatatcaaatatagaagaacaaaattaagactaaaatgtgtaagaaatttaaaactaaaaatggaagaactgacctaaattgcatggctttggaaactcatcttctaaacttattcatcacctagacggtcaacttgttcttttttgacagctaactcttcctcttcgaaccaacgcaaaaccttactcatcaacgtgtaatatggtcatgtaccttaattttttgctttcaattatattaagaaaataaagatctaaataataaaaaatgcatcaaaataataaaaactgttttgcccagaaaataataatgaaaaatgtataatttgtaaattgtcttgttaaaatcattgcattaaaaatattaattgttataataaatagattggactaaattttagaaagtgtcaaatgtggaaaagaattattttgtaatcacacagtttcatatattttatattttttgctttatattatttcaaataaataaatatctaaataatgaaaaatgtatgttgtgtaatgataacactgtattttactcatttaggtgtatgtttatcatcatttagctttacatttgctcattgtatcatgacattttgcaccattttagcttaatttgcatacttaggcatctaggatcatcttgcattcgcattgcatgttttggtatgttttcaggtgcagaaagagctaaaaaggactctactcgatccattcactcgatccaggcagctacagaagaggcatcattctactcgacctctttactctatcgaggatgctacaaaggaggttgtagtttactcgaccctcctactcgatcaaggcaacctcagatgaagcagcagattgatctactcgcccctcctactcgatccactactcgatccatttactcgaccaagggtgaccaactctacaagacttgttgagctatcaaagcgtcttcggatcctcctcattccccactcaaccagacatctgagcatacaaataggagaggatgaagcatctactcgaccaattgatcactcggagtatagacacaaaggcgcagactttgcaacaccctctttactcgatccccaagatcgagtattcgcccaaaccgcctcaagtctcttgtcttctagtgaatctagggtttccaacattttagtataaatagatcactttgggatttttccaaaggatctatgctttatctttcagtttttctttgtgtttatgaatcttgaaaccttaattactcttaatctatttcgtttttgcaattgattgtttaagtaaagttgtttagcttgtttagatctacattttggtatgattttagtaatttctgggtttatgttcttaagaatgttgcttgagtagtgattagggttcttaaggatggattagattagggtaatctctaggttcgttaggtggttagtgtttaggtttatgtccttctggattcgcttggcccctatgcggttttcgctggctaatgtgaagattcgatgacgtccagcgtccaaaagacgttcaaatggatgtcggacctacgaattccagagatttgtagactcgacaaggagagaggcttttctgcctattggctttggtagattgtttcttaaaccgtctctgctatgtttcatcaacgagagttgagattaggaagtggtagagttatgggggtctctgtcacgagagtggattgaccctgtttttgaatctatcgtcatgggtatctacctttcgcctattagccatttgatgaatcctagagttgcccttatcaatgaatccatccttagaacttctattacatttatttgtattccctgttgattgcacttttatttacctgttatttgtatcccctatttgtatcccctgttgattgcattttagttcttaattttgtcacatgttggttctactcgacccaatgatcgagtagggctcttaagttctcatttttacttgttcgaatcctgacctaggattgttactagaaaccaaccatcattataatctgacttgacttagtcgtctctatacacatcttgattgctaacaatacagtggactggattgacaccccctataactgcatcgacatgtttgtgttttaggggaattgaactgaatcacacacatctagtataagtaggcataaaaacatgtatatcaatttggcgccgttgccaattcattgttgcattgttacattcaagatatcagaaacttttaagatcaagttcttttacatttatcaagttactaactcatattttcgtctgcttgtttttgtggtataggtactaatctttgtgcatgcaaactcgatccaaaggttctgcacacctactatcattcagagacagaattgacagaattgacagaatagctcgtgagttacaagaaaccaaagcaaaggcagtctgtgatcagcaaagaccagctgctatggatcaacagaacagaccagttgatgttcaagacccacctaatgttgatcaaccaagaaacattggtgctggtgatgccccaaggaatcatcaccaaagacaagggatagtgcctccaccagttcagaacaacaattttgagatcaagagtggtctcatctcaatgatccaaggaaacaagtttcatggtctacctatgaaagaccccctggaccatcttgacagctttgataggctctgtggccttaccaacatcaatggtgttactgaagatatgtttaagcaaagactatttcccttctctgtgggagacaaggcacaccactgggagaagactctaccctcagactccatcacctcatgggacgattgtaagaaagcttttcttgccaagttcttctctaacgcttgcaccactagattgaggaacgagatctcaggtttcaaccaaaaaaacaatgaaactttctgtgaagcttgggagagatttaaaagctacacaactcagtgcccccatcacggtttcaagaaggcttcattattgagcacactctacagaggagctttaccaaagatcagaatgctacttgacactgcctccaatggaaacttcctaaacaaggatgtagtaaaaggctgggagttggtcgaaaatctagcacaatctgatgggtgctacaatgaagactatgatcgctgaatgagtggaactgaaggaagtgaggacaaacaaagcaaggatatcaaggctctaaatgaaaagttagacaagttattgctggctcagcagaagccttgcggtatccaattgatattagctgaaagatcagtcagaatacctcatggaattctcacagacctgcctgttaaagtcggatcaataaacatccctactgatttcgaaatactggagatggatgaggagccaaaagacccattaatcctaggaagaccattcctagctactgtaggagccattatcgacgtcaagaagggaaaaatcgacctaaacctggggaaggagatgaaaatgaccttcgacattaacaaagctatgaaaaaaccaacaatcaatggacaagtcttttggatcgaagaaatggttagattggatgacgaattaccggaagaacttacaaaaggagatcacctagccagtgccttaaccaacgatggagaagaagggtatctacacttagaaacccaagggtacaaagagtatcttgacgcccacataccaatggaagaaccagaagagtttgaggaattgattgttccctcagaagaagtagtatcaggatgcaacatgagcctaatcgctgaaaaagcaaactctactgagatgctcgaccatggaggagagaatataagttcagatgacttgtcagaactcaaagctccaaagcttgaccttaagcctcttccaaaaggtctgaggtacgcgtttctcggtccaaatgatacttatcccgtcattattaatgatggactaagtgatgaacaagtgaaccagttgttgaatgagcttagaaagtatagggggcaattgggtattctttagctgatattaaaagaatttcacctagtttatgtactcatagaatccatcttgaaaatgaatcatctactagtattgaaccacagaggagattaaatccaaatttgaaagatgtggttaaaaaggaaattcttaaattgcttgatgttgatataatctacccaatttctgacagtacatgggtctctcctgtgcactgtgtatccaagaagggaggaatgattgtagttaaaaatgatttagatgagctcattcccgctagaactataacaggacataaaatgtgcattgattataggaaactaaatgctgcaactagaaaggaccattttcccttgccattcattgatcaaatgttagaaaggctagctaaccatgtttattactgttttcttgatggctatagtggtttctttcaaattgcaattcaccctaatgatcaagaaaaaaaccactttcacctgccctaatggaacctttgcttataagagaatgtcttttggtttatgtaatgctcctgggactttccagagaagtatgacttcgatattctcggattttattgaggagataatggaggtattcatggatgatttttcagggttctcctcatgtttgttaaatttgtgcagggttctagaaaggtgtgaggaaaccaatttggtactcaactgggagaagtgtcacttcatggttcatgaaggaattgtgctagggcataagatttctggtaaaggaattgaagtcgacaaggcaaaaatcgatgtcatgattcagctgcaacccccaaagacagttaaggatataaggagctttctaggccatgcagaattttacaggaggttcataaaagatttttcaaagattgctcgacccctcactagattgctgtgcaaggaaactgagttcaactttgatgaagattgtctcaaagctttccatttgataaaggaaacattggtgtctgcccctatctttcaagcacccaactgggaccacccatttgagatcatgtgtgacgcattcgattatgcagttggagctgtcctagaccaaaagattgatgacaaacttcacgtcatctactacgcgagtagaacgatggacgaagctcaaacaagatatgcaaccatagaaaaggagctattagctgtggttttcgcctttgagaaaattagaagctatttggttggtttcaaagtgaaggtctacatagaccatgcagcactaaggcacatttatgccaagaaagaaaccaagtcaagacttctaaggtggatactgttgcttcaagagtttgacatggaaatcattgacaagaaaggtgttgagaatggagttgcagaccatctctctaggatgagaattgaagattcagtcccgatagatgacactatgcctgaagaacagcttatgttctacgatcttgttaacaaaagcttcgacacaaaggacatgccggaagaagcagatgcagttgaagaagaaaagttgccctggtatgcagatttagtcaattatttggtaagtagtatgatcccccagagtttggatgcatataaaaaaagaagttctttagagacatccaccattactattgggatgagccgtacttgtataaaaaggggagtgatgggctgttcaggaggtgtgtctctgaaggagaagttcaaggtatactgggacattgccatggatccacctatggagggcatttcgcaaccttcaagactgctaagaaaattttgcaagcaggtctgtggtggcccacaatgtttaagtatactcaggaattcatagcgaaatgcgatccatgccaaagagttgggaacatatccagaaggaatgagatgccacagaatccaattcctgaggtagaagtttttgatgtgtggggaatagacttcattggtccgttcaaccctccctcatatggaaatgcttatatccttgtagcagtggattacgtctccaagtaggtggaagcaatagcagcaccaaccaacgaccacaaagtagtcttgaaaatgtttaagtccgttattttcccaggtatgatattccgaaggtggtgataagtgatgggggctcacatttcataaacaaagtctttgaaggtctattgagaaaacttgaggttaaacataaggttgccactccgtatcaccctcagaccagtggccaagtggaagtatcaaacagacagatgaaggatatactcacaaaagttgttggtgtctcaaaaagggattggtcaactaaacttgatgagactttatgggcctatagaaccgcatacaaaacgcctattgggagaaccccattccagatgctatatgggaaatcttgtcatctaccagttgaagtggaatataaagccatttgggcaaccaaacttttgaatttggaaatcaagggagctcaagaaaaaagaccaatcgacctgcatgaactggaagagattaggcattaggcaggaagcatatgagaattcaaaaatctacaaagaaataacaaaagcttttcatgacaaaaagatctcaccaaaagatttcaacattggagaccaagttctgcttttcaactcaagactcaagttatttccattaaagctaaaatccaggtggtctgggtctttcaccatcaaagaggtatgataatagttttttagtcaattatcctaaaacacatatcatgtcattgtagtattttaggtgtcaatccaaatgagtgtgatgcaaaaagatgagatgtgatcagaagtcaacccaaggaataacagttttgggggttctaatagtcttaagtgaaaatgcagaaaacagaaacaataacagaattactaaaatcactcgaccacaacaggctgatgccagaagtgggatgtggtcgagtaacaggtaggatatgaaacagatatactcaactgcacagtctgttgccagacactgggtgtggtcgagtatactggtcgagtaacagacaggaaatgagacaattgtactcgactgcacagtctgttaccagacactgggtgtggtcgagtgattgtaaaaactaagaaacaggcaatgagaacgattaagcgataatcgaataaagtggtatcctagcctattcgaatggttaacaagcgcaatcaagctatccctagacaacaggttcaataacagatcaattcactcccgtgatagaaatcctcaagtaaagctagcccagactaattcccattaacggaatctaactatgtaggcaataagaacagactgataaagtcaataaacgctctaaacggccaatcccttgggatagagacgaatatctcaggaactaaaggatcaaacattccatcgaacaccttctgggtgcgagaatgcttgggatcgaattccagttgattagaaagaaataagcagtaaacgcaactagtcctaaagggattcaatcaattctaaaacttaaccattctacagactacggattccataactactctatcccatccctaagaattctaagtcactactcagacaacatgctcaaagagataaacgcagataaataataatattgcataagtaaagagataaagagtagagaaacaagatgacagatgaaataaaatgcggaatctgaataacttggaaaaatctcgaattacaggttgcagaagcaaaagcggcgcagtagagtaaaacaaaaaataaaactaaagcaaaaactcaatgtcgactagatatctcgggacagaaccctaagacatctatttatacaaaacgaaataaaatgatagtagacgggccaataacctaatcgcccggcccatagagtgataatgggccgagatgggcttcgtgatccgatggagctccaggccgcttccaaacacttcgtcttctcctcttctcttccttgtgctcagcttgtctggttgagtgcggatttgagtagactatgaagatgtgatcgagtgtccggtcgagtgatggtgttagtggtgagtgattatacccgaccagggggtcgagtaacttggtagagtgaacggccgagtgtggtcaggtggtgtggcgaagtgatactcgaccagggggtcgagtggcgtcatcgagtggcctgcgatgaggatactcgaccagggggtcgagtaggtgggaagaatggctccaaagtcactcgaccagggggtcgagtatggtgctggatgcacacgacctggtggtcgagtatgtcttctggttctggctcgtttcttccaatttgctcgcaaacagctccaaatcacctgaaaacaactcagaactgcaatatgtatgcaaagctatcctaatcatgcaaagtatgcaagaatgatgagaaatgatataaaacagtgatgaatgatgagaaatgatataaaacagtgatgaatgatacgaaactggactcaaaacgatgatgaatggacactaaaaacatgcaaattatagacatatcaaggtactgccatatggggtaattagtcttactaaggagggaggttctgaatttactgtgaatgggcagagggtcaagcgttatatggcagattgccctattcctgaaggaactacagttgacctccaggaacccatcaatgcctaaaatagtaagaagtctagcttaagactttaaactagctcacttgggaggaaatcccatgcctatctctgtacatatttcattttgatatcttgatatgctttttagtgtttttggaattcaggaaataaatcaggatttgtagagctgtgaactctgtgatcaagaaatatctgcaatagaagcaattctactctatcaattggtcgagtaaaattgcgtcaccattttactctatcaattggtcgagtaaagcaactaaacagccaagcttggtgatcgagtggcccacttgtctccccatcattctattactcggtggacaaagcctttacccatcatgctcaatcactatttggtcaacacccttatcccaacaaagaaagcataggagaccatcctcctccactcattcaaatcgaaacctaaagataagatatcactctctctcactttcttctttgtgcgcacttcaatacgatctctctcattttttttctgcttcacaccatctcgaaaatttcagctttcagcttccttcaaagaaaaaaaaaatcacttgcccacccccctgtttcactcgatcaaatcgcaagtatttttatttgtttgagacttatctactaagctttagttttgatttctgagagtttagcttcaccatgagttcaaacagcaacgaatcctcaatggacgccgatttcaacgtggatgaggctgaatcttggtctactaggcctcagagggagatggaagtgtataggcggttcagtcaacatgccaccaaggtcctagctcgtgatagaagaagagcggaaattgcaagacgtaagagagctatggccgaagagagaagtctcgtcgatgaagaccttggtggggatgaagactatgtcccttaaataactccaagagccaataaatccttgatgaagaagacaaagctatcaccggatggatactatgagcttttggcagctcacgaattccatggcactcgatacccccactccgaaaccatgaatgagcttggcataacagaggatgtcgagtacctctttgaaaagagtggtcttttgggtctcatgaccaaccctcactcagcctacaaaacatagacgcttcagtttattgcttcgctagaagtagagttgtttcaggggctatctagccatgaagcaagggaagaagggcttgggtatatcacattcgcagtctatggaaaagactatgttttggctatcaaaaatcttgaggatatgtttggattccctagagggactgatgttaaacccaagttcaagaaagaggagcttttggatctttgggtaacaatagatgatgacgcccaattctcgtcctcaagggccaagagcaacgcaatccgaaacccctgcattcggtacttctagaaagcaacggctaacgtcctctacgcaagagagaagaccgaaccgattaacaatggcgagatagagctgctggatattgtcctaaaagatatcctagtctacaccaagaacaaagtacctataaagggtgacaccaatgatgcttcaccatcaatgcgtttattgaatcatctttgtggtttagcgaataagcagaagagaaccatttctataggaggagtgataacacctatactaatggcttgtggagtgccactttagtcgactccctttgcccctaaatggatcgacattcctcacctgagatgggctttgtttgttgagcatcagagtcatgaggggatgcatattctcaagtttcagcataggacggaaatggatgccaagcttctcttacccaaccaagagctaacaaccatcacagtgagaggtaacatcgatttcaacccgcctaatgaagaactcttcttcatggaaagagcacccccgacgagagaggcttcagacattgaagaaagggttgagagtgaagaatgagctgagaatgaagaaccagaggagatggattgggagaactacaatgctagtaggttccattttgaagaacacaaaccaccaccaagagtgagtaagagtctgactgttgcgcataagaacattggttcgatgagtgcttagaataagtttcaagacaggatgttggaaaaatgtggcaaggccataaccgcaatcaggctgtactaagttgttcatcttcaggcgccaccatggtgaaagaaaaccgccctgaagaagtggtttcaagaaggcagagagtttcaccttcaaggcaatctgcctatgagcgacgagaggtaagtcgccctcaagctcctgcaagacattcatctcatgagcaccgcgagcagaagagaaggagaaaaacaagaattgttcggccaaggagcaaggaccttcttatgtccagtagaagatcactcgaccaagatacttgacgtgatatcgagcagagtgtcgagcaggatccatcgattcagaacgagcagagtgtcgagcaggatccgtgggttcagaacgagcagagcatcgggcaaaatcagtgggatcaagatgggcagtactcgggaatgaattgggatgcttaccatggcatcaacgagcaggaacccacctctaacaactgaggtaacaccacctcaaccattgtatataccatagcatctttttatttttctttgtgtgttttgtgctttggtcttgaattctctttcagatttttattacacaggggactgtgtaatttaagtttgggggagggttcaacacatgtttaacattgtgttctcttttcttatttcaaatttgcatcatccaaggcatagaaaaaaccataaaaatttgaaaaattttcagaaaattatttcacaaaaaaagagtgtcatgtagattgcatatcattttaggattgtatatagagtgtttgcatttaggattgctcatttgcataggggataatgatgatttcaaaccgataagcatgttttaattcaatgaagtaagttcaatgccaaggttgttagttctctgttgcataaccgattgtatctttgaagtaagaacgcaccctgctttgaatttgtaacttgactatactactttgatcgaaactcgcttatctgatgccattccctatctattagaacctgaactgaatttgcaattatcatgtctatgcattgtttgtgaactcatggctaccatatacatacttggatcatcttattcgtttcatcaccttctgttaatccaagtagttgtctcccatttttagagtagtttcccatacccttagcctagccttatttcaagtcaaagatcatttgtgtgtgattgtgaggtctttttcgattgagcttggtataatgtgttaggtatgagccgacaagagcagtctttcatgtagacctagcccacgctttttgggttagctaggactaggtggagacttgtatttgggattgggaatgtgtatggaatgaatggaaatgtgtatggaatgaatgggaatgagagtgagaatgaaaagaaaaaaaaaaaaaagagagtaagagtttagagttctaagggggatacaaaagtgttaagtctagtaaagggtttggaattcaaagaagttaggcattgtaattcaaataaaagggtaaaacgccctatgtgctaagatcagaagaaaagccttaagtttgtcaaagtataaaaccaaatccgctagactcttaaatcgtttcaaagagaaccccttagaactttaaccaaaaagagagtaagaatgagaaaaatggtagagttaggacatctatgggactgagatcatcttctgagctatcatactatatcattaggtagatgggagtctgttcttgtaggtgtccattggcttatacctttagcattctattgaagctcaatcttttctctgagagtcccctgttactcgaccaaaccattaaagggaccatttttgtctcttagcctaagcccgaaaccaagtgagttcataaccattgcattgcttgatgcactgttcgtgcttaatgaatgttaaagggaattggttgatgtgaatgcttgaatagattaaggcaagttgttaggttgcattctgacgagtatggctaacgtttttaagtaagggtctatcatcttgcaacctagaattagctacctggacattgagcttacccgttttatatgcatgcttcggtttttgattcgccaccttcaaacctctccttcaacttaagattttttgtttgcttgagggcaagcaagagataagtttgggggagttgataacactgtattttactcattttaggtgtatgtttatcatcatttagctttgcatttgctcattgtatcatgacattttgcaccattttagcttaatttgcatacttaggcatctgggatcatcttacattcgcattgcatgttttggtgtgttttcaggtgcaaaaggagctaaaaaggactctactcgatccattcactcgatccaggcagctacagaagaggcatcattctactcgacctctttactcgatctaggatgctacaaaggaggttgcagtttactcgatcctcctactcgatcaaggcaacctcagatgaagcaacaaattgatctactcgcccctcctactcgatccactactcgatccatttactcgaccaaggatgaccaactctacaagacttgttgagctatcaaagcgtcttcggatcctcctcattccccactcaaccagacatctgagcgtacggataggagaggatgaagcatctactcgaccaattgatcactcgcagcataaacacaaaggcgcagactttgcagcaccctctttactcgatccccaagattgagtattcgcccaaaccgcctcaagtctcttgtcttctagtgaatctagggtttccaacattttagtataaatagatcactttgggatttgtccaaaggatctatgctttatctttcagtttttctttgtgtttatgaatcttgaaaccttaattactcttaatctatttcatttttgcatttgattgtttaaagtaaagttctttagcttgtttagatctacattttggtatgattttagtaatttctgggtttgtgttcttgagaatgttgcttgagtagtgattagggttcttgagaatggataagattagggtaatctctaggttagttagatggttagtgtttaggtttatgcccttctggattcgcttggcccctatgcggttttcgctggctaatgtgaagattcgatcttagacgtccagcgtccaaaagacgttcaaatggatgtctgacctacgaattctagagatttgtagactcgaccaagagattggcttgtctgcctactggctttggtagattgtttcttaaaccctgctctgctatgtttcatcaacgagagttgagattagaaagtggtagagttatgggggtctctgtcacgagagtggattgacccggtttttgaatctatcgtcatgggtatctatctacctttcgcctattagccatttgatgaatccaagagttgcccttatcaatgaatccatccttagaacttctattagatttatttgtattccctgttgattgcacttttatttacctgttatttgtatcccctatttgtatcccctgttgattgcattttagttcttaattttgtcacatgttggttctacttgacccaatgatcgagtagggctcttaagttctcatttttacttgttcgaattctgacctaggattgttactagaaacccaccatcattataatctggcttgacttagtcgtctctgtacacatcttgattgctagcaatacagtggactggattgacaccccctataactgcatcgacatgtttgtgttttaggggaattgaactgaatcacacacattcagtataagtaggcataaaaacctgcatatcatgtaacttgacttgttaaaatcaacgcattgaaatttattaattattataataacatagattaaactaaaatttaaaaagtcacaaatgtcgaaagaatagaatgccaaatggcttctaagagcttgttttggagaaaccttataagattatgtatcttaattaattaatttactttcataactttcaattattaaaattaggatgccagaaaaaaaatatattaataataattagaactagttttttctttatttaataatttatttttattaaaactattaataaaatctaggaaaaaatccgttttaaaacaaaattatcaaactaaatgtaaatataaatctaaatctaagaaaatttatgtgatataaccctatttttatagttcttaattttgttttagatataggtttttgagtcttttttttttctagagtcttcttagagtcttttcatgtattctatggacagggacaacaatggaaatggagacatttgggagtaaaatctaaagaaaagaagctaaatgacgaattcactttcagatccagtcgagagtgtcgatcggcacactcttggtgttgattgacaccagttgcggccctgagaactccataacgcttttaggtttgaagaattggatttgccccagaggacttccctattttcattattagtctctgtacgttttttaggtcatatatatagtttaaaagtcattgtttagacctaagaagttcttttctagacatcaagcttattatcaatcttccagagcacttttcataagctattcatcccagtttttagattttcatcagagatttaaataacagtgaatagatcttttctaactcttttctctattgatttgtttttgctttcttattcatacatgttgtttatctcatccatcatatcaaagtagcctgcttggtagggttagggtttctcactagagattcatatgatttagtagatcgcccccttgctaggttatctgtaggattcttcatcttttgttgttcttaatgctagttcaagagtaattaactagaacttgttccagataatagatataccagccatagttatctgttactagaactgctatttgatgagcatggtttataggtgtgtaataagaatcggtttatctactaaggtgaacttatcgacttgtttagcatgcatgtttaggtataggatttcacggcacatcactgggaatcttagctctaggcatagtgattttcacggaacatcacctgttattctgatctatcgcgaagacaaccgctggcgagtggggactattctgcgaatagggccaaaatcgtttcagaacggtgaaattacttccatttctgactaaatttagtggtcgaatgggcttttcaaatgattgctttgttctttttgctgcaatagcttcattccttcacataccattcttgtgtggagtaattttcttccagctccctctttcgagtactctttcaagctttagcctcttttgtgactgtatcgttgttagtacacccaactcctatatttatttttatttctgtaattatttataaaattatgatttaccgagactcaaaaaggatatcttagatttggtttatttgttggaaggtttgttttagattttgtcattgtgatttgctgttgtttactttttcacgaaaatggggtcagagggaaacatgaagaactcggctgtgatacaagtaagcattagtggatttggggagtcaaatactacaaaaaaaacttatagattaccttgaaaacgaagtaggactcatttggcaatgcttattaaaaacttcttggattcctttgggtattgtcctaattttgagatcacaaacactttaaacatctccaaatttgattgttacaagatagtggagccacatgcatttgtccatttcttgatccacgaatcagcaagtgaatgaagcaggtaaataaacagagaaatcaattggatgagaaattcctaaggatggggtaatcgaatagtgtagtctccctaatcaattcagttggttatcaaatctgaatgaatctatccctagacaacaggttcaacaacagattaattcactcatgtgatagaaatcatcaagtagagctagacacatacctaattcccattagcgatctctaagtaagcaggcattaagaactgactgttaaagccaataactgctttaaacggccaatcccttgggatagagaccattaccaatagaactagtagatccaacgttccattaaacgccttctgagcgttggaacgtttaagatcggatcctagttgatcagaaagtaataagcagtaaacacaactaatcgagaagggattcaatacatttacacatgatatgtctataatttgcatgatttaggcattcattcttcatcactttgtcattgtttcatccacattccatctcattaggagtcgttttagtgtgttttacatacttaggacgattttgcattaggattgcatgtgcatggcatatttggttattttcaggtactttggatgcttttggagttcaaacagaggaaaaacagaacatgaagtcagaatgcccaatgacgtcttccgcaaaagtactctatcgcagcctcggatccctgccagggcaaattactctatcgcaaccccggagaagcaagcagctcagtttcactcaatcgcgaagccggaggaatcaccccaccggaaccactcgatcaccaggaagcctatctgctcattctgcactcaacgagacaaggtgagaacaaagaagagaagagaagccaaagaaaccactcgatcaccatctcatgacatccactcgatcgcactcgatcacagggtcgctggaccattcaatctcgacttcactgcatctcactcgatcgcaagacggagcccctgaagcccagtttgatcaatgacatactcgatcactaggatgctcatttcagcccgtcagatgccaatgacatattcggtcgcaggatcatgacgtgaagattcgttatatatttagtttccttatttgtttcatttctcgcttatataaactgtctcttagggttttccctagggcatccgctattatccgttattatctcgcttttacattttcgcaactttgatagccgcagtgtttctcctgcgactttgtattttccctttcaagtatttgatattcagttttcgtttaagtctttcgtcatttctgttatcatgttttcaattgttgctttgctattgtctttgattatgtttgagtagtgaactgtatttctgaggatgggatagaatagttgtggtttacttggtcgttttaggtggttgagtttagaatactagaatcccttctggattagttgcgcttacttcttgtttcactggctaatgtggaatatgagtccagacgtccagcgctcagaaggcgtttaatgggcgttggatcctattaattccacagatatctgactctaccccaagggattggctgtagagtgggtattgactttaacatgttgattcgataatgcctgcttagttagagatcgctaaagggatttaggtcagtgtctagctttgcttgaggatttccatcacgggagtgaattaatctgttgttgaacttgttgtctagggatagcttctgtgaagttttgtcaaccgcctgaatagattaagtagaccacactattcgattacccccatccttaggaatcgtttatccatttgattgcctgttatcatttctgctttgtcattcacttgcctgccattgccatttctgcttttagtttcatttcatttttgttattgcatactaggactgttagaaccaaccaactttctgcttggcttgactaagagctttctgatcatatctcatctgtttgcatcacaccggattggattaacatcctaaaatactacaacgacaagatagtgttttagggattaattgataaaaatcctactatcaatttggcgccgttgctagtttggtgtttgtttgctatatttgagatcattagaaacgttaagataaagttcgtttttgttacacaagttactaacattgtgccttttctgtctttgtgtttcaggtaccttgcaacctgctttacagacgcatctctgattcgtctgttatagcctagctgctatctgttgcatgcatacacggtcacaaggaaatcagaacctcctattcaacgataacatcgatcgtattgctcgccaactgagagaacagacagaaaccgatacaatagctgacgttgttgatgagcaagagcaacctaccaacattggtgctggtgacttccctcacaaccacaaccagcgtcatggaattgttctacgtccagtacagaacaataactttaagatcaaaagcggtctcattgcaatggttcaggggaacaagtttcatggcctgccaatggaggatccgctagatcatcttgacgagctcgagaggctctgtggccttactaaaatcaatggagtaagtgaagatggtttcaagcttcgcttgtttccattttcacttggagataaagcccatctgtgggaaaagacgctacccaagaattcaatcacgacctgggatgactgcaaaatggccttcttggcaaaattcttctctaactccaggactgcaagactccggaatgagatatccggattcactttgaagcaaaatgaaagcttctgtgaagcttgggagcgctttaagggttatcaaaccaaatgccctcatcacggattttcccaagcttctcttctcaacacactttacagaggcgtcctgcctaagatacgtatgctccttgacaccgcttcaaatgggaattttctgaagaaggatattgaagaaggatgggagctagttgaaaacttagctcaatcgggtggcaattacaatgaagactatggcagaagcatctacaccagttctaacactgatgacaagcaccacagagagatgaaagctctcaatgacaaactagacaaaatcatccaaatgcaacagaaacatgttcacttcatctctgaagatgaaccattccaagtacaagagggggagaacgatcagtgtgctgaaatcagatatgttcataatcaaggtggctacaacaaggggtacaataactacagacccaacccaaatctgtcatacagaagcaccaatgtcgcgaaccctcaggaccaagtctaccctcagcagcagcagcagcagaaccaaccaaaccgtttgttccttacaaccaaagcctagggtttgttccaaagcagcagtttcaaggaggatatcaacaacagcaaccaccacctggtttcacaccacatcaacaacaagcacatgcgcctcagaattcagacataatgactgtgctccagcagctcattcaaggacaagccacaggagcaatggaaatcgctaagaagctgtctaaagtaaacaacaaagtcgaccgacaaggcgtcgaacttaacagcaagttcgaatcaatgagcactaggatgagatatgtggaaggcatcctcgcttcaccatcggttaacaacaacccatgccagcttccagggaaagcaatccagaatccaaagcagtattcaaccgcccatgccatcaccatcacacatgatcgagagctgccaactcgatatgtccctacatcaaacactgaggacagtgtaattctagagggggaggatttttatcaagatgatgttttggctgacaacccaatcgaagagcccatactcaccagtcaacccactcgaccacaagctcccccagctactccctttgccaaaaaaacggaagctgcaaagaccaaagacatagactttgtgccaccgccttacaaacctctgcttccattccctggtcgtttcaagaaagttctggttgcaaaatacagagcccttcttgaaaaacacataaaggatatccctttagtggactgtctcgcgctaatacatgacgagcacaagtacgtgaaagacctgattacagaaaggatccaggatattttactctaccatgctccattaggcaattgactttcaataattgtctatgtgatctaggagcctcagtcagcttaatgccactctctgttgtaaagaagcttggattcgttcattacaagccttgtgatctaaccttgattcttgctgataggacttcaaagacaccttttggccttttagaggatgtgccagtaatgattaatggagtagaggtgcctactgattttgttgtgcttgagatggatggagaatctaaggatcctcttatcttaggaagacctttcttggcttcagttggagcagtaatagatgtaaagcaaggaaaaattaatcttaatctgggagaggatgtcaaaatgaagtttgacatcagggacgctatgaagaagccaacaatagaaggacaaaccttcttagttgaggaaatggatcagctaggtaatgaactgctagaggagattgtggacagagatcaccttcaaactactttaactgaaagtagtgaagctggatttctctccagtgagaccttgagctatgagatgtcattagactcacacaacgaagtaccaggattagagatctttataggtgtcattgcgtcagaaacagaggatgttacattgaacgaggaaggctcaactgatactcgactagaatgctcaaccaaacagctagagtcaagcgtgagggcatcaaatgattggttagaactcaaggagaggtcaaaatggcacgatagaactataagagagctaacacacactgtgaaagagctgaaggatcaagttaaagagctccatgggaaagccaaccaagctccactcgacatcaaggacgtcccaaatgatgaagttattcctatggttagaaaagaaggatgtgaattcacatcaaaacagtctagaaaagacgactatacagatgatgaaaaaggagcttaccaagaaagggtcattgagtactcaattacagacttgtcacgagagcatgctgaatttgatgttgtatctacccaggaaggagaggagacgtcaattctactctatcatcctccttgagcctaatgagtgtgaggactcaagctagacacttaaaacaagctcacttgggaggaagtcccatgcctatccttgtatatagttttttatttttgttactttagatttgttttggttttgtttttgattctcaggaaatgaataacagttggagcaacaacagggatgcaaacgagtgttcaaataaaaaattttaaatttttgatgaatcactctatcgcaagacgagagtaaaagctcgagagtgcgatctagtggttttgggacaacatctttctcaacgaaaatgtcataccactcgatcgcaacatggcaatggtgtgatcaagtggtctcctagtggaattgcccaaaccactcaatcgcaaggagaagtgaaaacgcccgacatgacttcaatgacaacccgcctgaagacatgtcatccagccaccatgacattgctccgccaaggaaattcacgtataaacatagggaccacaccgttccgcaagttccccgtctcatgagccaatggaaaacaagaggaggaagagtgctagaactgtacattcatcaagcaaaggctggataatgtcgggtcggagaacacgtgagtgtcgtgctgaacaacctgttggggttgcgatcgagcacaatgacgagaagatggtggagccacaccaagaaccggtcatgcctgctgagtacactcaagcagatatggatgcctacatctccaggacattctactaaggtaacacaccaaaaccctttgtcaataccgcttttgtttttgtttatgtgtttatcttgaattctttcacaaattttgattacacaagggactgtgtaatttaagtttgggggagggttcaagacatatttgacttgtttttgtgaatatcatttgagtctgcatatcatctaagtcatagaaaaaaaaacaaaaagaattgaaattttttgaaaatgaattccacaaaaatagagtgatcatttagttgcattacatttagaatcgagtctagagtgtttcatataggattgttgcatatgcataggggataatgaggaaatagccttgtaagcatgatgattcactaaaatgagttattagttctttgaggtatttgaatgactttgaagtaaaaccgcaccatgttctatagaaatcactcgatgcatgtcatgacagaaaccgcaccatatttgaatacatatttggattttctttcacttattcaccactcttgctaatccaagtagctgcttctattattggagtagttcccccacccttaaccaacccttctttcaagccatgttattttgtgcgagcatgtgaggcctattttctggattgagcttggtagaacgtgttaggtttgagccgacaagagtagtatctcatgtagttctaatccgcgttttcggacttggtaggactaggtgggaacttatttggggattgagattgagtgtgaaaagaaaaagaaataaaaaaaaatgggttagagtctttaggagaaggaagctgaaaatcatattgtggtctagtgaatgtttgggaagcatagaattgttaagatatgctctaaacaaaaatagatggcaacaaaaacagaaaaaaaataaaaatgataagagccataagagtttaagaaaaacccaattcactagactagactcagagagtttaagaaaagcttctccttaagaacaagagccaaagaaaagaaaaggaaacattgatccaagaaaaaatcgaaatatgcctttagtgcaaaagggtagacttaggatcatcattgggtttagagataggaccatctacttgttattcacggtttatgtcattgggtagatggggtgctattcttgtatgcataggttggaacttacctttagcattcttctaaagctcagtcctttttcattgagagtcccctgctattaaaatctgaaccactaaaaagggaccatctttgtctcataacctgtcattagccaaatgagttcactagcgatgcatatcttgattcatgtttttgaacttaatgaatgttaaagggattggttgatcttgacgcattgtgcatttgagtgtaggtttggatcataacagagcatggctaaagtttttaagtagaagtcgatcacctcacatcttagaactgttagctggtacattgatcttaattgtcatatctcatgctttagttctgaatccccaacttcaaacctctccttccgcttatgtcttcttgtttgcttgagggcaagcaaagaataagtttgggagagttgatatgtctataatttgcatgatttaggcattcattcttcaccactttgtcattgtttcatccatatttcatctcattaggagtcgttttagtgtgttttacatacttaggacgattttgcattaggattgcatgtgcatggcatagttggttgttttcaggtactttggatacttttggagttcaaacagaggaaaaacagaacatgaagtcagaatgcccaatgacgccttcagcaaaagtactctatcgcagcctcggagccctgccagggcaaatcactctatcgcaaccccagagaagcaagcagctcagtttcactcaatcgcgaagccggaggaatcaccccatcggaaccactcgatcaccactcgatcaccaggaagcctatctgctcattctgcactcaaccagacaagctgagaacaaagaagagatgagaagccgaagaaaccactcgatcaccatctcatgacatccactcgattgcactcgatcacagggtcgctggaccattcaatctcgagttcactgcatctcactcgatcgcaagacggagcccctgaagcccagtttgatcaatgacatactcgatcactaggaagctcatttcagcccgtcagatgccaatgacatattcggtcgcaggatcatgacgtgaagattcgctatataattagtttccttatttgtttcatttctcgcttatataaactgtctcttagggttttccctagggcatccgctattatccgttattatctcgcttttacattttcgcaaccttgataggcgcagtgtttctcctgcgactttgtattttccctttcaagtatttgatattcagttttcgtttaagtctttcgtcatttctgctatcatgttttcaattgttgctttgctattgtctttgattatgtttgagtagtgaactgtatttctgaggatgggatagaatagttgtggtttacttggtcgttttaggtggttgagtttagaatactagaatcccttctggattagttgcgcttactgcttgtttcactggctaatgtggaatatgagtccagacgtccagcgctcagaaggcgtttaatgggcgttggatcctattaattccagagatatctgactctaccccaagggattggctgtagagagggtattgactttaacatgttgattcgataatgcctgcttagttagagatcgctaaagggatttaggtcagtgtctagctttgcatgaggatttctatcacgggagtgaattaatctgttgttgaacttgttgtctagggatagcttctgtgaagttttgtcaaccgcctgaatagattaagtagaccacactattcgattaccctcatccttaggaatcatttatccatttgattgcctgttatcatttctgctttgtcattcacttgcctactattgccatttctgcttttagtttcatttcatttttgttattgcatactaggactgttagaaccaacctactttctgcttgacttgacttagagctttctgatcatatctcatctgtttgcatcacaccggattggattgacatcctaaaatactacaacgacaagatagtgttttagggattaattgacaaaaatcctactatcaacacataaccaacagatttgaccacgggttctacaaccattggcggatctatgtggagaggtagtggggcacgtgccctatatagactttataaatttgtttaatggctgaagttaaaactgtgtatccctgtaaaaacttaaaccaaaatatagagcacaaaaatcgaaatacaaaattgcaggaatgaaaaggggctgctgaataagttgtagaaatctctgtaaaaaaagtctgtccaagtctgtctcagggtaagaaagcgggcttcgaggccacttaacggcccatggacgatgtgatcaagagtgtcgacttaaagtaggcttctttatgggcttcaaagtgggcttcgaatgggcttcgaatgggcctttctcttctcttctctttcctttcctggggttgtctggttgagtgcggattgatcagaaggtcgaggtggtagtcgagtaggttggttaacagaatggtctcggctgtttgttggcctctatgatcgagtatgttggtgagcattcaagatgggctggttcttctcctttgcgatcgagtatactggtggactggcaaagtggactgcctgtcgcctctacaatcgagtataattgtcaggatggactccttcatctttgtgatcgagtatgtctggtagaatggactgcttggtctcctctgcaatcgagtaggagtgtctgaatgtactgctgagctgactgcttccctctctgttactggtgatcgagtatgttggtggaaatatgactttctgctctgaactgaaacaactctagaatgcagaatgtatgtaagactagtcctagactcgactaaagatgcaaaatgtacaaaaacgatgttgaatagggtagaagaaactttgcccctttggcttttaggtgatcaaacttccaggcgtacctttcatcaatcatctcccaatccaatgagaatgtctacctaaagtgtttgatgtcgatccacttaggagggatttcctccaactctagaggcactccacaaagccagtaatatgggtgttatcagcccacccatacacaacgttccttcgacgctcttcttggtgttagtgaccgcccatgctgatattaggtttttagtcaattatcctaaaacaccaatcatgtcgttgtagtattttaggtgtcaatccaattatgtgtgatgcaaaaagatgagatgtgatcagaagtcactaagtcaagccaagcaataacggttttgaggtttctaacagccgtaagcgaacatgcagaaaaaacaaatagtatcagaattactaaaatcactcgaccacaactagctgatgctagaggcacgatgtggtcgagtaacaggcaggaaatgagacaattgtactcgaatgcagagtctgttgcccgacactgggtgtggtcgagtaagttggtccaattattgcaaaaactaaaaatcaggcaatgagaacgattaagcgataacaataaaacagagaaatcagatagacgagaaattcctaaggatggggtaatcgaatagagtggtatcctagcctattcgaaaggttaacaagcgcaatcaagctatccctagacaacaggttaaacaacagatcaattcactcccgtgatagaaatcctcaagcaaagctagcccagactaattcccattaacggaatctaactatgcaggcaattagaacagactaaggattccacaaccattctatcccatccttaagaactctatgtcactactcagacaacatgctcaaagacataaacgcatgtaaacaagtatattgcataagtaaagagataaagagtagagaaacaagatgacaggtaaaatcaaatacggaatctgaataacttggaaaaatctcgaattacaggttacagaagcaaaagcagcgcagccagagtaagatagaaaataaaactgaagcaaaaactcaatgtcgactagatgtcccaggacaaaaccctcagacacctatttataaaaaaacgaaatgaaatgatagtagacgggccagtaacctaatcgcctgccccatagagtgataatgggctgagatgggctttgtgatccgatggagttccaggccgcttccaaacatttcgtcttctcctcttctcttccttgtgctcagcttgtctggttgagtgcggatttgagtagactatgaagatgtgatcgagtgtccggtcgagtgatggtgttggtggtgagtgattatactcgaccagggggtcgagtaacttggtagagtgaacggccgagtgtggtcaggtggtgtggcgaagtgatactcgaccagggggtcgagtggcgtcatcgagtggcctgcgatgaggatactcgaccagggggtcgagtaggtgggaagaatggctccaaagtctagtttagacctaactctcattatctcttttatttttgggagcaaaatcctgtggagactccctttagagaagattcttctaaactcttttctctttttaatttcattattgatttcttattcaatcatgttttattcttctatgatcatgcttgagtagttctcttgttgggtttagggattctcattagggatttggatgaattagtagatcaaaacccccgttaggataatatatttagaattctttatctttgattattcttaatgctagttctagttagttctagagtaaatagctagaacttgattttaggttattaggtatgcccaccataggtatctaatactggaactattttagatgagcctagtatttagatgcgtgctaggttccattacttaggtgaacttatcaaacctgattataatgcttgcttagttctagggatttacaagagagttgggatgaatactattaagcatagtgagtagcacggcacaccaccggttacttttgtaagcattgtctgatgcgtagtcaatgaaattgaagtaaaagtgcaccatgcctagattgttctactagaatgttctactcgaccacagtgagtttatctggtgaaccaaaatgcttacaaggctatctcatcattatcccctatgcatatgcaacaatcctaaatgaaacactctaaactcgatcctaaatgtaatgcaactacatgaacactctatttttgtgaaatcattttatgaaatttttcattttttttggttttttctatgcctttgatgaatgcagactcaagattatatacaatgcaatacacacttcctgagcccttccccaaacttaaatcacacagtccactgtgtgaccaaacttggaagagagtactcaggacaaaacacatcgcagaaacaaaatagaaacaggagattgtataatacaatggtgaagtgatgtgcttacatcagtagaaaaaggagcggagttggtcgtcaatagctgccagtaattgctcccaggccattgaagaatctccttgttgtgtctcagctccgccatgggggtactcgacctctgctccttcgtcgtggccagcaccgctctgatgatactcgacctctcttcttcttctgcggccagcatcgtggtcgcgtaagcttcaagactggagaagtcgtgtactcttgctgctagaccgagccagtgcagcctttttctttctcccgaactcccaaggctcgaatgatgaatgcctcgcagggacttgtgagactacttggtcactaggctcaggcctgtggtgacttggcttggctttggcgcgtcatatctcctcaagggcatgtcttgaggaggttgtccctgcggaatagctgtggtggaagaggagcagcttagcttgtctgtcagaaacttgatggccttgaagcccttgatgagtaggctatcttgtttcttgcaccacttctgcaacttgctgttgtttctctgagcttcactcaagctcttgctctcccacgctggaggtacatgctcactgaaatgatacatgcttgtatcatactcctcctccctatcctcatctttctcagcaatctcatcccctgtaggttctgttgtagggacgttgtcatcagtcggtggagcgctctcaaagtagagacaatcacgctcaggcttgaagtcaatgttttcgccatggagtatggttgtggcttcagtgcagggaagcagaatgttggctgttcgggtcaaggagtgctcgaatttgtagtgatagaaatcgtcgaccatgtcgtgctccagaaactcacaacgacgcaagtgatctaagtccatcatcctcggatcgaaccctagggacgtgagaggtacaccacaggctatcagaattggtgtcacaacaccacctacacaaagggctcctcgcgccctcttcttctcgttggtgtgtgcccacttcctgtatccacacaggtggatcaacagaagcataaccggtggtgcatcattgaggtcgcccttcaggaccttcttcccatttgttctgcggagaatgcccttgagtgcagaatctatcatctccatgtctgtgttagacactgtgcttgtagattccctggagtacagaacattcgctacagagcgttgatagtagcggatcacagggcttcaaatttggttgctcttggacctcgcagagttgagggccatatcgttcccaatagttaaccacaaatccttcaactcttccatctcgaatttgggtttagttccttttccactagggaaaccaaacagtccttccaggctcctgatagataacttgtagcgctgctcgctcagtgaaaaagtctagaaccccaacccttcactctccaactcatctgctgtaagtccctgatacatctccacttgtagagtggagagaaactctattgtttccttcttgtaggcgacgtactggtaagacattagtgtctccagatgacacttttcaaataagtgttgtacgtcctccagtagccccagctgggctaaagtctgataacatggatacctcgttctccagaagtcattcagctcgaaaagtctgatgtactcctcaactgtaacttcatcatgcctgttcaacagcttcgtctctctgtgccatgacacaggctcatactcgacgtcaatatcttcatcaatcaattcatatctacttgtcattgctctctttcctctagcaatctcagctctcctctcattgggtcgagctactgagcgttgggtatcaactctgaagctctcataagcatgttgctctttctcaggtctagttgaccaagactcagcttcatcaacgttgtaatccgcatccatagaggattcgccactgtagttactcatgatacttcctgaaaacagatgcaactcaaagctaaatatcaataagttagttccaataaacccaaacactaaaccagccgagtaaaccggtcgagtatacccgtcgagtaccggtcgtgtgaaattgtggcttcgggctttcgtttctaggcggattgtggtcgagtgtttccggtctatccgacgaggttgagtagtcttcactagaaaacagcggcggtttgtaggcggcagcaaaggagcggtcgagttgttgagaggtcgaagctagagactcggtcgagtggttgagaaggagggaagggattttcttatccttagaaacgcatgggggaacaaaatggagaggtggtgggccacgctctgtctgtttgtcctgaagcgttgttcccttttgactagaaccttctgtaatcctttgtaaacttgataaactcactgtaagtctctgtagcttctgttggtcgagtataaatatgatttcaaaattttgggttttaaaatcatcactaatactcgaccaacctactcgatctcatggtctctgagtgcaacagaactttttcaaattcttgaatttctctacactgacatactcgatcccctgttgctctatagagtaaattttttgaatttttactctacctccacgctgtttctctgttcctgagaatcacaaacataaccataaacaaatcaaaaaaataacaagaaaataaaagttttatttataagaacagtcttgggaattcctcccaagtgagcttgtttaaagtctctagctttactcctcacactcattaaaaagaaaatgggtgatagaggatctgcatagtcctctttgatctcatcatcatattcagcatcctctcttgagagatgtgtaacagaatactcaattcttcttttctcgaaataggcctctttctcttctagtgtataatctatctcctcagaccatcttgaagtaaacttttttctagggatagtttcaatcccgcattttggttgagctttctctcgcatctgatgcagtttagtcttaagttcctcaactgtctgagctagcttctctatggtttcttcttgctcatcagatttctttttgagttctcgcaagtcaggtgtaaaggttgtgctttgtcgggtgattgaattcgaaggctgaggttgagccctgatattttcttctacagttgtcctttgcgaagtttcgttgatgtcaaactacagcttgatgtacttcccaaggttgagacttattctcccgtctttgacatctatcatcgctcccactgaggctaagaaaggtctccctaggattagaggatccttaggttctacttccatcccaagcacaacaaaatccgtaggcacttccactccattaatcattaatggcagatgttttagcaggccgaagggttttcttgaagacctatcagcaaggatcaaactcaggtcgcaaggcctatactgagtgaattccagcttccttgccacggagagtggcattaagcttactgaagctcccaaatcacatagacaattgctgaaaaccaattgcccaatggaacatggtagagtgaaagatccaggatcttctagtttttcttgaacgctcctcttaacagttactctagacggattagcatcacattcatcttctgaatcttgatacatcttgatcctttccagaattgaatttctcacatctttgtgaggatccgggataaggttgagaacttttattagaagcatcaccgcttccatctcatcaagctgtttctctgcaagagaattgtatctttctatccatgctttcctgaatttccatggaagagcacgtgaaggtaatggtgctggcttgaatcgttttaccatcctatcaatgatggctgctttctcgtctaagttagagtgaatttgaaaacaggattcagctgaatggtcgagtccaacaactgaaatttcaatctgagtacaagcctccccttcctgaacatcactgtccacaatgattgcgttggagacatgtcgagttggcagctctcgatcatggcagatagtgattgcgtgagcggtggtgaattccttcggggtttggattgacttccctggaagtcatgttacttttggagcagaggttgaccttgtttgtccctccctgtatcggaacttcgaggtaagtgcctcaagtttaatgttgagatcgttgaaagtgcaatcaaccttgttgtggatttctaccatttttttggcgagatccattgctcctgttgcttatccctggagaatctgctgtaacatgttcttcaagtctgaatctggaggttgtgaaggttgttggttttgttgttgcgtgaacccaggtggtggaagttgctgtggatagttgccttgatactgctgcttaggaacatacccctgaccctgattgtatggaacgaagggtttgggttgattctgctgttgtgaagtgtagacttggtcctgcgggtttgcaacattagtacttcggtaagacagattgggatggttctacttgaagttgttgaaacctttgttgtaacctccatggttttgcacatagttgactttttctgactgcagagtctccccatcctggacttggaacgtctcatcatcacccaaaaaatgaacgtgcttctgttgcacaaggagtagcttgtccagtttgtcattcatactttcatttccctgcagtgcttctcatcagaatcagagctggtgcggatgcttctttcataatcctcattgtagttgccatccgactgagccaagttctctaccagctcccatccttcttcaacgtgtttgttgaggaagttcccgttagaagtggtatcaagaagcatccttatcttgggaaggatacctctgtagagagtgctgagaagtgaagctttggagaaaccatgatgaggacagtgcgtctgataacttttaaagcgctcccatgcttcttagaaagtctcattatttgtctgtgtgaaaccggaaatatcattccgtagtctcgcaaccctggagtttgagaaaaactttgccaagaaggctttgttgtagtcattcgaggaggtgatagagccttgaggaagcgacttttcccactgatgcgctttctctccaaaagacatcctcactaactccattgatctttgttaggctgcagagcctatcaaactcgtccaggtaatcgagtggatcctccatagggaggccgtgaaacttgttgctctgaaccatggcaataagaccgctctggatctcaaagttgttgttctgcactggtggaggcacgatgccattacgctgattctggttgcgtggtgcatcgcgtgcaacgatgttgtttggttgcacttgctcatctacaactgcatccattgtgtctgtttctgtctgtgttctgagttggcgagcaatacggtcgatgttatcgttgaataggagattttggtttccttgtgaccgtgtttgcatacaacgagtaccaactggtgaagctggtgattcgcagtacctaaatcaaaacaaacaaacagaaaaaaacacaaagttagtaattttcagtaaaatgaaaaagaacttgatcttaaatattctgaaatctcaaatatagcaaacaaacacccaattggcaacgacgccaaattgataatagatttttaatcaattatcctaaaacaccaatcatgtcgttgtagtattttaggtgtcaatccaatcagttgtgatgcaaacagatgagatgtgatcagaagtcactaagtcaaaccaagcaataacggttttgaggtttctaacagccctaagcgaacatgcagaaaacagaaatagtatcagaattactaaaatcactcgactacaactggccgatgccagaggcaggatgtggtcgagtaactggcagaaaatgagacaattgtactcgactgcacagtctgttgccagacactgggtgtggtcgaataagttggtctagtaattgcaaaaactaagaaacatgcaataagaacgattaagcgataacaataaaacagagaaatcagatagacgagaaattcctaaggatggggaaatcaaatagagtggtatcctagcctattcgaaaggttaacaagcgcaatcaagctatccctagacaacaggttcaacaaaagataaattcactcccgtgatagaaatcctcaaggaaagctagcccagactaattcccattaacggaatctaattatgcaggcaataagaacagactgataaagtcaataatcgctctaaacggccaatcccttgggatagagacgaatatctcaggaactagtagatcaagcattccatcgaacaccttctgggtacgggaatgctttggatcgaattctagttgatcagaaagaaataagcagtaaacacaactagtcctgaagggattcaatcaattctaaaacttaaccattctacagactaaggattccacaaccattctatcccatccttaagaactctatgtcactactcagacaacatgctcaaagacataaacgcatgtaaacaagtatattgcataagtaaagagataaagagtagagaaacaagatgacaggtaaaatcaaatgcggaatctgaataacttggaaaaatctcgaattacaggttgcagaagcaacagcggcgcaaccagagtaaaacagaaaataaaactgaagcaaaaactcaatgtcgactagatgtcccaggacaaaaccctctgacacctatttatagaaaacgaaataaaatgatagtagacgggccagtaacctaatcgcccggcccatagagtgataatgggccgagatgggcttcgtgatccggtggagctccaggccgcttccaaacacttcttcttctcctcttctcttccttgtgcttagcttgtctggttgagtgcggatttgagtagattatgaagatgtgatcgagtgcttggtcgagtgatggtgttggtggtgagtgatgatactcgaccagggggtcaagtatgtcttctggttctggctcgcttcttccaatttgctcgcaaacaggtcaaatcacctgaaaacaactcagaaatgcaatatgtatgcaaagctatcataatcatgcaaagtatgcaagaatgatgagaaatgatataaaatagtgatgaatgatataaactggactcaaaacgatgatgaatgaacactgaaaacatgcaaattatagacatatcacatgccttgtagctctagaggtggcacagcaagaagaaaacagcacaagagttagacttgtcacctaccaacacagtgttgttcttggtcacaccgaagggttccttcagcgccatgaccatcacttccatttcagcgtcgatgatggttccaacgatcttgcgctacaagaaaacacgagatcagtctgcatacttattgcatgttttggtgtgttttcaggtgtaaaagcagtttactcaacccactattctatcattaccagaagggaagcagcagagcagctactcgaccagtcactctatcaaagcagctatagaggaagcagtagacaatcactcgaccctctactcgatcctctactctacctctgacttgttgagcgatcaaagagcctttagatcctcctcattccccactcaaccagacagttgagcataagaagaggagaggaagaagcaactactcgaccaattaatcactcgaatcatagaggcaaaggcgcaatctttgtggcaccctatcactcaatccccaagggtcgagcattcatccaaactgcctcaagtctcttgtcttctagtgaatttagggttttcgggattttattataaataggtcactttggggtttgcccaaaggaccaagcttttatcctctagtttttctttgtgttttagaatctttgaaccttaattactcgtactctcaagttgtttatcttgtttagatctacattttgatatgtttagagtaatttctaggtttgtgttcttgattatgttgctagagtggtgattacggttattgagggtggattagattagggtaaattcgaggtttgtcaggtggttaaggttaggttagatcccttttggattagttgggcctaatccttatttctttctgatcaattagaattctctccaaggtattccagcatccaaaagatgaatggaatgcttgttctactaattccagagatttgtatattctagcccaagagattggatgtttagactgcttattgactttaatagattgttgcttaatgcctgctttgctatgtttcattaacgagagttgagattaggaagtggtaaagttatgaggtatttgcctttcgtctattagccaccttatagaccctagatatgcccatatcaatgaatccatccttaggacttctattcttcttagatttatttgcttatttgccttcacccttttattgcatttcattcacctcttatttactttcatccttttgagttacctgttagtacttgaatatgttgcatgcttggttctactcgaccctatgatcgagtagggcactttagttcacatttttatagtttgaaacttgatttcggattattactagaaacccaccttcattacacatctagcttgacttagttgcttatatacacatcttgactgcctagtgataacatcgtatttttgcccacttttactatgttttttttaggttttccatggagaaatcaagagttaaaggacactgatataacctgattttcactgcttttatctatgttttaggtataagattttgagtttttatgttatttctcgagtgtttttagtgtcttttcaggtattctatgcaatgggacaacaatggagataaggagacattttggagcaaaagctaagaaaaaggaagctaagtacgattttggttcaggaatcagcgaggagtgtcgattgacacactcttggtgtcgatcgacaccagtttcggccctgcaaaaaccgtagacgctttcaagtttatagaagatcaaatttgccctagaagacttccctatttgcattattagtctctggacgtttttagggtctatatatattgtttttagacctaagtttcttttatcaagtcttttatcaagttctttgcaaaccctattgtgagagacataagctattcatcgattgttttctcagagtttcattcaaatcgatatacagtgaagagatcccttctttccccttctccatttactgtgtttatgctttcacactcaaatatgttgtttgcttcatccaatatgtctgagtagtctgcttgttaggaataaagtttctcattagggattcatatggtttagtagattgccccctttgctaggttatctatagaattcttcatctttaattatgcttaatgctagatctagagtaattaactagatcttgaatccagacaatagatattccagccataggtatctatagttggatctattatttgatgagtctggtttataagtgtgtaataagaatcggtctatttactaagatgaacaattgaactcgttgagaatgcatattaaggttgatagtttctcggcttctccggttattattagctatagatatagggagtttcgcgtcacacccaccggttattccataattagagtttgagtttaagaatggtttgataacaacctagctttcattagatctactaaccaatagtttcctgagaataccctgttcctagctctttattaaatcgtttacaacacaatcaatctgctgtctttttactttgttctcttttattttcactgataccctgctagcttaatctcgacatttaactcattgtttgaacaaaagaactctgtgaatttgatcctaaaataccgtaattgatgtcttatttgagagagtagttctatgtaatttgaattatatcaaacttggcgccgttgccggaattcttgggaatcatcattgagttttgtttagagatttcgtctagtttttacttctattttgttactcatgcgtttcttgttttcttcttttctgtgtttcaggtgtatgcctaggcaaacaaggagcacaaaacagaacgagcttatcaacttgtttgttttggacttgggaaaacttgaacgcaccaaccgaaaaactcagaaattagcaatggctgacagagtcatcagagatgatgctgaaggagttttgagagatgaggatgggcaagcctacaatgaggctggtcagagattggatgatcatggactcatcctacctgaggacgccaatgaggatcaagcgcgcctcaatgcgcaattagctgttagagatgcagtagggctcggtgttgagcgacaccaactgggtgttgatcgacaccatcgggagtagaacgcggatgcaattggtgttgaacaacacaacagaggtgtcgttcgacaccaacaccagattcctgcagctattcctccatctgcagaaccacgtcgtactcttggggatttcaacaggctagacctgttctatgctaatcgatcagcgattgtacccccacaattccagagaaacgactatgagctaaagcctagctactttgctttagttggtcagcattctttccatggcttatctcatgagcagccaatggatcatattaagcgatttgaggaccttgttctgagcatcaaggctaatagtctcagaggactacctactgtgcaagctcttcccttattcacttggagaagcatcaagatagccttcttgaacaatttttacgatgatgctaagtctgaggagttgagaaacaagttgtctaccttcacacatggtccagttgaagctttcaaggctgcttgggttcgtttcaaggagtaccaacgagattgtccacatcatggtttcagtgaggtacaacttctaggtacctttttcagaggagttgattggagatactagatggctctagatgcagcgagcaatggtaacttcaatacacgttacccagctgatgctacagccctgatagagaaccttgcttgcagcaacagtaccaagaatgttgattttgagaggaagaagattactggagctatttcaggaaatcaaatggcagaggtgaatgctaagctcgattcggttcataacttactcatagggaagaatcatgtccactttgcagctgaggaagagactattgagcctgagcctgagtcagaggaagaagtcttctacatagatggtcagggatagaggaagtttgggcagccatagggcaacttcagtggcaacaggtttacaaggaactagggttcctccaactacactccaaagtctgctttccaggagacctcctttcctcaaagctgctttcagaggaactacggtaatcctttaagatgttcctgttaaggttggtaactctgttatcccttctgattttgtggtcctggactacgagaaggaacccaaagatccccttatccttggaaaagcattcctagctataactggtgcgaggtttgatgtgaagagagggagaatctctctcaaggtttgtgatttggagatggagtttggcatggatggttcagagcttactaaacctatcaattgcattgcttccagcacagacatacctcctcagacagatcataatcccaccacaaagccacacacaatgctccaacacgttcaactcaccaatgagagttgaagagcaccggtgtcgaccgacaccactacccctgtcaatcgacaccctcgggtttcacagacagatgattctacacactctctccagcccacaccacttgaggacctatgtgataagttctcttctatctcttctcctattttatctttgattacttctttggattaatcgaagactgcttcacaagataacaaacctagagttcctcgaaagcttgtttctcctgttgtttttgtaggtgacgagaagagtgtcgatcgacacacccctgagtgtcgatcgacaagagaagcggctccaaccagatccatttacgcaccgccttggaaggctaggaggcagcatcaatcctccaccaccactccacccacatcctgaactccgccaagtcaagctattgactcaaaacaagcgcttagtgggaggcaacccgttggttagatttttcttttccttttcttttcttttcttttatttttgattttattttcctgctttctctggatttgaatgccactggagacactatcgtttaagtctgggggaggttcgtactaatgatgcttttatttttgtttcttattttgcagttattttggttatttcttttattttctttcaaaaagaaaaaaaaaaaaaaaacgttttctttagtttagttaggaatcatgatctatatttctcttgtttattgcctgattgatgagtgttgtaggttcgagtcaatccgactaatggaaaatctagatggcaaaccaacaaacttgaggatatcctagtttctaactcaaccactaaggctagagctaatctcactgctcttccttttacctcttcaaacagttagtattcatagatcttgactccttgttcataccggatattaagaccaatgtgataaaaagaatatgttcctctcctcttataaaaagaaaaaaaaatatataatgagagattgaaacaactttcagatagtgtataggggtaggaatgtttcctatgaccccattattatacattatttggaatgatcaattataaaggttggaaaaatgtcgagggtgtcgatccagtatgcgagttcccctttgtttactctctaaaaagaataagtctaggagagagaaagaacaccgaaaaagaaaaaaaaatataaagaacggtcaatttatcatggtataatacagaatgagtctagaaggatcttgaatgttggcttgtttgatgagacccagtgatgaaagcttggtggatataattgtggaacttaggtatggaatctagaatgttttgtaagcttgcagagaagtacatgttggttaggatttgattagacttgttaggaatatggacttagtttgaatgatcatggcaataggttagagaatgttgggagttcctttgttttcaaaacctcttccacgggttcgcactacaagaaaacaggtgattgacgacctacaagtcagtcgtttagtagtcgtaactaaagctaatacgactaatttgcgactaatgactgtagtcattaatccatagtcgctaaaaacagtagtcgttaattagtcgttggtcaacgataataatacgacaactgactaaacagtgaaaaatcgtcgttacgtagtcgtactatgtcggcgactaattgacgactatcctacgattatttgtactgtacagagcgtgtgagaacatgtagttgtttcgtagtcgttaattgtgtacgacgacattacgactatgttgcgattaaatattctaaaccctgggtatgtttccagttgtcgtaaaatagtcgtaaatatgtttacgactattcgacgactctttgacgattaaaagtactttaccaaggatttgaaactttttgtcataacatagtcgtataagtatatacgactattggacgtctgttttatgattcttttatgactaatttgtttagtcttatgattgtcgtaaagttatgtgactaattgacgactattgagcgactatagtgctacttatttactacttttttgcgactaatagtttggtccgaataaagatttggtcatcaggtgatgggtttcttgtttgttcttgtttgttcatcgattgttcttgtttgttattgatatgctatacaatatgaaaacactgcttatatattgaaaatcaagttcaaaacataaaattatcttgttcaaacatacaacttattgaaagatacaactagtgtttggaaacctaaattctatggatcattagatgggggagtaattgggatacgctctagggatgtggaagagtgtgtggcaatgaagtccaagaactgcggatcggcttggcggagatacttctcgactaaggacaagtgctcgagcttgtccttttgctcagttgtgactcgggctgtctcggcttctcgggcagcaatctcagcatctcgcttctcgttatatgcagcatgttcttcaatttgccgctgagctttctgcagccgttcttctaaggctttaaaggttgagtctccggggagttggcggttggcactgcctagagtttctttaagacagccaagtccataaggattgcctcttgcatccttttctgtggactgcaagaaataaagaggaagataattagtgacagatcctaaatgtctctaagactctgaaaaagacaaagaacatcttacctcgagaaatatggctgcatactcatctagtgtgagatcccgaggatgtgaagagccatcagacacagcagaagcagccgcctctagttcagacaacttctctctcacattctgctcatacgccagagcaatcttctctgccttctgatcaacataagtcccatccgacttagtgtgtgtctggatgaacacctcaccaagagggacatgtcttcccattttttcttcctgcaaacacagatcacaagcttcattactatcaacagactaaacatcacacacagttaaacgaacatcactaaaacacatgggaagattgcagaaacacttaccaattcatcttggatttcttggaaagactttggcccagagtagtggacgtgaggaccgagaccgttacggtcagagagacgagctttggaatatgtcttactccttttctgtgcctcttcagtgtcccagtagtcgcacatggttccccacagagtttctccaatccatggaggctgctctcgagttctccttgcggtgctaaccatgtccttcaagcgcctcttaacgatctcattgaagtagtattggactgtccctgttattaagggatcctaatggtgagttttctacaaaaaagtgtgaagttagtgaacaaatgacagattaaatagtacagtctaatgaaagttggagaaatacaagaagcttacctcaaactctaaaaacaatctttctcttttatccaatggcacacaagaccaattatagtagggagcattgaacttttgagtaaaaatccgtgtgatctttctaaccaatttagatcctctgtcgcgagtaaacctccaaacacatgcaacacagacagaaagtaaacatgtttaaaatccaaaacactacaactacagcagactatataattgaacaaaggcagattctacaagattctagacaagtataagccgacaagatcacacacagaacacaatagtcaacataacaagatcatagagagtaaagaacaagtatagacaagtatagaacaaagacagatcctcattgtcaaagccgaaaacatgctaagttcaacaatcaacaaatgttccacaattatgttcatgattcacaacagaacacaataaagaacttaacaagattatagacaagtatagaacaaagacagatcctcaatgtcaaagccgaaaacatgctaagttcaataatcaacaaatgttccacaattatgttcatgattcacaacagaacacaataaagaacttaacaagatacatagacaagtatagaacaaagacagatcctcaatgtcaaagccgaaaacatgctaagttcaacaatcaacaaatgttccacaattatgttcatgattcaccacagaacacaataaataacctaacaagattatagacaaagtgaagaacttaacaagatcacacacgagtttagaacaaaggcagattctactatgttacacaaaccctaacaagccattctacagaccataacacgaattacactacacaggctaagaacactagaataaaatagaggaagagaacataccagtcggttttaggtttgggaattggagacaagacacaacaccactgctccctgtttggcacagagagtgtcgattgcagagccaacgccgagtcttcttgtagctccggcaacgtcccaggaacttcctcttggaagttgttcccttgagacgacgggtgactgtttcctggagcgtctgaatctcgcgactaaggaggagtttgctgagatggcgctgttggcggcggagtgtagtggacctctttagatagaggcagaggagcttgatgttgtggttgagtcgttgagttctggaagagttgcagaggcggtggatagttgcggacgtggggtgcagacgttgaaggtccatgttgttgagccggctccgtcgctggaacttgaaccgccagcgccggctctctgagtgacgttcggcgtcgtcttacgcttccgggagccacctcgaccggcgataggcatgatagtgagccaaatgaagagattaaagagaagaagaagaagacgacgaagcagatcaaagagtttgaaggtgagagatcgaagaagatcgatcgatcgtagcagaagaagaagaagatcgatctagaaggagaaaggatcgatcttagaaagagttctcgggattagggttttcgagacgaagaagaagaagaagaggaggttggatcgaataggtttaaggtgagagatcgaagaagatcgatcgatcttagcagaagaagaagaagatcgatctagaaggagaaaggatcgatcttagaaagagaattggggattagggttttcgagacgaagaagaagaagaagaagaagaaatgggtaagtgtttggctcgaagagaaatgactcgatttagggttttcaacacaatagaagtcgcataatagtcgcataattgtcgcatattcatttgggtttgggcctcaaaattttgaagcccaactaatcaaaaaagtatcgttgaatagtcataattttgtcggcaattatactgggtttgggtttcaaaatttcaaagcccaacaaatcaaaacttgtcggaacatagtagcatctttgtcataaaatattactgggtttgggcttcaacatttagaagcccaaaataccaaacatctgtcggccaatagtcgcaatattgtcgccgataataatgggtttgggccccgaaattaagaagcccacaaaacaaacttgtctcggtatttagtcgcaatatagacgcctatactaatgggtttgggcctcgaaattttaaagcccaacatatcaaacaggtatcgcataatagtcgtcgttttttcgccgattttaatgggtttggatttcaacgtttagaagcccaataaaacttatcttcgtcgctcattagtcgcatcatagtcacttttaaattgatataattataaatgtgaagaaatatttgtatatcataaaaaagttcaatgatattatgaaacaaaattcattctaacatttattcaaataattatacatatattaacacagttatacatcttcatcttctacttcatcttcgtccgaggacgataaattacatcggaattcgtcttctggttcagcatccccgacatcgtaatcaaggattattgggtttaagttggctaccggagtttcaagaacaagatcttcaattgtagtgagcaaaacatcatcatcattttcttgtttgcaaaagagttggatcattgttttcatattctccagaaatgtttcccctcggattgacttttagaacattgagccaaatgttctttggtttcttcgtatatggatacggaatataacaaacttgatctgcttgagatcctgtatacatatatcaaagatagattattaataattaaaaaagaaacgtattttggacttaagaataattacgtaccaagaataaattgctcgtatttattgtatttcctcgtagatagaatgtctacaacgccactatggcttcgtcgagtgcctctcccgatctttgggtcataccacttacacttaaaaagtgtgatcctcaaatagacgatacgctcatcctcgagttctataatattagttaaggtaccgtagaaatccgcttcatcagatgaatcagcgtaattttcacctttaacacagaccccatagttacatgtctttcttccagtgccgtgattttgcgtatgaaacaaatatcctcttgtgaaatacattggccaagttttaaccttgttcaaaggtccttgcacaatctcttgaacccaagtaggaaatggagaagtagtgttccagttagtatatattaaatgatcacctttcgaatgatcaattagtatatattaaatgatcacctttcgaatgaaccaaaattgatgtagacttacatattctttaacccatagatgatattcttccgctcttctcgcgtagagttctttttcgggcaagcatggatatttcgcagaaagataatcttcgaacatactacatttacaaaactgagtagtccatcctgataacatgctatacgccggaaagtcgctaatcgtccacagtagtactgcttttagattaaaattctgactcaatgaaacatcgtacgcatcgactccagtagaccacaactcttttaactcctcaataagaggttggaggaagacatcaagactagctcgaggatgatttggaccagaattcagaatggtaagaaataagtactctgtattcatgcacataccagggggtaaattataaggagttaggatcacaggccacaacgaatgattacgagacatgccaaatggattgaacccatcagtacacaacccgagataaacgttacggggatcttcagcaaactggggatgtaacccttggaaatatctccactctgctgcatctgaaggatgattcatttctccctcctttgattggtgctcagcatgccatcgcattgccgcagctgtcttatggctctgatacattctcttcaaccggtccccaataggtagataccacatacaactatatggtactttggttcttcgacggtcgtccttaggcttccatcttttcgcgccacaaaatcgacattgatcttctttttcttcttctttccaaaatagcatacaattgttctgacaaacatcaatcgtatgatatggaagtcctaaattgcgcattaacttctcggtctggtaatgtgaagtggttgcctggttttcttctggtaaaaaatctgtaaacgtttcgcaaacggagtccacaaacttttcattcatattatactccgccttgttgtgcatgagtcgagatgctaaggataattgcgactgcctttcacgacaaccatcgtacaaaggattatttgcaccttctaacaagtcgtagaacttatttgaatggttacggaccggttcttccacattctgataactatcatcatgacgatagttatcatcataccccacgttaaaattaaatgcatcgttcaccatatccacatatggatcttctacaatattacccacttcttcatgattctcactaaaatacgtcctattcgtgtaactcgttcctaaatccatattcatttcttctccatgcttataccaaacataataatcatgcataaatccatgactaaacaaatgactactaactcttctacccgagatgatgtgtttttcattcttgcatacactacaaggacaatgaaatttacctcgactactctgtactattggctgactattagcgaatgtcatgaattgctcaactcctgcgacgtattcggctgacaaattccccgtcacttcatcaaatctcttgtacacccaatctcgatagaaaccgccagtaccgccataattgtagtttcccgccattatacaataaagtaactattttttttttctctttgatgttgttgttgttttgatttgttggtgaaagaagagttgcgtgaacatttattatataggccaatttttgtgactaatttacgactacaactaaataattaggtgtacctacttaccaatgcgaaacacgtcttccatctactatatacgactacggtgcaacgtttctacgactacaggccgactaagacgtctagtcgtcctgtagtcgccaaattagcgactaaataaaatagacggtagaatagtcgttaattagcgactaagcaacgacaacattatcccttcaataatataatcgtcaaatagtcgttacttgccgactctttgccgactgcatacgatagacgtaaaacaacgactatgtaactataatttttcgtgttgtcgcatgcgagtcgtaaatccgtcgccaaatagtcgtataatgttacgactttgtttgttgtcgctgattgtagtcgtcgtttacctgttttcttgtagtgtcggcttttgtgttttgcttgagggcaagcaaaagctaagtctgggggagttgatattacccaattttcactgattttatctatgttttaggtataagatttttagtctttatgttatttcttgagtctttttagtgtcttttcatgtattctatgcaatgggacaacaatggagataaggagacattttggagcaaaagctaaggaaaatgaagctaaggacgattttggttcaggaatcagcgaggagtgtcgaacgacacactcttggtgtcgatcgacaccagtttcggcccggcaaaaaccctagatgctttcaagtttacaaaagatcaaatttgcccgagaagactttcctatttgcattattagtccctggacgttttagggtctatatatatattgtttttagacctaagtttcttttatcaagtcttttatcaagttctttgcaaaccctattgtgagagacataagctattcatcgattgttttctcagagtttcattcaaatctatatatagtgaagagatcccttcttcccccttctctatttcatgtgtttatgctttcacactcaaatatgttgtttgcttcatccaatatgcctgagtagtctgcttgttagggatagggtttctcattagggattcatatggtttagtagattgccccctttgctaggttatctatagaattcatcatctttaattatgcttaatgctagatctagagtaattaactagatcttgaatccagataatagatattccagccataggtatctatagttggatctattatttgatgggtctggtttataggtgtgtaataagaatcgacctatttactaagatgaacaattgaactcgttgagaatgcatatttaggttgatagtttctcggcttctccggttattattagctatagatatagggagtttcgcggcacgcccaccagttattccataattagagtttgagtttaagaatggttcgataacaacctagctttcattagatctactaaccaatagtttcctaagaataccctgttcctagctctttattaaatcgtttacaacacagttaatctgctgtctttttactttgttctcttttttttttactgataccatgctagctgaatctcgacatttaactcattgtttgaacaaaagaactccgtgaattcgatcctaaaatactgcaattgatctcttatttgagagagtagttctaggtaatttgaaccatatctgacacttcaaggtatatttcaagtatttccgcttcaaggaagaattatgagttttcatgcaaaaatgagtagaagtcaacaaaaatccgtttcagaacagtttttgtgccttagatgttttacatccagccaaggtcttacaggtctcggcatgagggtatctcggtgtcattggaaagctagaagagtcaaaattaacgtcgaagtcgaatcgaaacaatccatgaagacggtcagaagttatggtccaaagagtgaaaacatgtcctagaatcgcggttttaaaaatgatcaatttaaaaccgccgaccaaggtgacttgaacccgcgcgtcccctcgagtctttcaccgactactaggacgcacgaccacaccttcccttcctcttgccgccaagttgcagcaagaagcccaaaaacttggcccatcacttactaatcaatggaaggacgtttctaccctttgacctaatgaagccctataaatacatgtttagggaaaccctaaaaaacaaccacgaaaaaggctgtctcatgcggctctcaccgccccaaaagtcttcctcctcttgttcttctttagatctctcttttctcttcaattctatattctctacttgtaacaggaagaagatttatgaagctttggatttcctgagaagatttctaaacccttttctatactcatactctcttttatgcaatttcttattcgtatgatgttgtgttccttgagtatatgtgagtagaactctagttaggttttaagggggggggggggttcaaagggtattcatggggactttagatctgatttagtttggcggtttctatggttttctttgatcgtttacactattctgtctagttgagttgaatcttaatgcttgtatgtccggaacgccacctagtacttgaccttaggtatttcattatttggcaaaatctcgtttgaatgcatgaactagctcaactgaataaagaactataaccgttgcacacccgccaagtgatagggacttatggactagaatcgaatttgaacttaatgctttgatcttgtattttgaaaccatgttagcacctactaaccgatagggcaactgagtacgcaagatattattgataatagctggctttcacctactaaccgttagggttaggtggtcttgatagagttttgtatgtccgaaaatttggaagtacacaaacctaaccatgttatcacctgaattagaatctataccttactgattgaaccatgacacgcggagaaaaccctagatgatctagcgtttcgttttacttattttacaccgctctcttttttgctttctacttttattgccttttcattaatttccttttattgctttttacttttattccattctttacttattttcactgcatacaacaacccccactcttttctttgtcttgatccaggttacctaacttgaattcttccttgtagctacactccttgtggattcgatcctcaaaaactactctgatatactatgcacttgcagtagtcgtgtggtctttcaggtaaaaacctgaggcgaaataaaacacgcatcaaggtttttggcgccgttgccggaagtgattctagctaccgttgaattcagacaagttaacctcttgtcaagacactttaagcttaacgcttattctctttctcttttactctactttgataacttctttttccccttttagcttcggttcttgctcattagggtcaattggtatttgaaagaaaccactatatccattaagaaagcaatagtatgggtgattagctaagcgttcaagcatttgatcaatgaatggtaaaggaaaatgaattttcctagatgtagcatttagctttctataatgaatacacattctatgcccagttatagttctagtagggatcaattcatcctttcatttttaacaaaagtcattccgccctttttagagacgcaatgcattggagaaacccaggtactatcagagatagggtaaatgacaccagcatcaagcagtttcaaaatttctttttacactacttctttcaagttaggatttaacctcctttgtggttcaatgctagaataggatacgttttcaagatggatcctataattgcataaactaggtgaaattcccttaatgtcagatagtgaataaccaattactctcctatactttctaagttcagataatagcaagttcacttcaccatcatttaactcagcattaatgatcacgaggtaagtagagtttggaccaaggaatgcgtacctcaaaccttgaggaagtggtttgagataaaccttcggtgccttgagttcaacccagtcatctgaagtcagaatgattagctccccagagtcgatggtggttgcggtcgagtgatgggtcgagtatgtactcgagtgagtgggttgaacttgtgttgacctttcttcactcattaccatcacctctgttgttggtccattcaattcccaaagagttctgattcttccatcgctctatgtgagtctaacagcttttggtgtcccaaagtctccaaatgtagaaacccatcttcaccacttttggttaaataactgttaaggtgatcttcttctgcaagctcttccagtaactcatcagcaagagttgtccttctatagtaggcttcttcattgtatctttcacgtcaaaggtcatcctaaaatctttgccaaggtttagattgattttccctttcttgatatatatcatagctcctacagttgttaagaatggtcttcccaaaatcaaatggtctttgggctcttcatccatctccaggactacaaagtcagtaggtatctctacagctctaattctgattggtatgttttcgagaaaatcatgagggatccttactgatctgtcagctaggataagggatatattgcaggatttgtattgagtgaaccccaatcttttggtaacagagagtggcatgagactggctgatgctcctaaatcacataggcatttgttgaaagccaatggacctaaagagcatggtaaagtgaatgagccaggatcactaagcttcttgtgaatgatcttcttttgtataatagcactgcattcgtcactcaatactaccataccttgcaattcttgaattctctccacgatcaagtctttcagaaacttgtgggaatccatgattagtgctagagcgtcaacaagaggtatctgcaactctacctccttgatgttcttggcaaacataactctatacttatgtgccaatgctttcttgtgacggccaggaaatgaagggtgtggtttgtaaggaggaggaacaaagaccttttctttgtttttgacaacaactggtttcacagcagttggtgctgttattgggaagggtggtcgagtgaaatggtcgagtggttgctcgagtgactggtcaagtggctgctcgagttccttgtcagcttgatctttagtgagactgaaatcctccccatcatgatctacactgtcctcagtgactataacgcccccgaatcgctatatggccagacaagccaagggcaacccggaaaagccacattgatagctcacacggacaacccaacttaggttccaaacggatttagacccttagccgaattacccacatgaaccatccctcacgaacgcggttaggctttttagcccttgccatgatcgtgagttatgtcagtttggacaagactaatatcgcatgaaacacactctttatatgaaaataatcttttataacatataactttcgtacaccaagtatccaaaacgttttaacaatggcgccacgagcacatacgctcaatcaaatcaagaatcaaaaccattaagttttgcaaaaagcaacaaactctgtatcggctttcctacgtcctgagcatctctctaatggttcccactaaggtttcctgcaaaacaaatggagtcataattaatctaagattacttagtgagctcggtctacctgcaacagatattagttccccatcccataatcataacacgaaacacgcaacatagaataccaacgaaaggtagcttgccgaagcatctaccaaaaacatgcaaatgcaattaagactccaattttattaagtcttttaaatagggcccgatatgctgccttcaaacacccccacaccaaaaacacaaactctcgggatctcctgctttacaaccacaaaggcatgtaaccggagcatccctaccaaaacgctacaccgtcgcgtagacaactcgaccagggtagctagcccgtctctctgtgcccttcgcactacacatcaagacccaacatttcaagatatgatgagacatggttacttaaacacagagaatcatcaatatccttactcaacaaaacctcccaaccataagccataagcataagaatctaaaggatatcatatgcggcttagtaccatcattcacaccattaactactactcatatgattcatgaaataaatcaatgaatgcaagagtatatgatcatgcaaccaaacaagcaatcaatcacccaaataaacatccaaacctattatgtgccatatcacatgcatcgagactcacagagattcggttgaaggtttaaggttagcttcaatgattctcggacattccatgacttccgaatcttgatcccagctcaattaaactctcctcatcttgatctaacacctcttgatagaagcagccttgattcatgaagctttactccaaataaacatttatgggacgtgttcctcgggaggttctcaatcggacaggataacggcatggatttctcactcatgggtaggaattctcaatcacggacataaattctttagttaagggcaaattttctcaatcgcgggcaaattttatgagtcgggcagcctttcggttctctcttctttctcccatcaaatggctcgagtttggtcaagtatttataggtgggacagattggcctccaaagaaatgcatgtcatctggtggtgacattttgcgggacacatgtcccccgccagtgaagacacatatgcttcagaaatgggacgatgacacgtggaagaggaaactttggctacaatcctcataaatttggctccaagcaacttttcttgggctccaagtaagccagcccacgtgtccatggaccatggcgcagtcaaagctcgggatggcaaactttcacccatggaacgcctgtattgcccaatcttgcccattcttgcccatctttgccaattctttcccaaatagtaattttgtttgcccttaaatgatttaacaccttttggacacatttgggaattgaccatgtactcaggacaattttctcccgttttggtttcgttaggatgacccggttttgaattagaattggccaaggtcatttttaccttgcccatctctttggctttcgtccctttactatttctttctcttccagttcttcctcggtcgttctttgatgttttccggcttggccgcttaccctttagcgagggtcactacagtgactgtcttaggtgcctctatggttggaagtgcttttccactgcgcaaggtgatagcatgagcatattcttttggattctgaattgcttttcctggaagttggcttgtctgtttctgagcggaagtagatgcggaatttccctctaagtattgaactttggtactcagtgtctccaccttgacatttagatcattgtagctatagtccagcttattgtgtaactcaaatatcttcttagcaatctccatggagccagatgcttgtccgtgaagcaggtgttgtagcattagtttcatgtcagtgtaactgtgctgcaaaccctgatggtggttgctgttggtagttcccttgaaattgttgctttggaacaaaaccttagttgtagggaacaaagggtttgttctgaccttgttgttgctatggaggatacacttgatcctgtggatcagcaacgtttgtgctgcggtaagagaggttggggttattagtcttaaaattgttgtatcctttctagcagtccaaagtgaacatgcaggaaacaaaatattcaagcagaaacagtaaaacactcgaccaacacagctcgttgccaggcagtgggtgtggtcgagtgacaagtcgagttacagacagaaaatgtaacatggatactcgactgcacagtttgttgccagacaactaggtggtcgtgtatcaggtcgagtaacaggcaaaaattgcaaaaactacgcaaaaggtataacaagatgcagtaaacaataacagagtaaacaagaagtcaattagatgaaaaattccggaggatggggtaattgagtagtttgtttcctcagttacaggtgattgacatgctcaataaattattcctaaacaacaagttcgataaccaaatctaagtgccaccgcaacaaagaccctcaagttaaaccagtcccagactcaatcaccattgacgagagctaacctaacaggcattacgaatcaacaagttaaagccaaaacgcttcctgcaaccaataccttggtacatagtcacgaatctctggaaatagtggttcatacatttcatcgaacacgttttgggcgcaaaaaagtctgggctcaaattacagttgatcagaaagcaataggcattaagaacaactaatccagaagggatcgaaaaatcaaactcaaccacctagcataatgagaattctaaactactctaactcatcctcagaaacctactcactactcagacatcattgcaaaaagcataaacgacgataagaatgaaaacatgatagcaacaaagtaatagcaagatgataacaggatgaacaacttagtaaaagaaatgaaaagcaaatactgaatagattaatagaaatccggattacaaaatgtcaagaacacacagagtttgcggaataaaactttgtcttcgaaaatgtaaaatacatgctacttattgggccgaattaagaactgtattgggacgacatcatattgggatggattaagaactctactcgacccaggtggtcgagtgattggtcgagtgattggtcgagtggtggatgatggtgagactcgacttggtgacagagtggacaatcgagtggctgatgacaagggactcgacaacgtggtagagtgattggtcaagtaggtggttgtggtagtactcgacctcgtggtcgagtgggagtgatcgagtggacggcgagaattggatgtggtgatactcgatcacttggtcgagtagtgatgaggaatggtgaaggcagctactcgaccagggggtcgagtggtcttgtgaagtggtggagtcgtctactcgacaagggggtcgagtggtatgttgaagaggttgtggccaagtatttcttgaagtccaggatgacggtactcgagcagtattggtcgagtatgttgatttgatcagattcacttcttccaattagcttagcaacatctccagatcacctgaaaacaacacaaatatgcaatatgcaggcaaagtgatgacaaatgatgtgaaatggtataaaacagtggtgatatgatgctaatttcgtgacaaatggatgctcaaaacatgtaaaatacacagttatcacttaccgtagaagctggggcagcatatcaatacatcaaggattcccaaaggagaagcgatccctgaagctcctcctcattgaacctaattggttcccaaatgtcgagccaacgacgttaaacaagtgcgctatgtgggagccaacccactaggtaaatattttctttaggatttaaactttgcttttgcttttgatctctccagtatttgtttcaagactttttaaaaacaaaaaagaaaaatagaaaaataaaaaatagaaaaacccaaaaagaagagaaggaaggagggtcaccagaacccgtcactaggcaccctgacaaccggcccggctactcgcccgagtaaccgacaccgcccatatgcgccatcctctggccaaagaccaccggactgtgccacaccttcaccgacttgccccacctggcggcccaagtaacatcttgtccaccggtccggccaaacgcaaacgaagccggccaagactcggccaactacggccaacacgtgaataggtaagagaagttgcaccgacacggccgatcggttcgtcgatggattcgtttaacctgcgaccattccacccatcccaacgaccggtgaccccatccaacacatggtcgtttattaaccaacccactccaaccttttggccaagcccgcaactgtccgccatccattcacaccactcgtcagcacgaatttgatcttattcgtttccgtattgacaacaacaagatcaaatctatcttaggtatctttttatttattttgttttgttaaagttattggttgttttaggtttttgtttcaaggaagatgcgaatggagattaatatcatggaattcaaccatactaagccgagtatgagcgatgttaagcaaggagagagaccatccggttagtcaccacaaccaaggtgacattgttcttaacctatctttctcacagattcatccctatgctcattctcacactggggacggtgtgaagtaagtatggggggttaatgaatctgttactactaatgctactcattattttgttgacttgagacctttatccactttttacactgatacgctctaacaaagcaaaaagcttttattttcagtttttatttcttttcaaggtaccattgggcaaggacaatgtagggaacaatgaacctactatatgattaataagaccattacaatgtgctaactcataccctaagtgacaagttttgcaggactcacaaggacggacaatacctagaaacccactaccgtatctatcccctgaattctcactacagagactttgtttgacctaacgttaactctattttatttggacgaattaacctgatcttaattctttctcatgaaggggtgttagagcggggaaacgagcatatacattcaggacttcttatccctttttactactctctgctgatcttgaatggccactcatttttagtggttcctacccttaaaccctatccttttttcaagcctcatgcattctcttttcctttttcatttagcagatatgtgcaaaaacgttggagaaaatggaacaacacagtttcccgccataaagacaaaaatgaagcaaaaataagagattgcaacaaacggcctaagagtttattcttccttggaaccaattcaaaaagtaagctcattagactcggtgtttcaaagttttgtttccccttccataaaaataaaaaaaaattaaaaaaaaaaagaaaagaaaaggaaggaaaggaaacattacaaccaagagagtctagtggcatagttcgaaggaaagacatggaaacttaaaggagagatgagccaattgcagtagagggccccctcagaaaaacctaagtctaggggaaccgaaagtaagaaagaagtaaaggagaaagaggtgtttaatagaagacgtggttggaaactgtggacctcaaccaatttgatagctcttgcggttttgcaacatatcctgcattcgagactatacggtaactctaaacactttaactcccccacttaaacaccaattcataccaagttccgtctaccccgaatgacaccctctagtgagaaatctcacgctacttttaataaatgaagagggttaactgatgagattcttgagttctcttgtaggtccgagacggatggataaggatagtgaatgttttgattatatagtgagaatgttctaacgtgaagtttttgtctttacgcgtccacatgatatcttttaggacatggtctctgatagtaagagacttctgcttttttcaaaatctctccaccagcttggctttgttgtttgcttgaggacaacaaagtctaagtctgggggagttgataacatcgtattttcgcccacttttactatatttttattagattttccatggagaaatcaagagttaaagggcaattaaaggcatatttcaagtatttgagcttcaaggaagaattattaatttttcatgcaaaaaggagtagaagtcaacaaaaatccgtttcagtttagtttatgtgcctcagatgtttcacatccggccaaggtcttcccgattggcatgagggtatctcggtttcattggaaagctagaagagtcaagattaacgtcaaagttgaatcgaagcaatccacgaagccagtcataagttatggcctgaacagtgaaggcatgtcctagaatcacggttttaaaaatgatcaatttaaaaccgcctgccaaggtgacttgaacccaggcgtctcctcgagtctttcaccgaccactagggcgcacaaccacgttcccttcctcttgccaccgacttccagcaaccctaagaagcccaagaacttggcccatcacttactaatcaatggaaagacgtttctaccctttgacctaatgaagccctgtaatacaagtttaggggaaaccctagaaaacaaccacgaaaaaggctgcctcttgcggctctcaccgccccaaaagtcgtcctcctcttgttcttctttagatctctcttttctcttcaattctgtattctctacttgtaacaggaagaagatttataaagctttggaattccagagaagatctctaaacccttgtctctactcatactctcttttatgaaatttcttattcatatgatgttgtgttctttgagtatgtgtgagtagatctctagttaggttttaggggggtttcaaagggtattcatggggactttagatttgatttaggttggcggtttctatggttttgtttgatcttaatgcttgtatatccggaacgccacctattacttgaccttaggtatttcattctttggcaaaatctcgtttgaatgcttgaactagctcaactgaatgaagaactataaccgttgcacacccgccgagtgatagggacttatggactagaatcgaatttgaacttaatgctttgatcttgtattttgaaatcatgttagcacctactaaccgatagggcaactgagtatgcaagatattagtgataatagccggctttcacctattaaccgtttgggtttagctggtcttgatagagttttgtatgtccgaaaatttggaagtaaacaaacctaaccatgttatcacctgaattagaaatctataccttactaattgaaccatgacgcctggagaaaaccctagatgatctagcgtttcgttttacttattttataccgctctctttattgctttctacttttattgccttttcattagtttcgttttattgctttttacttttattgcattctttacttattttcactgcatacaacaacctccactcttttctttgtcttgatccaggttacctaacttgaattcttccttgtagctacactccctgtggattcgatcctcaaataatactccaatatagtatgcacttgtagtagtcgtgtggtgtttcaggtaaaggcctgaggcaaaatagaacacgcatcacctagcaatcactgtgaaatggattgacaccccttattgttgcatcgacatgttagtgtttaaggtaaaattgaacacaacatagttagacctcaaaaaactaactatcagagaggagcgtaattcatcgtggtttggttgtgccgacggcgtggtctcttcatgtcttgctaagggattgacctacgctgaagtagggttatattggtggatgcactcctgggggatctgcctacgtaccctgttacgggatcaagccatgacgtagtttgattgcggtggtggctgcactcttgggggagctgcctacgtaccatgccaaggggtcaagccttatcgtagttcaattttgtagagagcattttcgtggtatttttttagatgcatggcattccaagaccgtaactcaggtattcccttgattactttttcgagctaatagacgtcgtcgcgaactacctcggagattcgataaggaccttccaagttggtgcccaatttttcggcatttatctctctcgtgttgctgaacacttttcgtaggacaagttctcccacgctaaatctcagaattttaatattggagttgtagaagcgggcggcaacttgttgataattttgaactcgaatcattgtctgatctttgcgtttgtcgatgaagtccaggttgtcctgcaacatttgggtgttcaggtctggttagcaggactggcggtgacctcatcaatatatttatgtttattaattacaaaataaaaaaggtaaatgcttaagaattcaaatttttctgatataaagttatctatagctacctgaaatctgattttatagatgagaacattctctccacaagtgctactggtaaaaatatcattcttactatttatattagactttttggtgaatttgtcaatatatttatgtacactaattacaagataaaaatgatttcatgattcaactctttcttccgatatccagttatatgcagctaccaacaatccaattataaagacgcgaccattttcttcacaagtgctacacgtaaataatttatttttacaatttatgtttgacgaaagttacagagatttatttttttgctatttatattcttaccatttttagtcaaatttttcctgatttgaaattttatattttgtaggaatttgacaaaagttaccgtgatttattgtaaaactggatcatttggaagacaaaaacggaaaacatatggagttgcctaagctttactattaattatcatggttttttttttcttttttttgtaatactagatattaacccgcggtataccgtgggcctatatttttattaaataaatttgaatttttgtgttaaaatgatctataaatatatgctcttattttgtttaacttaaatgtatggtacacggcaagaaaatattttttaacttaatatttgaaattttaagttgtatttgttttcttaatattgtttagtgtttaagattgtataattgtatttgattgttaagtttacccgtaatatacattcatggattaatatcaacacaaatccgtcaattctaggatttcacccgtagtataaaatttacatgtttataatgtatataatttttataaaaaatttgagatgtgttttaaaaaaaaattatttaagttgtatttgttttgttaatattttttgtgttgtttagtgtttaagattgtttaattatagtttaatcgttaattttaggattttacacatagtatagtgtctcgtattattatcgacccaaaaccatcaattctaggacttcacccgtagtatacagtcacaaattattatcgatctaaacccgtcaattgtaggatttcacccgtagtataaggtttatatatttatgatatttaaatttcttatttaattattataaatataaaatatttataatatttaaaacttcataaaatattttagtatttgaaacagttataatagtttactttaaataaaatttaaatatatataatattttgaaactttttaaaagtttccatttttgacataatgaaccggagtaaaccgaacacttttagttttggccgtctaagaactcaagtttcttattcactcgtattcataatcattttggtcttttttgtagtatgattcattgtccaattttttaagcgatatgagatattgtacacatattatttcttcatcgattgaataatatatgtccgttttaaaaaatttgaatcacatcatatacagaaaaatagaaaattttattaacaatgtgtaatttatataaattcagaataaattaaatataaaattcaataaaagtgaaagaagaatcatatatttatgtttagattaggtagagatgttttaggaaattagttaaagtaaataacaaatatggttagtttagagatattatatatattaaatttggtaattaaataattaaattttattttgaattattttttggtagtaaatggtaattgttttcaagaattaatgttatccaagatccgaacaaaattaaaccgggtaaaacccaaccatttgaaataattgatgaataaaagctcaaatttcaaaacttattttcaaaaaaagtgttgcaaaaatgtatatacagatttttaactaaagacaaagaaaaataatattttaagagagacgtgaaggagatattaatgggtattacaattaattaatttttgggctgtttttaataatttaatttatttgtttttttaactagatgacatgtcaacttcaagaattgttcttatgaaaattaaaaacaggatttattttagaatatttcatagcttatcacaaaacgatacatatttttagcggatacataaaattgtatgcaatacttgattgagaataaaatatagttgtaagaaaaatagtgcaaatacttattattcttagttattttgtaatacaacaggacatataatcaatcaaaaccttataaatttatttatgttgcaaattcaagtattttgctttactgaattatagccctaaagcatgataattcaaatacatagccctaaagcgtgtcgattagtttggtgggctcgacttggtgggctcggcttggtggtgttgtttcttttgcggcgttgtgtttgagctcgcgtggaggtgattctaacctaattgttcttattttggagagattgacggcggaggaggtgatggagctcaaggacggctccggatctgactcattctcgccttcgatttggtctctcagacagtttatctggtttggtttagatttgcttctctcctcgggctctttgtggttgtggctagctggtcggagttctcagagaggtttactatattcgttcaatgtggatgtggcaatagtttgtgtggaggttttttgtttggcttcgtcttacgttgaagcttcaatgtggctcttttgtggctcagttaggttgcttttttcttttgttgtaggatcagcctatagcagtttgcaacaaaattttcactacgtgttgccttggtggggttctccatggggaattgaggcggcgtttggattaagcggcttcgctattttgtggaagatgttctgttactctcaatgaattggtggctggaggcggcttttctggctgcccgtagatgctcatgtgccgtcgagtgtgagtttagtccgcttaagccgctctgtttttgtgttagttttcagagaagcggtaagtgctctttcttgaggtttgaggacaactttaaatttgggttgcttgtgataacaaagatgaggacatgagctctttcgagccgaggaaaccacgcaaatgtaaaaactttattgtttagaatcaatgtttcgttttgggtctccactaatagggttttcgttgtgatttccttttcttttttccttgtcttctgttgtgttgtagtttttggtggtttttatagttttcggttagtctgttttctttgtaatttaaattaaaaatttagatataaatttaatcttttctcaaaaaaaatttaaaaaagaaaaatcagatgcatagaaaagtctacgagatgcaaaaagcttgaagctttatgatcgtcaaaaatcgatccaagcaaagatcaattaactttatgtgaaaggccaaaacaaaataaaataataatagaagaatgagagagtccggagaagaaaggtagacaaagagacctccgtcccggcaaagacgggctgtaaccttcttttcctactacattgtccccaccacccacatgcctccatgttctcttttttctcgtcccaacattttctttttctttaatgtaaaaataaacattaacatcgcttatatcaaatattggtcgattaacttttataatgtttttaatcaaattataaatactacttcaatatttcacactaatattactattgtattaccatcttaatcttaatccgataaaaatgatgataaaccaaagaatatttattaatgtttcttagttttatttaagcaaaaataaaaattaacgttttgatgtatttctttatttagaataggtattgaacggtcatatatattaagaaatatattccaaccaaaactaaacgaattttacgcttcaagtcttaattttaatgaagtaagataatgcttacttgattgtttattttatcgttttgtgattaattaccagtatttttcattattggtgtcgacagtcaaaaagtaactttgtttacatattgttcaaatttaataaagttgttgttttttcaaaccgaataaccatcattttcaacatatttggaggagcttcatagcaataaaaaagaaaaaattaactatcttttctttatttttaatcactcataattggaaaaaaatttggcacgaacaattcgtgcagaatcgctacacattgcttacataaacaattcatgcagaatcgctcgtctgatttctaaataatttgatgacaaagaaaacaaaactatgttcccatttactataccaaaaataaaataaaaaaacatgcacatatgtatacgattcctaacttgtattagagaaaagttctttttctataaacggattgaactttgaccaaacactatgtgtaataatgtcatctgtacatgaatgacaagtcctcaagaaacaaaatcacaaaatcattttgaagaaacaaaacaattcaaaaataccatattaatttaaaatgtcaaaatatcattgcatacgaagtacacccgctactaactagcaaccacaaataaaatcatttagaacaacacaagatgttatggcaaagacgaaagataatgaaatgaaacaaaggatcaatagcaaatacaccatctcctattccacaatatttaaaaccagaacgattaatatatgggggacaatatagtaaaccgaacatttgtcgataattggagctcatgtaacatgcttaccttaccgctttcatggagatggatatcatgcaggacaagtttattcacaacatcaccacactggtaaattgaatgctaaataattcatagaccaggtcattaaacttacgatttgatcacaatggtcaatttatctccaggatatatataacgcactgcccgtggagtgagatgttaatcatgttattcgttaatgtttggtttaagggactctataggtgttttaagatcaagatctacaaaaaaaaatagaataattaaatagataaagttagaatttgttctaattagtttatctagtagttagaaatacagacaatttgactatccattcacaatagtcggcaggaatttcaaactcgaagaaagacgtgtggtaacccaattctacggatcgagaatagtccattctataccatttcagtgttctaccggattaaataaaataaaataataataaaaaagaaaaaaaaactaaatagataaagttaccttttgttttggtcattgacgcttggggtggcaagtcatattacctgatacaagaagcacttgtgaataaagtgatggttagaccaaaagaagcaaatttcctccacccaattttgcctgattattgtaatcttcaactcaaaaatatctacatagacgatttttctatacagttattgtcattacaatatttttatttatttagtctatttcctagttatatgtttccatatcataccaataaaaaaaaatttggttgaaattcaatatctggtatctacataaaatagtaccaactttcacaaatttttttactaccaattaattcatacatggccatttaaacagtatatattgtgttaattttagtttttactatctaggcatttctcttatttgaatatatatttattttattcaaagaaaaatgttaattaattttataattcataatacactaaacaaattacgatcttaatgtctatttgagattttatacgatatatttagttttaaatatttatatttgttagaagtgtcatcaacatagtattggttatagtattggttatatgacaacgattttgttttttgtaataattatcatatgacaactatagtatcattattttacgtaatatgaatacaaccatattataaaaaaaactgagtcggactacaccaatacgacacatgcaaatgcaaagaaataaatattctattactgatgaatacaaatatttgttacagcagaaaaaaaaaagccaatattctcctcgggattagtgctgtaaaagaatgacccttctcttcccttgtcccctataaatatctttctatcgaccatcttccttctcacaacttcaacttccctctttctctatattacgcttttgcccctcactccctctttccacaattagggtttcgtctgctctacatgaccctctctgtattcttccacagctttcttgaactgcaaaacttcttcagatttttttttttttcttttgatatctcttacgcataaaatagtgattttcttcatatctctgctcgattgatttgcggttcaataaagctgtgggaagatacagacagagtcaaatgattttctaaatttcgttcatatatatgaaagcgtgattgattccataatcagatctgatcacagatctttcgtttacgtgttttttgttttgttctctttgttattttttatgactaccaactatattgtagctagattcaagattctaatctctaaataagttctttaaaaaaaaaaatgattcattgtttaaaaaccctaacttctgtctatgagtttaatcggtgtttatgaatataatacatacaaaaatgtttttgaaatgggatctataaattttgtataatttaataatattggtatggggagattgtgttgattgtcttatttagattgatgatctgtagatctgtctagtcaagatatatattatataattatgaattcatttccttgatggatctctctattttgcgatcatttagattttgcaaatttatcaaggtcaaaaacttttcataagatagctaaatatacggagcatataattgagaagcaaattttgtttggttgatgagttaataatgtgttgctggaccacattttgaatattcatgatgtagaggaagtagtagcgaagtaggttcttgggtcgatccacattatttgtaatgctttcatattatttatttttgagataatgatttattggtggagaaaggattggatgttatgtgcaatctaggattaaagaacaacgagatcttgggctttatcgaatattttaacaaggtcttaatgattcatatttatttgatactagattttacctttttaaacaacttcaagaggttaatgaatattttttattcaaccctcaattgtttgcaaaactctcgctggtctaaagcgtaactttgtcttttaaatttatcaactgcaacgtgttatgaaataaaaatcatatatacgtatatgaatttcaagaggtaaattcacatttttaagccttaaaatattattggataatactttaaacattaaaaaataattttattaacactttaaatctccaaacaagattttctttttccaaaaaatattctacattataacaatcaaagaatgtcgacgcttagccaaaaaaatgtatcattcatcgtagcggaaaaatctgctacgagattttttacattcataaatactcttcttttcggaatatttgatttttttgataaaaataacaaatttaagaaattaattaattttgagtttattacattaaaaacaaaaattaatctcttttaaaaataatttgaccaataatataacttactgtaaaatactaatagttgaaaattgtttaatttaatattttacatagaaacttgaattgttttttttttgtcatcctctttaatttagagctcaaaatagccatttttatggtatgttgtttacataagtgagtgatgcttttcggaacagactttccgtaccgaattatccggtttatatttgcgcatcgacaaatttgtgaactcatctttgtcgctctgaaaaatgagttcatcttggttttctgaagatgctgtccattcggttgggaaagacatcatcttcaccgggtcggaacaatctgtaaaaaatggtacatcttggttttctcgaccaatcatacacttcattgcccaaagaagggcttcaacttttgtatggagtggggagagacttttacagggttagcagcgcccatgcttcatgtttcttcatttgatgatgtacaaaaccatcttaatcctaaaaacttatcaatctctttccaagatccatttacaaaacaacgaagtcctgcatacgtaatatcccttgagatatttctcacaagagttcgtgtttccaaaaaagagaccagattttcagtatgaagctcaacttgagctaatttccacgattgtgcctcttgttctgctaaacataatatctagagtggatcattatccacattataaaaaatcttttcatctcatgctttccaaatgtaccaattgctaaaatcttttcatgggtatgaaaatgaatcaattgctaaaagttggcctccaaaataaatgatccagattcacataactagaatctgagggaaaaattcttatagccgtgggaatctgtgaaagcgcccaaatctgtcgagctgggtgacactgaaagagtgtatgattaattgtttcctatgtggcgccacatcttgcgcaacctctatcacaatttatgcctctattccataaattttgtgtcactggcacacatcctgctaaaatttgccataaaaagtggcgtaacttaggcgaacattgcactttcgaagtttatgcttttagtattttgatctccggaccaataaaagataaagttgcatccatatgttctatccgagaagtatgatatccagatttgacattatattttccggattttgtaaaatgactacctaaagtatcctctttgttgggtgcacccacatgcatgaaacttatcagcgggatatttttggattaaagatctcttgtaagagatctatattccacaaatttgtccgtttgtcgataaggttacttacttttaaaaatgaatcaataacgaacccattacttttaaacttaaattctgttttcaaaacatcatatattgtgaaacaaaaaagtttaaaatatcatatagtatgaaatagaaggaataataaattatgaaattaattaaaattaaaattaaattgaataaatttttatcaaacagacataaattattttaccatcatttttatggaagtgcaaataagagtttggaagtttaaagtgttagttaaattatcttggtggtttatagtgttattgaaattctttcgaggttaaaaatgctacctgttgacactttgagggttaaaaatgtattgtttcttgttattgtttaaacataaactaatatcttcttgttgtagaaaacaaaacaccaacttatggtttagttaagaacaaaatcgtttgctataatcaatataaaaaaactatatagaatctgaataaaagtgttatcagatcatgaacaagtggaataaatgatatacctggatttttaccgattttaggtataatatgggtatagtttttagagtcttttttgttatttgtcgagtcttatctagtcttcttctgttttttacacttttggatacttttgaagaatattgagcattttggagcgaaaacaaaggaaaataagctaaaatacaaatttggaatctgaacgggtgtccgtcgacaccattcacagctcagcctaattctgacggtttgaagaattgaagtctccagaatataccccaaaatacttccctacacgttttttagacattatatatagattttcaaggtcattgtttagacctaactatttttacatgttttacaactccctagattctaagttttagttactttgctctgcaattccctaaggtttgtggagagttcttaagagatttcaaaaccctatagagagaagatctttttgaaactctattctccttttgattttgttatgcaatcttattcaaacatgattggtgtttctatgatcatgtctgagtaatctacttgttcggtatagggtttctcattagggatttagatgaattagtgaattgataaactgttaggtgatataccgcgattttcaccagtttttgtatgatttaggcataggttttagaatctttatattatttctagagtcttttcaggtatttcgaggaccgggacaagttttgaaataaggaagcattttaaagcaaaatctgaagaagctaagctaaatgacgaattcaaataatataaagatggcttagcttagtgttcacaaatcaagagtgtcgaccgacaccgttcgtggtccaacaaaagtccaagacggcttaaagatttaagaatggcagttttgccgagaagacttttctaatcgcattaggagcccctccacatttttgaagacttaataaatagtttttatggtcattgtttagacctaaattttgatacttctacttttactctgcaattctctgaggtttgtggagagttccagagatttcaaaaacatatagagagaagatcttttctaaactatattctctttttgatttctttatgctttcttattcaaacatgagtaatctacttgttaggtttaggtttagggtttctcactggggatttagatgaattagtagatctttaaaactgttagaattatctacatagttcttcgtattaattggttttactgctaattctagagtagctaactagaacttgatcttaggtataggtagcattcgagagggcactgatacctgaactactatagatgggcctaatagctagatacacatatgtatggtttagctattaggtgaacttatcaaacctgattataatgcatgtttagtaatagagatttctaactaggattggaatttttattgctaggcatagttagtcaatacggctagagctggttggccatagtttattttttttgagttctagaatggttcaataacaatcttaatcatagctagatccattgtttgtctatttcctgagaatttccctaaacctgatgctttaatcatctgaatttaaaaccaatctgctctgcttacttgtttcttttatatttttctattattgattttgttctcgagacttttacttattcagtgaacaattgaacttaaaggaatttgaccctaaagtactacaattgatctcttattcgaggcagtagactataggcaatttgactcatatcattaggattacttttagaattcctcttcttgattgttcttaatgagttatagatatctaattagaacttaatcttaagttgataggtacgatttgagaggacgctatttactgaaactatcatagatgggcctaagtaattagatacatagaggtctggtttaaatactcaggtgaactaatcaaacccggagtttcagaagactatcatctctgcaagcttttcctatactcacttgttgggaaagtgatatagctcaaattatccctaagtttactccctcaaagaaagagatcagataacatcgtattttagcccacttttactatgtttttattaggttttccatggaggaatcaggagtgaatggacacttcaagacattgataactaggttttttttaacacctagttaggtgatgttcaatttcctcttaaacacaaacatgtcgatgcagctatagggggtgtcaatccagtccactgttattactagcaatcaagatgtgtacagaagcaactaagtcaagctagatataatgatggtgggtttctagtacaaatcctaaccaagtttcaaacaataaaaatgagaactaaagtgtcctactcgatcatagggtcgagtagaacacaaaaagcaacatgttcaagtactaaaatgcagtaatagatgacttaacaaggggatgaaataacaggtaaataaaagtgtaatcaaggggtggatacaaataaatctaagaagaatagaattcctaaggatggattcattaataagggcaactctagggttcatcaggtggccaacaggcgaaatgcaaatactctagacgatagattcaaaacaagaccaattcactctcgtatcattgatcctcataactttaccactttctaatctcaactctcgttgatgaaacatagcaaagcaggctttaagcaacataaacacccaatctcttgggctagagtctacaaatctctggaatttgtagatcagatatccatttgaacgtcttttggacgctggaataccttgggtcgaattccaaacttaactgagctaaatatgcattagggccaacgaatccagaagggatctaacctaatcttaaccactagactaacctagatattaccctaatctaatccatactcaagaaccctaatcactactcaagcaacataatctagaacacaaacccataaattactctaaacatatcaaaatgtatatctaaacaagataaacaactttactcaaagaactaaatgcataaacgaaatagattaagagtaattaaggtttcaagattctaaaacacaaagaaaaactacagaataaatgatttgttccttggaaaaaccccaaagtgacatatttatactaaaatctcgaaaacaattcactagaagacaagagacttgaggcggtttggatgaatactcgaccttggggaacaagtatcagggtgctacaaagactacacctttgcctctatgctcagagtgatcaattggtcgagtagttgcttcttccacttctcttcttatgcccagctgtctggttgagtggggaaatgaggagaatctgaatgcgctttgatcgatcaacaagttaggtagaatccgttcgccttgatcgagtgaaatgtcgagtagagggtcgagtgattgtctgctgcttcctctggttcccctctaaggcaatagaataactgcttctcctctggttcccctctggggctatgaataaattgtcgagtagctgctctgttgcttcccctatgggccaatagaatcctctggttcccctctggggcaatgaataactggttgagtaactgctctagtgcttctcctctaggggaatagggtagagggttgagtaaactccatgtaatctccttctgcacctgaaaacacaccaaaacatgcaatatgtatgcaaaatgatcctagaaacctaagtgagcaaaataagctaaaatggtgcaaaatgatatgatacaatgagcaaatgcatagctaaatgatgataaatacatgcataaaatgagtagaatacagtgttatgagacatatttcaaatatttaaggttcaaggaagaattatgagttttcaagcaaaaatgagtagtagttgatcaaattccgtttgagaacagtttctgtgcttaaggtgtttggcatcaagccaaagtctttccgatcacggcatcaaggtatcccagtgtcattggaaagctagaagagtcaagattaacgtcgaagtcttattgaaacaatccatcaagccgtttagaagtgatggcccgaagagtgaagacatgttccagaatcgcggtttggaaataatcaatctaaaaccgccgaccatggagacttgaacctgggcgtctcctcgagttttccaccgaccactagggcgcataaccactccttcccctcgtcttgccgcggacttcaatccctctttctaccctttaacccaatgaaggcctaaaatactaagtttagggtaaaccctaaagagacccacgaaatttggcagcctcctgcgcctcccttgccctcctcttgagtcgagactctcagctccattggaattctacctcatcgaatcaagctctcaagtcgtcgtccatcttactatgtttgtttatcttttctcttcttctcttctctattctctatttgttaaaggatgaagattcatcaactttggatttccagagaagatttctaaaccctttacatatactaattgaaacaatccgacccgttttcaaaaaaaaaaaaaaaatattctcataaataatttaataatttccacaatcaattaatttcaatatcaaagtaaaccaccaaattcagcaaaacttattcaacaaataaactacaacaactttccaaaaataagttactaaaaataaatcttaaccatttctaaactataatttaaaagtcgagatttattaaaacaaaccagcaaattatcgataacaatgcaattatcaattctgcatttattcataaataaatcataaaattcgacccacaatgaccacgaaaaccgagactttgatcatcatcctctcctcgccatgattccacgtcacagtttgtctatacctgcaccaagaaagagatgcatacatattttaataaatacttagtgaggcgatcctcccatctacgagctatacacacaaccagatcaaaaattacataattatgaatcaaacaacccaatgaacattaactcacttacacaaccatcccaagaaataaatatggatctataaaaatcctgcctagatatcacaacaaacaactacataaatccaatcgcttagataagctcatggtcacgcactcaactctgataatgaatgattttggacaaggaacaaaattatacaaccaacgatgactgatatgtcaataatttgcatgttttctgcattcattcatcgtcgtgttgagtctagtttcatagcattcatcactatttcatatcatttttcatcattcttgcatactttgcaagattaggatagctttgcatacatattgcatttcagagttgtttttacgtgatgtggagctgttggcgagcaaattggaagaagcgagccggaatcagaagccacatacttgaccccgtggtcgagtacatgcatcacaatactcgacccctaggtcgagtaacatataagtcgttcttacaatatactcgaccccatggtcgagtaaccacagtctagcccactcgatgacaccactcgaccacctggtcgagtaacactttttcacaccacctgaccaccactcgatcaccacacttgaccccctggtcgagtgtcatcagtcaccacccagtatcatcactcgaccaagcactcaatcgcatcttcaaagtcttctcaaatccgcactcaaccagacaagctgagcataaggaagagaagaggagaagaagaagtgtttggatgcggtccagagctttactcgatcgcaaggcccaacttggcccgttatcactctatggaccggtcgattgtgttcccggccgatcttctatcattttaattctttttgtataaagaggtctttgagggtttcttgagacatccagtttacatccagttttttgcttaagtctaatcaacatgaattctatccgaagcattcccgcacccagaaggtgttcgatggaatgcttgatccactagttcctgagatattcgtctctatcccaatggattggccgtttagagcgttcattgactttaacagttggttcttattgcctgcatagttagattccgttaatgggaattagtctgggctagctttgcttgagaatttctatcatgagagtgaattaactctgttgttgaacctgttgcctagagatagcttgattgtgcctgttaaccatcttaataggctaaggagaccaccccatttgattaccccatccttaggtatttctcgtctatttgatttttctgtttcattgctattgattaatcgttctcatctcatattgtttagttttcacgtttgttttacctgttatcacgaacttactcgaccacacccagtgtctggcaacaaaatgtgcaatcgagtataattgctacattttctgtattttactcgactacttacttgaccacaccctgttactggcatcagccaattgtggtcgagtgttttgtgattctgtttcatgcattttcatttaggactgttagatactccaaaatctataattgcttggcttgacttagttacttctgatcacatctcatttgtttgcatcacacctaaaatggatgacacctaaaatactacaacgacaggatagtattttagtattaattgatcgtaaaaacctattatcaatttggcgttgttgccatttgggtgcttgttagctatatttgagattccagaatatttaagattaattgctttttaattttcattcaaagttactaactatgtgctttttctgtttgtctgttatgattcaggtactatgaatcaccagctttactcgacctctgataagtctgcattttacttgtattaagcatccatttctcatcactttagcatcatatcaccactgtttcataccatttcgcatcatttgtcatcactttgcacgtttaggatagttttgcatgcatattgcatatatgtgttgttttcaagtgatttggagctgctggtgagctaattggaagaagtgggcctgatcaaatcaacatactcgaccacgagctcgagtaccatcatccttgacttcctgaaatactcggccacaacatctacaactcaccactcgaccccctggtcgagtagaggacttcaccacttctcaacagcactcgacccccaggtcgagtaaatgccttcaccaattttcaccactactcgactccatgatcgagcatcaccatcaccatcgctcgattgctcactcgactacatggtcgtgtaccaccatccattatcactcgatcaatcactctgccaccaagtcgagtccaccttcattcaccactcgaatttgagcccagacatttctgcacacaaaaggtgttcgacaaaatgtctgagccactaattccagagattcgtggctctgtactaaggtattgtttacagggagcgttttagctttaacttgttgattcataatgcctgttaggttatctctcgtcaatggtgattgagtttgggactagtttaacttgagggtctatattgaggtggcacttaaatttggttatcgaatttgttgtctagagatagtttattgagcatgtcaatcacctgtagattgaggaaactaactactcgattacctcatcctcgggaatttctcatccaattgatttctttgcttacactcctattgttcacttgttcttattactcattgcttagcttttgcatttcatacctattatcactaatatactcgaccacacccagttgtcttgtaactgactgtgcagtcgagtatctttgttacagtttctgcttgttactcgacttgtcactcgaccacacccagtgcttggtaacaagctgtgttggtcgagtgttttgattgttctgcttgaatatctgttttctgcatgttaacttaagactactagaaactcaaatctgtttttgcttggcttgactatgtgaactctgattgcatcttgattgctagcatcacacccatttggattgacaaccttcagtactacaatgacatgatagtgatttaggattaactatcttaaaaacctattatcaatttagtgaagttgccaattgggtgtttgtttgttacatttaagatttcagacttgcttagatcaagttctttttcaatttttatttcaattactaactgtgtgtttttcttgatccaggtacacctctactgtatgcaaacttgatcaaacggcaaccagaacctcatttacaatgataatatcgactgcattgctcgcgaactactggaacggagaaacacagtcaaccttgtgcaccaccaaccactcgaaatggctgatgaacaaaatcaacaaagtggacccgcaaacattggtgctagagatgcaccaaggaatcaccgtcagtggaaaggaattgcacctcctgctgtccaaaacacatcttcgagattaagagtggtctcatctcgatgattcagggaaacaagttacatggtctgcctatggaatacccactcgaccacttggatgaatttgataggctctgcagcttaatcaaaatcaacggtgtcagtgaagacggattcaagctctggttgtttaccttccaaccaatcatgctatccttaccttccaaccaatcggccaatcacgctatccttaccttccaaccaatcggccaaagccaaagactcatacggactttggctacaccatcaaaggtttgagaagcaagacgaagcttggttagtgttttggagtcgaatatgacttgatgtcatgtgtatgattgagtataggaacttaaaccgcaacccgatcttaaaagcctaagtagtatatccttgttagaagacacacagacaaagactcatacggacttcgactacaccatcaaagctttgagaagcgagaagaagcttggttagtgttttggagtcagctgatggctaagcatatgggactccatatgagaaactgaaagttaatctgctctttccgctacgagctgaaagtaaagtggttcttgaccctctttcacggtgacagtccaagtaccatcagacgggggtgcaagtactcacattatcacgcggtgcagagggaccatctcatccagtcaatacgggtccaccacttcatcctccccagccatcggttaataagctaaaaagaagttaaagaagtacggaagcgacagagaagtaaacactctcctcaatatagtttcactcgagtcacgtcagtacctctccttttagtcgctcgttgagacctcatcaactagttaatacctctggacctctcctttatcagtcgagtttgtgttcaccacctctcttgtctttcactgaattgaaaagccttgtatattgataggactatatgggctgcattctgaagtttctttcatcgcaaactgaccatggggtaaaccctctaagatagggggctggtcaatcccatgtatgttgacagggagagggagcgaacattcttatcatatcagagcaagccgaagacctcttccggaaaatcggttccacttccaatcttttttttgaagaaagaaaagtagcaagagaatggttcaagttcggatcgagtaacggtgattgaagggatgaggtgtaagtttttttttcaatccgttctaattgtaataagagaagagggaagtccgtctaaggaaattagtgaaggaaagtgatatggatgttcattagttaagatagaacgaattttgttgctttagatagaccgatgtattttctttcttcatgaataaaagggcaaagctttgatggtgtagtcgaagtccgtatgagtctttgtctttgtgtcttctaacaaggatacactacttaggctttaaagatcgtgttgctacccatatgtagcctacgaggaagaaacgattcgattcctctccacactacaagtggagctctaccaaggtatgagctctgatgatttggaaaatgaaggattgggattctttagattctttgtgtatggtcaagattatgtgttgacaatcaagcgcttggaaggattgtttggtttccccagtggaacgggaaccaagcccaagtttgacagagatgagttgaaggatttatggctcactattggaagctctataccgttgaattcttcgagatccaagagcaaccagatacgcagccttgtcatctggtactttcagtgttgtgtggccaatgtcttgtactctagagagataacatggactgtcaccaactcgtatatggagatgatcgttattgctcttagaggtactctccgccaaaccaagaatggtatgtctctccaagataaaaccaatgacacacctctctttatacttcttcgtatccacctgtgtggatacaaaagcttggctgtcaacaataaccacaagagagcacgaggcgctctttgcataggaggtgttgtcacaccgattctcatcgcttgtggagtcccaatcacatgtgaaggatttgagccaagagcaatgaacctcaggcatctacgtcactgcgaaatcctagagtttgcaatggtcggcgacaagcatcgttttaagtttgagcactctacgtacaagaaagccaacatccttctccctagtccgatactgaggttacacgcataatagagggacataacattgatttgaagcctgcacttgagaacctctattacgagaacgctcagccaacagatgaggatgttcatacagaagaagctactgaggatgagattggtgagacatatgaggagaagtatgattcaagcatgtatcatttcagtgagcatgtagctccagcgagagagagtaagaacttgagtgaagctcacagaaacaataacaagttacagaagtggtgcaagaagcaagacaagttcatcatcaaatgtctaaagactatcaagtctctgaaggccatgctaagctgctcgacttccactacatctattccgcagggacaacctcctcaggacatgccatcgaggagatttgacgagcctgagccaagtcagctcagacctgagcctagtgcgcagagagtctcacatgtccctgccagacatttgtcattcgagtcccgggagcacaagaagaagaagaaggctatgctcgcttgctctagcagcagatcacgccttatccattcgaggagatcaattcgaccacggtgctggccgccacagaggcattgaggttgagtacccacatgctggagctaagatagaacaaggcgactcttcaatgtcctgggagcaatcacaggcaactattgacgaccaactccgttcactcttcgactgaggtaagcgtctcactttaccattgtataataccatcgtttgtttatattttatttatgtgaagtgttttgtcctgagtactctcttccaaagttgtgtgatttaagtttgggggagggctcaggaagtgtgtgttgcattgtatatactctttagtctgcattcatcaaagacatagaaaaaaccaaaaaaaataataaatttcggaaaatgatttcgcaaaaacagagtgttcatattgttgcattgcatttaggattgagtatagagtgtttcatataggattgttgcatatgcataggggataatgaagagataaccttgtaagcatgatgattactaaatgagttattagttctctgatgcatttgaatgactttgaagtaaaactgcaccatgttctatagaaaccactcgttgcatgtcatgacacatttccttgtcaatttgaacttgaatctgacttataattaccatgttcgcataggttttgaacttatagatagaatacatacttggattttctttcacttattcaccactaatctaagtagctgcttctattattggagtagttcctccacccttaaccaacccttctttcaagccatgttattttgtgagagcatgtgaggcctattttcaggattgagcttggtagaacctgttaggtttgagccgacaagagtagtatcccatgtagttccaatccgcgttttcggacttgataggactaggtggaaacttatttggggattgagattgagtgtgaaaagaaaaagaaagaaaatggattagagtcatttggttaaggaagctgaaaatcatattgaggtctagtaaatgtttgggaagcatagaattgataagatatactctagaaaaaaatatggcaacaaaaacagaaaaaaagaaaaaaaatcataagagccatgagagtttaagaaaaaccaaattcactagactagactcatagagtttaagaaaagactcaccataagaacaagagcgaaagaaatgaaaagaaataagttgatcaaagaaagaatcgaagtatgcctttagtgcaaaagggtagacttaggatcatcattgagtttagagataggaccatctacttgttattcacgatttatgtcattgggttgatggggtgatattcttgtatgcataggttggcacttacctttagcattcttctaaagctccgtcctttttcattgagagtctcctgttattcaaattggaaccaccttaaagggactgaggtgtgggtttggatcataacagagcatggctaaagtttttaagtagaagtcgatcacctcgcatcttagaactgttagcttatacattgatcataattgtcttatctcatgttttggttatgagtccctaacttcaaacctcacctccagcttgttcttaattgtctacttgagggcaagcaaagactaagtttgggggagttgataagtctgcattttacttgttttaagcatccatttctcatcactttagcatcatatcaccactgtttcataccatttcgcatcatttgtcaacactttgcatgttaggatagttttgcatgcatatttgtgttgtttcatgtgatttggagctgctggtgagctaattgaagaagtgaacctgatcaaatcaacatactcgaccacgagctcaaataccgtcatccttgacttcctgaaatacttggccacaacatctacaactcaccactcgaccccctggtcgagtagaggacttcaccacttctcaacaccactcgaccccctggtcgagtagattccttcaccacttttcaccaccactcgactccatgatcgagcatcaccatcaccttcactcgatcactcactcgactacatggtcgagtaccaccatccaatatcactcgatcaatcactttgccaccaagtcgagtccaccttcattcaccactcgacagcattactcgactgccagcttcagagtcttctcaattccacactcaaccagacattcgagcataaggaagagaagaagactttggctcgtcactcgacccactactcgaccacctgggtcgattaccgttcttaatactcgccaatactgtgtcgttttgagtattagggtttcagaacatttctctataagtagcatgtactttatatattcgagactaagttttattccatcgacagtttgtgtgttcttcgcttttgtaatccggattcctcttaatctattcagtattcgcttttctttttactaagttgttcatcctgttatcgttctgttatcattatgttgcaatgatgtttccatacatgtcatcgtttacgttatctgtaatgaagtctgagtagtgactaggtttctgaggatgtgttagagtagtttagaatcctccgtctgttaggtggttgagtttgatttatagatcccttctggattagttgttcttaatgcctatggctttttgatcaattggaattaaagcctagacatttttgcacccaaaaggtgttcgacgaaatgtctgaaccactaattccagatatttgtggctttgtaccaaggtattggttacatggagcgttttggctttaacttgttaattcgtaatgcctgttaggttagttatcgtcaatggtgattgagtctgtgactagtttaacttgagggtctctgttgcggtggcacttagatttggttatcgaacttgttgtctagaggtagtttattgagcatgtcaatcacctttagattgaggaaactaactactcgattaccccatcctcgggaatttttcatccaattgatttctttgcttacactactattgttcacttgttcttattactcgttgcttagtttttgcatttcatacctgttatcattaacatactcgaccacacccagttgtctggtaacagactgtgcagtcgagtatctttgttacagtttctgcttgttactcaaccacaccgaatggttggtaacaagctgtgttggtcgagtgttttgattgttctgcttgaatttctgttttctgcatgttcactaaggactgctagaaactcaaaccctgttattgcttggcttgactctgtgaactctgattgcatcttgattgctagcatcacactcatttggattgacaaccttcagtactacaacgacatgatagtgctttaggattaattgatcttaaaaacctattatcaagctcatgtatgtgttaaagtctagttgttagtcgttgtaggcaaactcgatcaaaaggacaccagaatctgcttttcaacgaaattatcgaccgtattgctcgttagttaagggaacggttaaacacaaaagctatggctgaggatcagaacccagaattacgaaccaacattggtgcaggcgaggtacaaagcaaccacaatcagtgtaatggcattgtgcttccgctagtgcacaacaataactttgagatcaagagttgtctcaattccatggttcatggcaacaagttttacggcctccctatggaggatccactcgatcccctggacgagtttgataggctctacatcctaataaagatcaatggagttagtgaggatggcttcaagctcagattgtttccattctcttggggacaaagctcatcagtggaaaaagtcgcttcctcaaggctccattatacctggaatgactacaagcaagccttcctggctaaattcttatcaaaattcaggactgcaagactccggaataagctttccgctttcacctagaaaaatgccgagactttctttgaagcatgggagcgcttcatgggatatcagacgcaatgtcctcatcatggtttctccaaggcatcatggctaagtactctctacagaggtgttctcgctaagatcaggatgctccttgatacaacatgcaatcaaaatttcctgaacaaatatgttgaagaaggatgggagctggtagaaacttagcccaatctgatggcaaatataatgaagattatgacagagccattagagggaattttgatttagaagagaagcatcacaaggatataaaagctatgaatgacaagctagacaagctactccttgtgcaacataagcaagtccattttctcagtgaagatgaaacgttccaagcccaggatggggagagtctctaatcacaagaagttagctatgtgcaaaaccagggaggttacaacaaatgtttcaaaaacttcaagcagaacaatcccaatctgtcttacataagtaccaatgttgcaaactcgcaggaccaagtctaccctccacatcagctgaatcaacccaaaccctttgttccatacaaccagggtcaagggtatgttcctaagcagtagtatcaaggcagctatcaaccgcaacttccaccacgtgggttcgcacaacagcaacaacaagcttccacaactccagactcagacttgaagaacatgctacagctacagcagattctccaagaacaaacaataggagcaatggatctggccaaaaagatggaagaaatacacaacaaggtcgattgtaattttaatgatctgaacaccaaaattgaagtgcttacctctaaggtcagatacatggaaggccaaagttacatgacttcaagggaagtcaatacagagtccaaaggaatatgccactgctcacgccatcactatctgtcatgaccaagagcaacttgacatgaatctaaatcaatcactcaggacaatgaagttcaggacggggaggcttctaattggattgaaatcttagttgttgaactcgaccattcagctggatctcgccatcaaattcagtctaccttggaagagaaagcaaccatcatcgagagaatggtaaaccgattcaagccaactccataaccttcacgtgctcttccatggaaatttaggaaagcttggacagagagatacaaatctcttgcagagaaacaacttgatgagatggaagcggtgatgcctttaatagaagttctcaatctggtttcggaccctcacaaagatgtgagaaatttgatactggaaagaatcaagatgtatcaagattcagatgatgaatatgatgctaatccgtttcaagctactggtaagaggattgttcaagaaaagttggaagatcctgtatctttcactctatcatgctccattggggaattggctttcagcaattgtctatgtgatctaggagcctcggtcagcttaatgccactctctgtggcgcggatattataattcattcagtacaggccttgtgacttgaccttgatccttggtgacaggtattcaagaaaaaacccttcgacatgctcaaagatctgcccgtcttatttaatggagtagaggtgcctatagattttattgtgcttgagatgaaagcagaacctaaggatcctctgatcctaagaagacattttttggcctcagtgggagcggtgatagatgtcaaagatgggaaaataagtttcaaccttgggaagcacatcaagctgcagtttgacatcaacgaaactccaaaaaggccaacaaaagagggaaaaacctttgagatcgaaatttgatcccaagagaaggatttgaaactaaaggagtaaaagaaccaatcatagctcaacctcgaccttcagattaaaccacttaatcaagtacactctttgcgcctgatttgcaagaactcaaaaaaatgtcttatgtgcaagaagaaaccatagagaagctagcccacactgttgaggaattgaagagtcaactgaatcagatgcaagggaaagctctacctcaacgcgacattgacactatctctagaaaaagttcacttcagaatggtctgaagaaataaactatccactagaagaggaagaggcttacttcgaggaaaaaagaattgagtattctgctgcacatctctcaagggaggatgccgagtataatgatcctctcatgttactcattttcttcctaataagcctgagtcacgctagagactttaaacaagctcacttgggagaaaatcccatgactatccctgaatgattttttttgtttcttgttattttttatttgttttggttgtgtttttggttctcacgaacagaggaacagtttggaaatggagtaaaatttttaaaaatttactctaccaagcactaggggatcgagtataccagtccataggagtccaaaagtttgaaaaatatttctgttgcacccaagttaccttgcaatcgagtagaatagtcgagtacatgtgatgactttacccaaatttttaaaaaatcatcattattcttgaccaacagaagctaaagaggcttaaagaggatttactaagtttacacaggattacataatgttctgagacttttttcagttaacagggaacaatgcttcaggacaaatagacagcgtggcccaccacctcccctctttgttccccacacctatcaccaaaagataaagaatttatctcctttgcttctccaccacccacttacttgacttcaacttttaatcttttatatacttgtgttcttaaaggaaaaaatatcataattttaatacatgtttaatttaagttaaaaaataatttatttcttaataagataacttaaatgatagtagaagtataaataaataaataacatttatgtacaaaagaatcaaaaacaaaatattgttagtttgttactatatgtgagtatattaaaaccatccatacagataaacacactgcgcgggttaaagacctagtttatacaatattaaagtttaggttataagcttctaaagaagtccacatatacttttaaacgactaatcgcaattacacatgtcactaattaacatacgtagagtctaataattttctaattattagttataattgataaattgtaaatttcaatacaaattattgaatatcattggtttagagttattgaaaattgtaaatcacaaaaaacaatacatttaaaaacaacatttaatatgttttcttaatatttgtgtttttcctaaaagatcaaacaaaaaggggagttgaagtataaataaataaataacatttatgtacaaaaaaaggggataaattctttatcttttggtgataagtatgtaaaagaataactctcttttattatctttaggaaactctctcaaaacctaaagtctcaatctctctcaaatcccataagttgtatcacaacattgatacctccttatataacaaagctttaacctaatcttaacaattagataactcctaatatcataagataactccaaacaatatattctagatatctcctagcataaaaaagcttaatctctttttcctcttctttagtaacttactcctcaagttactctcctcaagcttatccaacattctccctcttaagcttgaactcttctccctttaagtcttgaactccaatgaagcttctcatctctttgaacttggatcgaccaagtgcctttgttaaaatgtctgccttttgttcatctctgaaacacgttccacttcaatttgaccattctcaacacattatctaatgaaatggtatctcctatgtatgtgcttgcttcgaccatgaaagaccggattcttcgtaagggcaatagctgatttgttgtcgatgcgtatggttacactctcacttgatgtacctgtaatctcactcaaaagatcttgaagccaaattgcttgttttgttgcctctgttcctgccatgaactctgcttcacaagacgacatcgccacagtgtcttgtttctgagaacaccaagaaattggtcctttgccaagataaaatatatgtcctactgtgcttctcccatcatctggatccacattatggctgctatcactgtatcctactagtcttggtatctccatgcttcgagtgaacgatataccaagtgtagtagttccctttaagtaccttaaacattgtttcatcgcagccgcatgtgattctctgcgactctgcatatatatactcaaaactcctacacaaaacgacaagtcaggtcttgtatgtagcagatatctgagacaaccaacgtttcttctaaaatctgttgtattcacttccttttcattttctgatttttccaagtcaaaccaatttccataggagtgtgtgctaggttgcagtctttcatcccagcttcttctaaaatcttgagagcatatcgactttatgacaatattattccttcattgtgttgagttacttctatccccagataataagtcaacttcccgagatcactcatctcaaacttagcagacatctccctcttgaatttgttgatcaattctaagcttgtccatgtgacaaataagtcatcgacgtacacaacaacaatgaggagattacctttaacttctttgcggtagactgatggctccttagagcacttcttaaaaagaagttcaacaagaatgtgatttagcttgttgttccaagctcttagggcctgtctcaatccatacaaagcctttttaagtttataaaccttatcctcttttccaaacttctcaaagccctctagttgtaagacataaactatttcctttagttcttcgtgtaagaaggcagttttgacgtcgaggtgatgaatctcccaactatgagctgctgctaagtcgatgagcaatcttattgtttcaattcgtgctacaggtgcaaaggcttcttcgaaatcaactccatacttctggacataccctttagcaacaaggcgacccttgtatttgtttatgcttccatcagagtttcttttaagtttgaatacccacttcagaccaatcggcttcactcaaactggtaagttcacgagattccatgtctctagtctctcaatagagttgatttcttcttcacaggcgcgtatccactccttatgttctcttgcttcataaaaacatctaggctcgttgtttagagtcaaaagtaacatctcaccctcctcttctgcaagcaatacgtaatcctcaaggtattttggtctactaacctgtctagttgatcttcttaatgcttgcagaggagaaacactttcacttgactctgttgcttcttctattgcttcttgacttgtctcagaattagaatcatcattttgttctggagaaatctgatctgtgtctgcatctccttctttctctttaagttcatgatcaccaaagtcttcaatcatgactttgaagcttccttctccgtcttgtgttgagtcatcctgtgtccagttccagccctttgtctcgtcaaagacaacatcacgactgaccactactttctttgtttgtggatcgagtaatctgtaagcttttgatcctgattctgtccctaaatgaatgagtactcgagacctatcatctaatttcttcaaaaactgcttgtctatctttgcatatgccgtacaaccaaagattcatatgtggtcaacgattggtttcttctctctgaagcattcatatggggttctatccttaagagctcttgtagcgactctgttgattagataggtagagtgtcttatggcttccccccacaaataattaggcatgtgcatatgcttcagtatgcttctcgccatctccaatagagtcctgtcacgtctctctacttcaccgttttgttgtggtgtatatggagcagtgagatgccttcttatccctgtcctttcgcagaaagaattgaactctccagacacgaactctcctcctctgtcagttatgaaagtttgaatcttctctccagattctttctctaccaaagctttgaagtttttaaacttaaaaaaagcatctcccttctcctttaacagcactgtccacatgtaacgagaataatcatcaatgagtacaaagatataacgatttccaacacttgtttttggtgttattggaccacacagatctccgtgtatcagctcaagcttcttggttgctctaaagacggtcgcttgtgggaatgactgccttgtctgctttccaagtaagcaagaaccacaaacctccgactcaatcactaaacttggagctccttggatcaattccttatcaatcatagactttagtgtgatgagactcacgtgtcccattcttgcgtgccacagacttgacatacttgtacttgttaggtataaacatgcttcctttcttaagcccatctttactttgtatagactattcctagacctctcagcttttaccaacagctttccttcttgatcatgcatagttagatatccatccttcaattttatttcacatcctgactcagtagcttgtccaaggctaattatgttgctcttgagttcaggaataaaatagacatctaacattactcttggtttaccattcaagtctatgaaagctattgtgccctttcccttaatgtcgatgcgtgaatcatctccaaagcgtattttcccggtaatagaatggtccatcttgtcaaagtatcgacgatctcctgtcatgtggttactagctccgttgtccaggtaccaaacattctctccatcaacgtttgtttcaaaactgcttggcatacaactttgttcatttagataaaccacttcatgcatcataagctcatccgcgacttgggtctccttattgtcattttcttgagtttcctgcaattgcaacaatcgatcaggacaatacgaagcatagtggccgatcttatcacatctaaaacatgttatatgtgatgcatctctgccaccattccgtcctcgtcctcttcccctataggatcctcttcctcctcaccctctgattcacgtttacttgagtccatacttgaatacaaaagctt

SEQ ID NO: 198 - DNA, 76183 bp, Arabidopsis thaliana
aagcttgagtggtttcagtttgtggcttaagttattggctcatcttgagctattatcagaaattactcatatctcataactcatccaattgggtaactcatcccatacgggtaattcttaatgccaatttctgaagctttagataattatgttttagctttcagtattgttatgatgaatttatgcagaaatcgagtggcattagtttcttgattgcctatatatgacgctgtaaaagttatataacctctcttgcagtcgctgtgtttcttctcattagcagcaagctcttcagatagtattgcttagtaaagccactgaatatgcccgtcaaggtacatcttcatcacactttttatttagtcagtcacttattttatattatagaaacaaaacaatatacaatatggcttatgtgatgttcattgacttaccagtcacttattttatgcagaatggatttgaatattatgcaggagttaaaagttcttaccactaccatggctttgcaaaagtttacctcttggaaatttgatccaagagtagcaaacctagtccaaagtacttgctgaagatgcagagtcaatcaatcggctgatggcgatcagagcgttgatgaatttcaggacgctgcatcgggtttcatcagacgcttgatttgcagacatggatgcgagagcaaacgtggcaagctaaggctggaagttgacttggcgtggtgtcaaagacaagaattaccaaaaagatatggaagatatcatctcgaagatttaggaaggactaagcttgaagaaaacaagaaagattccttaaaacgagattctcggagatcctaggtttagggttctggagagtagatatatgtattctagagtttagcgtgaggcgttttgagcactctagaatactacgatacgattgaaaaacttcagagcattgcaaaagcttgaaggtgagtgtgtaattctctttgtcttcacgtgagagtgttaaaaaacagagaagagaattagacttagatattcttagtcgggtttgatattttgggtagaatagatcaagtaatctccgagataacatttgtaaacaacttgttatcaatacgaatatagttataagcaattctctgtgttgtgttgatctctttaccctttaattggtatcagagctgacacctaacacaagtggtatctgttcaacaggtgagatcttgctacagggtaatggagaaatcacaacagtacgttacaatacaacagccattgaagttggatgctgagcattatggctactggaaggtgtctatccgataggctatccaaagtgctaaaatggatgcgtggttcgcagtggaagaaggatggaaagctccgatggtcatggatgccaaggggttagaaataccaaaatctaagaaggattggactactgaagagaagacagctgctaagaacaactcaacggccttgtcaatcatcttcagatcattgccaatgagtcaattcacgcatgtgcaagggagcacatcagcaaaggaagcatgtgacattctagaaacaacctttgagggaaccagtaatgtgaagaggaccagattggatattttagcgtctgaatttgaaaacttgacaatggagaatgaagagtcgattgaggaattcagcagtcggctgagttcaatttcctagtaaactgtcgtcttgggaaaaacgtacaaggacaagaagctggtcagcagtcggaaccaaggatttggataaacttttaaccatgggcagaacgtctaatgttacgtggggtcttggatacaatggaggaaatacaaaaggtgagactcagtttgtcaaaggatccacttcagacgataaatctcaggtcaaacccacaaccactgttcggaatctgtttcgctctaagcctaaacgagcatctcaggcttacaacttgagacaaacttacttcaaacctgagttcagaagcaagagaacaggatgctggtactgtggaggtctgagtcactacaaagcagactgctacaactacttgaaacatgttgttcagactaggaggaattatcaagtgggtgctcaaggacgacgagtcagacaagtgtatgtcaagaaagaacatctatagtgtcatgttactcaaacatcagcgaatgcagaactcaaggatctgatgtggtgctttgatagtggatgctccagacacatgactggaacactagacaatcttgctggatataaggatgtgccatctaggaaagtcagatttggagatggaggtcatgccttgatcaaaggaaagggatatacttccggacaagccttgcctcatctaaccgatgtatatcatgttgatggacttaaggcaaatctgatcagtatcagtcaactgtgtgacgatggtttgagtgttttctttacacaaacggaatgcaaagcctttgacaaacatggatttgtaaagatggaaggacaccgtgctgcaaataactgttacatgtggaatccagaagagtcatgctacactgcatcacagatcgatcaatctacttcagaagatcaatcgctagtgtctctgctagaatctgatcatatgggtgaagccatgagttcggttcaggagtttaccatatacacaatgagctggcaggctccattcaagttcacaatcaacaaggtatgcaattgtttagcttggtatctgaccagtctgtatggcttacttgtctcaggtggttggtgggaaggtcagctgatctcaggaaacaagcaatctcagttccagttcctcaaacacacggttcacgtcatctcacaaccaatacagtgtggaatctcattaacactagtgtcatgaatgagattcaagggggaagagtgatcttggattcttcgtgtgttaacaattaggaagatgcaatggagtgggaactgaacttacttaagtctgtcaagctattgggatctgatatctgcaatcagatcattgatgaagccggtgttgcaatccgtcttagacatctgctgttggctcagggctatattcggatggaagacgagtcaaagattgatacacatcttgcttgatgtgaatctatcaggtttctgctaggatgtgtgtgtgcaacacagttctatgtttatcagatggtactccagaaagggatcttgagtagtgaaccccagagggaatggtttgagagtcacccaagagcattcggtgttccgggacatccatactcggctcatagattgaaaacagttgtctactgcttaaagcagcttccggagaaaatgtgttgtatggctcgacaaatcaaacacttgtacaagcttttgttgaacttattaccagagagtttgaagtaagtatgtacggagttctgaggtacatgcagggcatacagattaagcaaactgatgagggcatatctatgtcgcagaatatatacgcaagaacaatgattgagaagttcaaactggatgcacaagagattgtcacaacaccgatgaagatctcgacaagacttactgcagatgagagaggaggagatgtaaatgttagtatgtatcaggggatgatcgagagtcttcagtacttgactgtgagtagaccagatatctgtcatgcagtgaatgtgtgtgctcagtatcaagtcaaccccaagatgtcgcacttgtcagctgtaagaagaattctcaagtatgtgaatggtataccaactttcgagctgtactacaccaaggacactgacaatagactgaagggatattgtgctgcggattgggcttgatctttggatgacatacggggatcacttagaggatgctattttgttggaaacaacatggtgtcttggaagagcatgaagcagaacagtcagcttctatcaactgctgaagcagagctaagttctttggagagttcgagttctcaacttgtacgactgaaacagctcatagaggagtgtggtatgatctctgattttccagtactgtattgcaataatcatagtgctatacattgtttccaagaacctgctaggaagtctcgtacaatgcacatagatcataaacataactatattcatgaattggttaaggagaaactaatagcaattgaacatgtgggtactaaagctcaactagctgatgtgtttatcaaacctctgatgtctaacaaattatgtactctacgaatgttcattggaatgtttgaactataattgtgtttgagttgtgctgatctagaatagggacctgaagcaagaacaagtcatggaaatccaaagatgcatagaggatcagcacttagcaaagtcatgtggaaaatagttgcatgtcatgccggttcaaatcagacgtaaaaagttgtcgtctaacaggaggttaaagagctgagaagatcaacaaactgaatgaacttggtacacaaaaaaaaaaaaaaatgtgtatcaagttcaccaggttcgaatatcaagcaattgagaagtcaagtgatattgctgatataacaaaataagggagtaattcaaaagaattcatatcatcacgcccctgtttagtcaaactatcttcaaaggacattccagctgcctgttacacgttgatctgattcatgagagctaaaggcatgacagtgtgaaagactagccactgaataatgagctgattcatcaacgatctgattggttatgacagtttcatgcggaagtcgtgaacacctgattggcacaaagcacattttcaagtactaggaagaggtaaactttgaaatcagtgttggaaagcttttaccctcatgtgtcaattagctgtttaggtcactaaactagttcaggctataaaatgttcaatgttgctctgaatgtgtttgaaatttaatcacgtgtttgattgaaaattctcttggcaaagaagcacttatgtgtttgttaagtgtttcagaatattaaaacagtttgggcccaagcctgtttcaagcccacagaatttcaaggaggagtgctcgagtattggagggaaaaagaggagttagggtttgaggagtcaaatcaatttcttatttggaagtcgagaaggcaatcccctgtgttcaacgcaatttcgagtgagatcgagcatgaaatcacttctctccggtctgcaacgcctggttcaatagaaagccgagtccgcatcttctgcagacatgttcggtgcacaatctagtgattcgttgccagagatttcacggccgactgcaacagaatgtcaagaggtgaaatccgatgaagcactcactgaacccaaccctgattgggctctagttctcgtcaaagacccatcgcctccactcatcatcgaggttgaggatgagactctgccttcaatcgacagtgttcagaaccctaaaccgaaggatcctgaggctaccccctcgcaaccctctgttgcatctcgattgcgcaagaggaagtcatctgctgcggatccacgcatcaaaaggatgaagcagggaaagggagttaccggttcatcttccttcgatggaattcgatttgtctctacggaggctgaaaagaggtatgctcaattctctcaacgaaatttcattgaggaagtagaactgtctaggaagacaaatgaggcagctagggagtttataaagcaggcaggactgattcgaacggttactaagttcaacccgttcactcagaatctagtgtttgagttctgggctaatctgcccactatgaaggtagacacgtatatggtcaaagtcttggtgcgcaatcgggagtatgagctctcacctgggaagatcaacgagatgtatggtctcccttctgttgatgctagacagcagcggatggatatcgctggtctggttgatgaacaagtggctgaatttctcactggtgggaaagtcagtgttctgagcaagcttcaggtgagtgcctttacacctacgagtttggaactgtttaaactctgctgctcaaattcgtctcccacatccaacgctgggtatgctcagcctgatcgattgtatattacatttctttgattgagtatttgatttttgactaagttctgtgctcaagcagggggagataaggccccttcggactccgttgatgctgggggagattaagttgtgggggagctgtgttgtttaagtttttaattgttataagcttcattgtatttcagaccaaaacagtttcttttgtgtttttgtttaaaccgatgattatatcatcgtaaacatgggtctgtaatatttttaacacaatgtttactttcagactaatcatttatgctagatgatgtttctagagtatgtgtgttatgtctccgatttgagtttcaggttatatcaataaaggagtgcttgagtatcaaactcagtcaaaaagggggagattgaagatgcggagtcaatcaatcagctgatggcgatctgagcgttgatggatttcaggacgctgcatcgggtttcatcagacgcttgatttgcagacatggatgcgagagcaaacgtggcaagctaaggcggatgatgtggagagccaaggatgaaagctgacttggcgtggtgtcaaagacaagaattaccaagaagatattgaagatatcatctcgaagatttaggaaggaataagcttgaagaaaacaagaaagattccttaaaatgagattctcggagatcctaggtttagggttctggagagtaggtataagtattctagagtttagcgtgaggcgttttgagcactctagaatactacgatacgattgaaaaacttcagagcattgcaaaagtttgaaggtgagtgtgtaattctctttgtcttcacgtgagagtgataagaaacagagaagagaattagacttagatattcttagtcgggtttgatcttttgggtagaatagatcaagtaatctccaagataacatttgtaaacaacttgttatcaataaaaatatagttataagcaattctctgtgttgtgttgatctctataccctttacttgcttcaagtttttcttggagactaaagaaactagtgctaagccgcaaaatatgccgcttgtttttgccttgatgcagtattatgattctaagaagtctgctttttgcttcaagaatttcaaagttgattttggcctagaagatgtcatgtatattacagaactctcaatcaacgacagacatgcttataactttacttcattacccgattgttatttatcaaatgctcaatttgttatttattaaatgctcaactggtacatgtatatggattagagagtagtgatgttatagatacaatcactacttatttaaaaataagtacaaatatggctgaagagttatttcttaagaagaaaggaaaatccttcagcaacgcttatggaaagctgaaatcccagtttgaagtagtgctgatgttgggatttcagctttctttttatattatttatcaaagttttggttaaacaaattgtacataattcatatgctgataaatatgaataaactgatgtctttttgtaaaaaagtattttttctgaaataataaataaaatttatatatgagcagttattttatttaaaaaggaaataaaaaagtttagaatttgaaaataattatgagcagttaatttgtttttttttttggatgaaagtttaaaatacttggattcacccctaggatttctttttattttaatcaatcagaatctgccatataattaaaaaattaaactcatttaaatattaaatttaatctctaaccagtattttataaatccaaactgatatctaatctcctttaattataatatctaatccctaattatcttttgtaaacccaaaccggtattttacctcttttaatcgtaaaatttaaatatttttataaacccaaactgatatttaaatataaatagctatatctatcatctatggctttcatgcaaatatcaaaaatattaaatttcttcttaatctcacttaaaaaatatcaaatttattttgagtaaatcaaaattcaggtttatatagattgattgttttggacaaagaaaatcaaccttagtatatcttctcttgttgcattataaatctcgggtttctctacgtttgattgtgagtaaggtttcttggttacatgtcatctcttcttcacagcctctttataaaattgacaaaaaggtaatattaaaacactattagtcggattataaaatagtgttataataggatgtttcacctagaatgtttaataaattaaaaagtattatatatatctatcattgtattcagttttgtatactttaaatttatgaaatttggaatattatggttagtgatatttgtatattactatttatagaagacaacatttctacgtttgacaactacattcaactttaacaactacgcacggtatcttttgtttaatcaataatcaaatctcagttctgtgtattcgagagaaactctacttcattttcattatatttaaacatatagttgtatatcatgtattattggaatcaaataaatatatttagtcttgtcaaaccatattttgttaagtatatgtagtttcctcgggttgtagcatggaaaaaatatgtctaagttggtatgtacgtttgggaatgtaattgtatattttgtatatataagtttacacatagtagctttgtacgttttcgtgtatgtaattaatatagaagtttaacaatatctcataatcagaaattttctaattttatatatgtttatatttacagaatgtgaaactaatatttgttgataaaatattaatgttatatgagacataagccatttgtgtaataaatagattttactaattttgcaattctgatagagaacgacgaataaataaatatttgaattagagatataaagtaataatacgtaatatttagtaacattattatttattttaggatgaataatattaaatttagtcaataatagcgatgcgatattgtaagatatcaaattttagaaggtattctaaattcgaaatatgtagtttttttaaccaaaatcatacacaataaataacaaaacgaccattaggccggtaccaaaaaaaaaatagaaacttgttcatacagaaataaaaataagataagaccgagttcataaagataaacacaaaaacataattttaagtcgatgttcaaccgccattccttgcaccttcatcacggagcctacaaaacaaacaaatgtggcatgcaattatcaatagtaatattatattccgtttatacaattactaataacgaaatgtaataataaaagaatatatcaaaacttacatctcatggatctcgttagactcggggaaatcaggatccggaaagacggttgatttcgggcatgcggcgcaaacacgtacgttctttggaccatcaaaataatggtcaatcttccaccatccaagaacagcgacaataactccaccaccatatcgacgataattatgatcaaagtcaagagcttcattcttagtagctagacatttcaaaacacgatttctaaacagataatcaaaaatagtattagaacagtttaatttaggtaattcaaattaaactatcaaagtagaaaacttactcattgtcacttattttgaaagttagcgtcaatcatcgacgtggttttgcttaggtcttgtgtttatcatttctccaacatcatagatcgctcccaccaagtctccaaaaaattacagaaattaattaaaataaatcagagtcaaatatatacaattgatattgaaaatgacaaaactaatgaaatactaagatgaatgatataaaataatgcacacaacaaattcataagaatctcaccaactaaaacacatttatcgatttcatcatcgataatcgaagagaaggatgctagacgatagtgaggaatagcgggtaccggacttgttaatctgacaacagtgtcaacagcaaatccaattttgaaggtatgagttgttggcctgacaggacccgagttctcaacaattccaaaacttgttatggttacccattctccttcattaataaaatctttatagtgatccgacatcttgtatccaatagtagcttcaatagtcataccctacggatcaaatatactaatcaaaactctaaaacatgcaaacctaaaattttcattacaaaatagtcaaaacttatatgttggtcgacgagaatcaaacccataacctttgaagatggaaccagcggaactaagaatgtcctcacaactctcacacgaatacaccatcctgtaataggcggtttcaacagtgtaagaggatgaaacgattccatctttttactaaaatttcttagttattttttgtattcgttttatgagatgctaatgataccgatatatatataagagagacgaaaacaccgtagaagcatgttagacgcaactttcaaaaaagtaataatagtcatgacgtttcaagtcactttgtatttttgaagattctgtaatatattttgaataactcaattattaataaaattaaaaatttgacgggtcttacattttagggaaataatataaatattttatcgttatattaattggagttgttatataaataccaattgtcttaactgcgtggataaattagtaacaatcacaggatactataatgtttgagacacttaataacaaaattttaagaaaagttaataattatggagagaaataagtaataaatatttttaatatttttaataatgaaagtgattacaaattaggaaacaatatatatgaaaatatattgttaacaaaagaatctataatttaattctattatggcacaatataaagaatatatattctaatttagtttatctactctattattgtgcaaattggaacacaaactaaaggatgcttgattaagagataagagttgaaataatttatgttttcaacttagaagattctctaacgttttaacttttaaggacataattctttggacaaatcttctaataaactctaaggtttggtttttgtttttctttgtttaatagtatagatatctaactcatattttagtatacattgtaatcaaaatttgcaatccaaatacattgtgttaaaatcaacaaaatatcaacataatttaaatcaaaataaccgaataattgaccaatctaaaaacagttataatttgatctaagtttacggaactatagttatttagtaagcattaaattaaggaagcataataaaagttaatgtttaacagaaataatgcataagaaagtcaataaaaacataaacaaagtcttaatagaaaagtttttaaacaaaacgatagataggggtctggtgttgaatctttagttctcatcaacaacttcacctagctcaggtggctgcatccgttcaaggaattgagttctgaaacagtaggaaaacaaaaaaaataaaaataaccaagactaaaatttctaaaattacaataaacagttaagggataatgaaaatataaacgttcttacgtgatgcgatccatgttaatctctgggtaactttgattgaatgtaatttttgaagcaccattatgtgagattagacattgacgacctaaaatattaatgtttttattatatgaagtagctatataaattattgataagataagatgagtcttaaatataccttcatgatcatcaacattccaaaatcgtagcacacagtttgtaggattcataccaaaggtccactgataaccaagatctagaccaagttccatccacaattgcacaaacaactcacaagtatatcctcttgcaacacatatcagagactttcccctactaacaatatcaaattatttcaccaaaacatctaagtctatgaataaagccaactataaagataacaatatttactatgtttgtgcatttaatatagaaccaaatagatgacgaactatatagtggaaaatactaaccaagtatttttaatctcaaactcgagaaattgagaaagtataggattttctgaaacttgaggaacaaaatcaggtcttgttatattttcaactctcacgacaacaccataagcatctacaaaaaaaaacgataacatgaaagataaatatttccaaataaacagacttaatattttttaaaaatctagataaaaaagttaccatggacaattgaagaattaattgtcttattttcgatcatggagaaggcagcaaatcgaaaaaagttacttggaaccaatctatccacaggagacagtttggtagtttgaagaaacttgattctcaacttattatcggttaagggacgttttctaccgacggctgatttgatcagatgtatgttttccaagaaaaaccaacctcctttatcgaaaactctagggacgtcatatccagggtagaaataaggacaaatggcatcaatcattgtgccctaaaaaaaaaattgacttataaattattaatatattaaatccaaagaatactttttaatttagaattaccatcttatcgcacaagatcatttggtatgacttcccaccctcatgaggaagtgttacccaccaacatagtatcttcacaaaaaccttcaactcttttcttttttggcaaacttgagagagatatgagatacctttgtaataaccacctctatcatctctctacatatttttgttttttttgaaactaataggttagaagaaagatgtcgaagataagtaatggacataaataaaggaggaggttttctttttttcaggttatgtgtcctttgactatttagaatattacttgtataataattttacaaaataaataaattaaatagaaaaagttaaatgtcatgcaaatattgtcaatcgaatttggaacctcgatggtaaattatagtgctttttatggttacttgcgaattttaatgaattttgtaagaaacaaaatgtgacataagttgtcatatctcttggatgagttgtcaaatcttgttatcaatcttagaaaaaatggtaagaaaagatgtgaacaatagatttaattgaaaaagcaagtttcataaataaattgaattcaatatagatgttaatatttgtatctactcaataaaatctactctattattccacaaaatatgtataagagcacaatatatttataataaactgagatcatatatatagatatatatattatattcctcagaaattaaattttaactgttatatgtgtatcgattatttttaagttacaaaggtaatgatgtgactttgatctatatccaaaaagaaactttaaaaagagtacctaagtttccaaaataaatattattttaatatgagagaaaagataccgaaagataatgcttttgcagggttttaaatataaagagtccaaatatttatttttacttttttgtataagacaatgacattgagttgaaaagaaatgaacttaataataaatgatcatgatgtttccaagaatgatttatctcaaagtttttaatgttttattcttggtacccttccaattttcttaaaaatgtaaaaagaatcatcaataattatatgtcaaaaaaataaattaaatggatagtattttaacagaaataaaaaaatactacaactatacttttatgtaatcgttgcaaatttatataggagtttgtttgtagtttttttatgtcatagttgtaaactttgttaggagtttaacaaaacataagatagataaaaatcaaacgggaatagaatacttaaataggttcaaaacataaacaaatttgaaaaaaaacaacaacttaaaatgacaaagtttgaaggaaatttaaagaagtttgaaacataatttaaataagaataggagctgcgaggtcaaactcctaattctcttcaatcacttccatccttgggttctctggaaggtcatcataatcttcgaaaccgcggccgtaaaacagaaaaaacaaaaattgtattgattaattgattttatggttaaccaatacaataaaaaaatgataaaattcttacatgtagctttgaatatctatctcagcgaaattggttggattgaggtaaattcttgaacatccaaattcactcttcaaacattctcaccttttccaaaaatttcatttaaaatgatataataaaaatgtcaatcataagtaaataggattacaatagaaacaaaaataactaaccctcaatatcagcaattctccaaaacctcacaatggcaacaatgggctgatatcttgattcattttgagaaatttataagtcgctgaactgatacattttgagaaatttataacaaagagttcacagcatcttccaacagcatagcatttcattttttctcccctaaccaatatgacaaaacattagactaagcaatacattattaagctaatttttcagacaagagacacattactaaacatacttaaaaacactacaatttacatattgtccaaaagtttgaatgagacatatcttgattcatagtcggtttcaccgtggcgacaaacaaatgaaaatttcttaatagccgagatatttgtcaccacacccattgcacctaagtatagaataatatattaatagcatagttcaaaaataataacataaactactatcaaaaattcattcttaaaatgagaagaacatagattgactaaaaacttacccgtgacataatcccaatcctcaagacatggatacttaaggtcaatgagaaaaatgaaatcaaagaagtcattttcacccgttccggaagagggtaaacacttgtttcccaaatgaacttgatgtggaaacgaaaggaagaatacctaacccttgcttgaggaaaaacgacccgaaagtgagagatgtgaatccatgtgtcaggcttgagaaatggacggaagagattgtgatagtttctatgaggaattgttgcaccaacacggttattctgaaaaaaattccaagcaactcaaagattaaatagtttgtgatgatctgtttcaatgataacaaagtaaattgggattaaaagaaaaaacaaagggaaaagacaaaccttgtcatcatgaagaatcatggtcgtaatttcaacatgattgtttggaggatgattccaaattgacaggatcttgacgttaatcttccagttagtcgagttatctctcaaatcagtgagtttgtgaacagacatcatgtgtatccaaggaagtttttttttttttcgacagataaagagttaaacctaattgtgttaggcttgaaatttttgattttatataattgggaaaagatacaatgatggaaagttaaagtgtaaaaaggaaacgaatcgtcaagaactagtaggatttcttataggttagaacaataatgatgacatttatttcttaacgtgttactaaaaattgtaattattaaaatgagagtttatgaaaaaataggaataggtttgttttgtttgagttatcatgattaatcatatttaataagactgattatttagtgtacaaaatctttgctaattctgattttgtagaatatttaacacaaaattagcaaaattgtttatagttcttagtatgattaacattataatataaaataatgtgtttcttaataataaacaattttgttttctgaaaatttgatgtttttgttttttttcttctttcatcaagattgatgttctaaatcaacatcattaatatttttattgttaaccaataaaagaagagagaaatataactaatactatagttaaactaacaaaataataataattcatgaaaagttatttttcttaatttgtgtcaaaattctacaacataaaatttggtggaacagaaggagtaatcaaatctcagttctgtgtattcccaaaaactgagatttaacaaaacgaaacgacatataattgaaataattttattaattcccaaaaaaccaaataaaataaagatagtttagaacttaaaaaaataaaacaacttcgataactttaagcaaataaataagaaagaagaaaacgatccaagctggattagtcaatgagcatcattcgccggagccttcctaagacatggtaatcttagaacacttcttcctacttgtggaagcctgatcatttccatcaacatcatctgaatcttttcgttttgatgatggagtagaggttgacgacaaatccacatgagaaaggtcaacaccattagtaagcataagggaaccctatatgaaaatacataaacatttttaaaaagacaaccctaaaatataaatataaataattggaattgtttaatgttatttgacaaacctgttcgatcgaaattaaggatgatggatcaacgtatgcatcagtcttcttgaacgatttcatcagcaatgttaccggtgtagactcgggcaacagtaaatgaatcatatccacctaatatgttttccttttggatgcacaatagaaactgaaaagtcttccctttcaaaccattgatcacatcatgcaaaatagttgggtcttcgatctatagaaaaatatagattattataacatgaacgttgtcattttaatgaaagagtttatttttaaaaaggcattatacctcatcaaatgacccatcaagcaattcaggggcagtagtgtcaagaagttcttttgcatgactatcgaataacatgtatctagcttcaccggtttggtccataatatggagatgtaaccaaaacctaaaatttaaataggattattagcttccaaacaccaaattataattcaaaatacattcaatataaagatttcataaagactaacttggcaacaacaaattttgcaaaaccaatgcatatttcacaccaaaatcttggcttttgaggtagcttgatatcttcaagtttgataactttttctttgacaactttcttgttgtgagcacgacaacaaaaatagtaccacggctaatctgtatcaattgccgaaacagtgcaaactgttttgcagttacccaccttcaaatgaatataaagaggaattcacaaactaagttaaacatatgaaaaatgtaataaaaaggttagtaggtaaaataaattaatgaatagtatatcagaagatgtgaggacttccttgattgtttgccttggataatcaccatcgtcatccccagttcttggtgcatagagcctcttgtgaaaagattccgaacttcccaaagttaacccatcggttggtatgctatatattaaaaaaatatactttgtttaatattatgtagaagcaaatatatttagtggcaaataaatacaattacctttgcttaaaaaaacccaactcagccaacgtgggatccacgaagacttgtaaaacatcaaaagaattggaaacactccagctatctgttttataagtaaaaggacatgtttttaaaaatagtatagatatgtagtaacacataacaatataattaccgttgtagagattgatcttcgcaaatcggattaagcaaacaacaataaacatatattatctattacttttacaaaataaattgcttatataaacccacagataatttgtttgtttgttgatataactaaatatatttttcttacaaaaatcatatgaacttcaatctaattaaaatcatcaaagatccaaggataacttctattttttttttttcactcatcaatttaaattcctgtactatattttatactaatggttttatctttgtaggaattaataaaatgagttttgttttaatcagagttattttcttctatatgtcactctatttaagtatgagtgttaggtttcattctaacgattttattctaattttctattttacctaaatttaattttctattttacctaaatttaattttcttgaaccatatgatttcgtttttttaatcttaaggaccgtttgacaaaaaacaaatcttataggaccaaatttttttaacagaattctttttaagttgaaaaataatttaacctcaaatcttaaataaagtaaacagtataacgatttttatataattatctattgaatcccaaaaagtaaatataatgatacgtatattaaaaataaattacaaaacttatccgagataagaaaaaggtaagaaatatatatttaaaaaatatgacaattatttattttattaaatattgcatatttaaaaacaaatacatgaatatattagaaaataaccaaacatctaaagtagataatggaaatggatcttttcaacttcattatcttgttgtgccatgatttgaattgatatatttaactctccattaccaataaacctgaaacttttgttataaccatcaaaatatgaaaatatgaaaattaaagaataaataaaaatattttagtttggctttaaaaatatacaaaaatgattaatatatatatatatatatatataaagctttctaaagtaaatttagaatcaaattcttgatttttaatccttataacaacataaataatagacacataaatatagttagaagaagatgagagaatattcatacaaaactttatatcataaaagaaataaaagttttctaactgtatttgacagcctaaatctgtcaaagagattttattgattttctacgaatccaagaaataaaaggcttctttactgtatttgacagcctgaatctatcaaagagattttattgattctctatgaacactaatataagcaatagtctactccctccgttttttaatctccctccgtttttaaatagttgacgttttaaatttttttttttctttcaaattagacggcgttttcaattttcaatgtaaaatatattgattttttatgttttaaaaccatctctactctgtagtacattttactattggttgaattgtggttagctactttgcctttacaatgctgcttttaagttttttacctcttctcccactcttgttctttataatgctgaattcaggtaatgaacttaaattctgaagaatctaatgggtttttcactttaaataattttgatgatgacggagttaatcaataatatattgcgaggttttatatatgatatatatagtaggctttgaaagctatatatatgatagatatagttggatgagaaatataatagattacatcagagacctatttcaagttttgaatatattgaatattaagtatatagatgagccatataattgaatgtattagagagctatatgaagtttctagttagctgaatacaaactacaaaaccctagtataatttctaagatcctatgtagaaatagcgatgtatattaaaaataatcaactatattatttctaaaaacttttaaaaataatcaactatattatccccaagactagtttaataacccgcgctttgcgcggtcaaagcagtgtaacaatatatttctgcaaaattattgggtgacgatgacggtgaagtctttgtcgacacggaacgcttttacgcggatgatttttgtgattgagaatttttgttaaaaacttaaaggagaagttgaagatgcttgaaagatgtgaatggctgttccaattataatttgtagttttgagatttaacaattttgtattttgtttgcttggatattttagagatcgtgggggagatggggaagaataataatttgtttattattattattatgtttttttgacgtaaatgtggataaaaagaaaaagaaaagtaaaagaatagaatttgagacttacgacatgtgtcaaatggagagagctgcagttatttggaaagtgacttgtgatttataataataggatttacgacctaattggagtttcaactaatcgaatccattgtgggttgaatcaaaacaaatgattaacagttttttttcttttgaatttttggatttcaaatcatctcctctttcgcagaatagaaaaacccaactcttttttctctatttatagttggatgagcaatttaattgaccacatcagagacctacatccagttttggatatattgaatattaagtatataaatgagcgatataattgaatatattaaagagacgatgaatccaattaattctaaagaaactgagtcaatttatagggaaatttcttttatttatggacgcagtaatttatacctctatgaattcagaattattaatttatagagagattttccttatttgtaatttttaaaaacaactatttaaaaatttaagattttacgtcataatcaatattttctataattagttacaaataaaaaggcaattatcatgtctaatatataatattccaaattttcaatacaattaaaatactataaataatttccaacaaaattaatgcaaatttaatgaaaaatgcaaaacacaagagtgatatttcactagatgtttcatactagatattaaaccgcggtactatagatatatgttattgttttgttatatttaaatatatagtacaccgcgagcctataatttttactaataattaaattatcttttttaggatgatctatagatttatgttattgttttgttatatttaaatatatagtacactgcagaatgatattttataactaaaaaactaaaattttaagttttatttgttttgttaatattgtttgtttagtgtaagattgttttttttttgtcaatccatctcaaatatcatttagactaggtttaaaggatacaaagatagagcagatttggccagagaatcagctaaacaatttgctgtcctgagaataaatttacaagaaaaagatttgaaagaactactaagaagtagaatgtcagaaaggatactatgaatctctacacacagagatttggatacaatggccttgacaaggacttggcaataagattttagcaccaccgaacaatcaataaggtgagacgctgccatcagggctgaacgagcagccagagcctccgcaacaagcagagaagacacatgcttacaacaggtagagtgtttagagggacgacatgcgccactggataacaaagtccatcctaatcctgcagtttgagcttgggaacagtacgctgcatcagagttgataatcagagtggagcggatctcttctcttgtcttatgctgtctggtcgggaagagctgaggtggaggcataagtttcttctgttgagcagactaccattcttttgcatccaagatggccttaatcatgatttcctgctcagaaaacataagcttttcaaaggttagcttgtttctagctgtccacagattccagcaagtccaagggtaatggggtccgctgcctaatcctgtgggaggaagacaaatcttctttttccaccaatccaagctttccttaacattagagagtggaggcaattgagcactatcgataggtgccaatttccatactctctgggcgaagggacaagcaaaaaggatatggtcaatagattcaagctctctgcatttactgcaggaagattcaacaaagattttcctagacataagctgttctcctgttggcaggcttcattaaaagctttccataagaaaaatttaacttttggagaggttttcacggacaaatcacactaaaccagttgacgggtccctgaggatgaagtgacagatcctttagagcttgtcgtgccacatgataactggattttgttgagtagtatccatccggattaagtaaccagacttgtctatcttttccctgcagttggcttggtttgatactgagaatatgatctgctagcactgggaaagttcgcttgatttttccttcatcccataccaaagaattagagataaagaggtcccttactcgccagtttcttgaggtcagaggggccggtcccataggctgagtctgctcattcaatggaatccagcccagttgtttcacaagaatgtctcttccgatgaggatgcttcgccaaccatgagaacaagattttacacaagtcacctgtaaaatactttcctcatggcagtacttccctaacagaatttttgagagtagactttggggattttgcagtattctccagcttatcttagctagcatggcttcattaaaagcctgaatgtcctgaaagcctagccctccatccttttttaaagcagtcatcttgtcccaggagatccaacacatctttttctgattgttggaatcccaccagaagcgagtgagggtggattgaattctcttgcagagagagacagttgaagttggaagcaggacatggtatagttagggattgaagccaaaacgctttttagcataaccatcttgcctgctccagagaggaatctgctagaccaactgattaacttttgtcgaatgcgatcaacaatggaggagaacagatctttcttctttctcccaaagtgttcagggagtcccaaatacttacccagacctccatcgttgataatactcagccattgtttgacctgaagctgggtttcatatggggttcttctggaaaagaagacagaagctttttgggtgttgatgagctgccccgaaacatctccatatctttgtagaatggtcaacaaagcagtgcaatccttcttctttgttttgcaaaagaacattgtatcgtctgcaaatagaagatgattgactctagggctgtgttgtgacatgtgttttgaaacctgagcttgacgacacaaacctgattacacctcaccacacagaataaagatataaggggagagagggtctccctgtcttatacctcttgatggaactactttttccaaaggctggccattgatgagaaaggagtaagtcacagtagatgtgcactccaagatccaatcaatccagcagcttgcaaaacccatcctttgaagaaccgccttgatgaaagaccattctactctgtcatatgctttagacatatccgtcttcacagccattgaacagttcttaatagcacccgaggtcttaaggaagtgaagcgtttcatgcgttatgagtacattatctgctatagctctcctagctagaaaagcagattggttgtcagacactagcttgtggagcaaaggctttagtctctgggtaagaatcttggagattattttgaagtagacattgcaaagtgcaattggtttgtagtctgctgctttctttggtgcttgtattttgggaatgagcctgacaaaggtctcattaacattatggtgaagtgtgctggttctgaattcatttgagagagcaagtcccacggtattccaatttgtttggaagaaacaggctgaaaatccatccgggcctggagccttctccggatgaatgtcaaagagagcctccttgatttcaagtaaatcagggatcttttgaagttgcagattatcttcctctgagattttaggttgaatggcttcttctacaattttctgaacaaggacaggatccgggttggatgaagtaaaaagtttctaatagtactcgactaaaactacagaaaattgaagatcctcaaagacttttgttccatcttcagtttccaggacaaacatgttattgatgcactgtcgtccttttgttactgcatggaaataccccgaattttggtcaccaagactaggctacagttgacgacttctttgtttccagaagtttttctcagcgaggtaggctgcagcaaggtcagagttaatatgttttagaagtgctgagtcattcaaaggacttaccattgccttctctaatgaactcttcagcttttcaatcttcaattgactatttctctgtgtttctctggtctaatcaacaattgctgatctgcatcaagaaagtcttttttgcacaatattggattgcctctgattccaagtcgcatcaattagagctttgacctcttcattttcttttagtctgcgatcatatctaaaaagccctttacgtttttttcttgggagaagtaggagacaatagggcgatgatctgatccttcaaactcaagataatcgcttctgctttttcggaacatctcaaaccagtctccatttgccatggccctttcaagtctgcattggacaatatgagagtgtctcactcctctccaagacaggaagttccccgaatgcttgagatcaaaaagaccacactcagacctgaaagatctgaaatcaatgaaagacccttcagctcgaggaggtcccccagatttctctgtatagtgaaaataggtttttaatctattaatcctaaagcactatcatgtcgttgtagtactgaaggttgttaatccaaatgggtgtgatgctaacaatcaagatgtgatcagaagtcactaagtcaagccaagcaataacaggttttggtgtgttctagcagttctaagtgaacatgcagaaaacagaaattcaagcagaaacaataaaacactcgaccaacacagctctttgcagagcactgggtgaggtcgagtaacagacagaaagtataacagggatattcgactgcacagtctggcaacagtaaagaattgcagaaactaagcaacagatgacaagatgcagtaaacaacagtagagtaaacaaagaattcaatcagataaagaattcccgaggatgggataattgagtagtttcgtttcctcagtttacaggtgattgacatgctcaataattaaccctagacaacaagttcattaaccaaatctaagtgccaccgcaacagagactctcaagttaacctagtcctagactcaatcaccattgacgagagctaacctaacaggcattacgaatcaacaagttaaagccaaaacgctccctgcaaccaataccttggtacagggtcacgaatctctggaattagtggttcagacatttcatcgaacaccttttgggcgcggaaatgtctgggctcaaattccagttgatcagaaagcaataggcattaagaacaactaatccagaagggatctatcaatcaatactcaatcacctagcatactgagaatcctacactactctaacccatccttagaaacctattcactactcagacattataacagaaagcataaacgttgaacaagttgaaaacatgataacaacagtgtaacagcaggatgataacagaatgaacaagaacaaaagctgaatactgaatattgaatagataaagagaaatccggattacaaaaggtctagaacacaaggtctgcggaataaaactagataaaaacttgtctgcgaaaatgtgaagtacatgctacttatagccaaatattccgaaaccctaatacttaaaacgacgcagtattgggacagattaagaactgtactcgacccatgtggtcgagtgggaggtcgagtgaatagctggagtcttcttttcttccttgtgctcgagcgtctggttgagtgcggaatgaagaaggctctgaagcttgtcatcgagtatgcagtcgagtggtggtgatggtgatactggacttccaggtagagtgacgaggtcgagtagtggtctggcaatgaaggtgaagacactcggcctaggggtcgagtgaagtgatcgagtgatggtccggcgatgggatcaagacactcgacctcggggtcgagtgatgtggtgaagtagtgatgtcctctactcgacctggtggtcgagtgatctgttgagatcttgaagctcctactctacctcggggtcgagtggtttgacatgatcaggcccgcttcttccagatagctcatcaacagctccaaatcacctgaaatcaacgcaaatatgcaacatacatgcaaatctatcctaaacatgtaaagtgatgacaaatgatgagaaatggtataaaacagtgatgatatgatgctaaagtgattacaaatggatgctcaaaacatgcaaaatacacacttatcatattgctaaggatatcgttgaagtcaccagagagaaaccaaggtgccgctctttattctgcaataactttgagagactcccaaacaatgcatcttttactttgatcaggttccccatagacaaaagtagcaaaaaaagatttattctttattgtgatgcttacatccaaatagttgttacaagaggagagtatgatcacattccaatcctttttccagtagagagctagtccaccccctccatgtccatgaggggagactagtgactgattataagagcttaaccactcaagcaaaactgaaactgaaactgaaagaggccattgccgaggtcggctccgataggtcttgaagagagtctacaatggtcggcaaggaagggatcgagagaccagcatttctgaatagttgatcgtccgatgatggtaagagaatgcttgcggagaagttttgaattgtcgaaagccagtactctgattctcggcggtgatggaggtcgatttgggatcgtcgcggctttccccttttctgcgtaggagaaacgtctggccattctttagaggtggaaacgtcgctgaagcaaagaagaaaatggtaactcgatgcttagaagagggaataaacaaacgtcggaggtcgcttgagaaattcaggcgaagcagatctgaagattttcagaggccaaatttgaattctcgaaaagtgtgcctgggagcgttttctctctctaagcccacaacaacgttattggtaaagattttactatattaataacagtgaaaagatcttttctaactcttttctttattaatttgttaatgctttattattcattcatgttgtttgtttcatccatcatgtctgagtagtctgcttgttagggtaaatgtttctcactaggaattcatatggtttagtagattgcccccttgttaggttatttgtaagattcttcctctttagttgttcttaatgctagttctagagtaattaactagaacttgattacagataatagatatccccaccataggtatatgttactagaactactatttgatgagcctgttttataggggtgtaataaatcggcctatctactaaggtgaacttatcgaactcgtttagcatgcatgtttaggtataggatttcacggtacatcaagaggaatcttagctctaggcataatgagtatcacggaatatcactagctattgtgtaattagagtttgagtttaaggacggtttgataacaacctagctatccctagatctactaatcatttgttttctgagaattttctgagaataccctaaacctagcattttattatcttgatttacaaccaaccaacctgctatttgcttactttgcttcctttttatttttcttatactcttctaccttaatcttgatacttagctcactatgtgaacaaaagaattttgtggaatttgacccttaaatactatcgacggtctcttatttgagagagtggttttaaggcaatttgacctatattaaatttggcgccattgacaaagttcttaagaatcaccattaagcttagtttagatatttcgtctagatttttatttttcttttgatacatatgcgttccttgtttttcttcttttctgtgtttcaggtgtatgcctaggctcgcaagaagcactaaatagatggaccacatcaacttatttgtgcttgatttaggaatactagaacgcactaaccgcaaaactcagaaaatagcaatgcctgacagagtcattatagctgatgagcaaggagttttgagggatgaagatgggcaatcctacaatttggctggtcagagattggatgatcatggactcatccaccctgaagacgtcaatgaagaacaagcgcgcctcatcgcgtaggtggctgctagaaacattgtagggctcggtgtcgagcgaaaccaactgggtgtcgatcgacaaccacgggatcagatcgaagaagagttcggtgtcgagcgacaccacctaggtgtcgatcaacaccacgtgggtgtcgatcaacaccaatcacagatcctaccgcacctaatccaccagctgctgaaccatgtcgtactcttagggattttaacaggccagacctgttctatgccaaccagttagggatcgtacccccaccctttaagatgaaagactattagctgaagcctggctacttcgcactagtaggccagcaccctttccaaggcttatctcacgaacagctaatggaccacatcgagcgttttgaagaccttgttctgagtattaaggctaatggaaaatctctgaggacgacttactgtgcaagcttttcccctagtcacttgttggggaagatacttcttggttgaagcaattgaaggctggttcacgtaaaacttggaggagcatcaagatagccttccttaacagctcctatgatgatgcgaagtctgaggagctgtgaaacaagctgtctaccttcactcaaggtcggacagaagctttcaaagcagcttaggttcgcttcaaggaatatcaacaggactgcccgcatcatggcttcattgacgtacaacttctcaataccttcttaagatgagttgattagagatatcagatggctcttgatttcagcgagcaatggtaacttcaacacacgctaccggacatatgctactactttgattgagaacattgcatgtagcaataataccaagaatgctgacttcgagaggaagaagatagaaagagctgtttcatggaatcaaatggctaaggtacacactaaggtgaatttagttcataacttgcttacagggaagaagcatgtacattttgctgctgaagtagagactattgagcctgagccagagtcagaagaaggtgttttctacattgatggtcaaggttacataaaggttggactaccacagggcaactttagtggcaacaggtttacaagaaaccagagttcttcaagttttgccccaatacctgccttctaaaaaatgttttcttagaacaacttccaaaggacttatggtaattcattttaccacccctcctccaccctcagctaagagtaagatggaatcaatgctttagcagattttagagggtcagtccaagttagttgtggacttcaatggcaagtttgatgctatctacacagatcttaatgggaagatcgacaatctgagctctcacatgaagtatctagatgtttaagtttctcaaactgcacaatccatcaagagacaagaaggttttcttcatggcacacctaacactaacccaaggaagatcaacaatgctatcttcgttagagatggagacaatgtatgggaggaattagatatagaagacgagttggagctcgcagctacagagctggtgttgagcgacacctaccagtgctgatcgacaccttatggtaacctcttttccgaaactatttatgaacaggcatgactaactacaagccaaaaaggatcactcttctcttcacggatcgttccaaacgggtccttgaaggtatcctagaggatgtgcctgtgagagttggtaattgcctcatgcctgctgattttatggttcctgacatatgatgaagaactcaagaagtctcttattccttggtagaactttcctagctacagatcgtgccaggattaatgtgaagaagggaatgatctctctcaacatatgcgatatagagatggagtttggcatggatggttcaaaattcacattgtctatcagcaacattgtcacccccaaagacacatctcctaaggctgctcagatttccaatctagagccaacatcaaaggcccttacagctcagcccgcatatgagaggtgcaccaaaccagtgtcgatcgacaccatcgcttgtcccagacaaatgcttcttcacctccttcacagcccacacctatttcagttccctcatctttagtattaatcaaataaatttgacaatacttgctttaatcatcaataaaagatatataataattttttcctccatgacctggagttgattgaaaatcacataagtcactatgtattaaaccaagtaatacatttaacacttccacaaatttataagaatgtcgtgaatattttgattccacacaaacttcacatttgcttttcttaatattattaagattgttctttggtaacaatcctaaattcatcattcgatacaaagaatgataattgacatgtcccattcttgcatgccataaatcatttgagtcaagcaaataaacagaagcagtgctattgcttgcgttttcattaacgatcgatacaacattcaatttgaaaataccatcacataagtagccttttcctacatacatctcacctttagtgagtacaaccttatcagattcaaatacaatcttaaagcctttgttgctaagaagtgagcctgaaatcagattctttcgaatctgagggacatggagcacgtttgtgagtgcaagttccttcccagatgtgagttttaacaccactttgccttttcctgcaatcgtcgcggtgctcgcgtttccaatgtaaaccctaaacccgaaactctaacttctaatatttagttataataaccatcaaactgattcattgtttcaacaactttagcctctaacttgagcttctccttatttaacactgaattctcctcaactaccttaacacaatgctcatataaggttttgtaattctctgcaaactcttcatcactaatacttgcatcatcatcatccctttgatcattatcactttcagttgcagatcttgttgcagacgctgatgcagaccctgatgcagatgctgacacatgcaaatgctgacgcaatactagactcaaaggtcataaaggccacaaaattctccaattctttactatcatctgaatcaattccagaagcactcatgatgaattttttctccttttccttcatcaaattcgcacatttataacgcatatgtccaaaacctttgcactcaaaacattgtatgccctttgatgacttgcacaacacttctttttttccatcaaccttaaactcgtgaagagatttattttgttcattccttgaaaaccgcttcttgaatggcaaccttaatatctccatcaatcttgatctcaaacactgtcttacttcttgattcgagaacctactctttaaacaaaaagattatgtaataagccatccctccacatcctcgcctaagacttgttggcaccactcgtttcaccaagaatacttgatggtctagtgaagtaaacaagtaaaccaataaattgaataataggaaaacacaaattaatttttaaattctcatgtatgaacatcctacaaagatttgagaagagcgtatttagaagatgaatcgaaaaggaaaaaagaactgaaagagatttggaagacttgatgaacatggagtttgttgagaaaaaggaaaagtgtaaaaaagaaatttactttttcttatggaaaaagaaaatcttctcctaggctgattaggaaatcgttttggctatataaggaggcgttaggacgtcttggagaagcaggagagctgaggcatagagacatatcgttgagagctttctaaggtgtgtgggacatagtttcgcagttttgtgtgacgtagttttacgggtttggtgcttgtgtgatcaagcttgtttggtggtgtgtgaaggttgttcgagagacttgaggaattgaagtctaggcttagagggagtttagctcagggttaggttatcctgattaaatctagacttagagagtttagttaagggtagagattatctttaaggtttcacgttaatagaagggagcggtaaataaagagggttgtgcttgttttacttgtttgcgaattggttgtaatttgctttcttgttctagtgaaatcgaatctgtacttgttcccggttctgtgtaattatctaattatatctaaaacaagcacactctccagtgaaaatacagagtgtgcttctagcgggttgatgtcagcactctccccactttcctgtgctaggtactcctctatctcttctcctacttttccttcgattatttctttagaatcttcgaagtgtgcttcactggtaaacgagcattgaatttctcgaaagcttgttttttctattgatcttgcaggaaaaggagagagtatcgatcgacacttgatgctacacagagccgatctgtttacatatccatccaagtcctgaactccacaaattcaagctatagactctaaacaagcgcttagtaggaggcaacccactggtatgattttttttttcttttttgaaaattcattttcccgctcgcttcgcatttgaatgcaactggggacagtgatgtttaagtctgggtgaggtggttactaattatgcttttcgttttgattcttattatttactaattactaccttttttgtttagtttagttaggaatcatgatctatatttctttagattattgctgcaggttggactcaatccgactattggaaaattcagatggcaaaccaacagatttgaggatatccttgttccaacacaatccattaagaacgaagttaatatcactgctcttccttttatatcatataaacggctagtgttcatataacttgattctttgttcatacctgatattgagaccaatgtgaagaagaaaagtattcctcttttcttattataaaaaataagagattgatatgattttcggtagtgtataggggtaggaatgtttcccatggcttcattattatatattattaggaatgatcaattacaaaggttgggaatatgctgaaggtgtctatccagtatgcgagtacatctttgtttactctttaaaaagaataagtttgagggagagaaagaataccaaaaagaaaagaaaaataaagaatggtcaatttatcatggtatagtacaggaatgggtctcaaaggttcttgaatattaacctgcttgatgagacccagcgatgaaagcctagtggatatagttgtggaacttaggtatggaatctaaaatgttgtgtaagcttgcggagaagtacatgtgggctaggatttgattacacttgctaggcatatggatttggttagaatgatcatggcaatagactagagaatgttggaagattctaaacaaattatttaaaattatagtgaaactatagtttcaaaaacatagtcaaaaacctatatctaaaatatagttaaaaacagtaaaaatagggttatattaactcctccagacatagtttttgtttgccctcaagcaaaacacaaaagccaaacccgtggaagatgctttgaatatgtttaagaaattcaaagcaaaagttgaaaatcaattagataagagaataaaaattgcccaatcagatcgtggcggagaatacaaatcaaatgaattctcagatttttgttccacacatggaatcatccatcaaactatggcaccttacactccgatgcaaaacggagttgccgaaaggaaaaatataactcttaaagagatgatgaatttcatgttaaacgattcgggtgcaccacctaacctatgggggtgaagccattctcacggctaattcaatcttgaataaatttcctcacaagaagagtgataaaactccatatgagatgtggaaagagaagactccttcatataaaaatatgaaagtgtggggttgtcttgtaaaggttcaagtatgattaccaaaaataactattataggaccaaaaacggtgaattgcgtttacaacggccctgcgaaaaatagttcagcttatagatttttagttcataaatctaataatgttgaggtaaaggtaaatacgatcattgaatctaatgaggctgagttctttgaaagtgttttccatacaaagagtctagggaaacaagtactaaacgggtacgtgaggacaatgaatgtgcctcaaaagttcaagaagaagaaaatgaaccaagaagaagtaaaagagcaagagttgtaacagatttttgcaaagactttaggacgtacttgagtgaatacgaacctcaaacatataaggctgcaattgaatcatcggatgcaccttattggaaagaggtgattcagagtaaagttgaatacattttgagaaatcatacatgggaattggttgatttaccacctggtaataaactaattggacagaaatggatcttcacaaagaagttgagaccggatggtacgattgaaaaatataaagcgagactagtggcgaaagggtttcgtaaaaaagaagggcttgatttctttgatatgtattctcctgtgactagaatcacttcgattagatatatgatctagaaattcatcaaatggatgttaaaacagcattcctaaattcaatggcgtacctatgtagaagaaagggggttcaattgaccccccatataattttgattttttcttcaaaagtttacaacgtgaataatattgaacccactcaattttcgtttttgacaccccatttttgatgttttcttcaaaattttacggccttaacaatattgaacccattcaatttttgtttttgacaccccattaattatagatgggtgaacgacctatgtccccccagaaagtttcatatagcatcacaactacatagaactcgaatctctatttcactccccacaaaatggaagttaatgtccagtttttccctaaatcgaaagtttgaattctaagagttcgtaagacttgttcgtttgatttgatctataatgaaattggactttaacttccattttgtggggactgagatagacattcaaattctgtgtatttgtggtgctatatgaaacttcctggggagacacaggtcgttcacccattatagatcaacgtttttgttctaaaaagctttaaaaactccacaacaatgactatttattgtcaaacactccacaataactaattatttaattctactctaattaaaaaagtctatcatttaccaataaagtctcataactattcgttctttggtttcgaaaacttcatctaagaggtaaaaaatatttctggatccgccaatgcctaaatggtgaacttaatgaagaaatatatatggaacaacctgaaggatttatagttaaagggaaagagaagaaagtttgtaagcttaaaaagtctttgtgtggacttaagcaagcgccaaaatagtggcatgagaagtttgataatacaatgagattgtgtggttttaaaataaatgaatgtgagaagtgtgtctactttaaggaaactaaaaaaggatacgatcattgtatgtctttatgtggatgatatgttaataatgggaacaagtaaagacattatcaatgccacaaagaagatgttgagtgacaaaatttgaaatgaaagacatgggattggctgatgtaattcttggaattagaattaaaaaagagccaaatgagtattcccttactcaatctcattatgtggagaaagttctaaagaagtttggtcactttgatgatgcaccggtagttactctgtttgatccaacgtgcaagctttcaaagaatgaaggtgaaagtgtgtctcagttggaatacacacaaattctggaaacatcatgtacattacaaattgtacaagaccaaatttggcttactcaataagtcgattaagtcgatattcaaataatccaaatagagaacattgaaatgctttggttagaatattaagatacttaaagtatacaattaattatgttctacattacactaaatttcctcctgtattggaaggatatagtgatgcaaattagatttctggaagtacggatagtaattccacaagtggttatgtgtttacacttggtggtggagctgtgtcttggagatcatctaagcaaacgtgtattgcacgttctacaatggaatctgaatttatcgcactagatagtgttggagaagaagccgaatggctaaggtattttattgaagatatttcattattgccaaagctggtaactgcactatgtatccattgccttaaatatagcgaaaaataaaattttcaatggcaaatcaaggcatattcgaaggagacatgctacaatacgacaatttctttcaatggagtgataacattggattatattagatcaaaggataacctggctgatcttttgactaaaggtctagcgaaagagcaagtcgtattcacttcgaggggaatgggtttatagccaacacaatgagtcatcacttggtggaaaccttacttagcaacattggagatcccatggtttaggttcaagaggcaatcttgctgaggaagactcaagaaagagatacatactacttattcctatgaaattaaatgtatttccattgatgtttaaagggatgaatatttttcttaataacattaatattttttttaaagtggaatagaatggactattcttaattaaggttacctatatgagagtggtgtcgcggttgcacctatgagaattgaaatgactgaattctatagagctttcacgaagtcgggatatgttcattaagaaaactcctacttaagtttatggtctagttatgaaagtagtcaattaagtagtacatggaaggaatcatgttgcaaaatgatgtgtgaccgccatgactcttattggttactaaaatagctaagacacttatgaaagaccaaaatacaaaatataacatatgatgctagccttacagttcccgaataaaaccattaaactaacgaccaagtgggagaatgtaagaaataattatttcttacctatgtatgtggtcttatagttggtttcatataggattgttatattttgataaacatttgatgtaaccaatagaattagtaattaaggagttaattccctaatgagtttagatagaacaataagaggacaagtgactaatgtcatgagaagacaaatgttaagctacatgtcatgctaaggttaataacttggtgagaaaactttgaaacttgatgagaaagctatgaatgcacacttgtccaagataaagaaccaaagctagacacatgttctcacacttgtcaattgcctacatctctactatgatggatggttgagactgaattaaaagggcaaaaccctaatgtggaatggggtcctctccccacctatatatagatgatttgctccatcacaaatcacgtgaacaaaaaaaacaacacttaaagagaaagacatataggcaaggggagagaaatcttatacctaaagacataggagcttcatcttcaaggaaccatttaaaggtagcatcatttctacaatgagtggaggtatttctttaacactcttttgattctattatgtgattattatagatgtttaagattttagggttcatgttaaaagaatgttaacgaattaaaattactggaatggaagagacaacagttggaagcagtttgatcagaggaatcagggacgaagaaaaagatgacccctcaaatggttgcaaacttggcatacgacgtcgtcagattatttatttatttataaatccagacattatcattattcatctagcccaatttttatttacccaaattgtttaattaaccatccttattttatataattgattctgtacttttgctaatttgaatatcaattttagaagtgatgatcagaaagtaataatgaactaggtttagacctgtgctagtatgaaaacgtttatcgagctcatcaaaaggagaggagagatgggttagtggaaaaaagagtaattggtggatgcacaagagctgtccaccatctccaggacggagtcccccgtcgccggagaggttgtagaaactagagaggagggtaaagaacgaacaaggaagtcttcttttgaactgattgcatctgaaagatgatttgaaattttggggtagtggaagaggatgtagaaaacaacaacaaacagaaaaaatagaacgagaagtgcaataacgagatttgtagtgacattcatctttggagggcgagaatctcaggcaagagtgtaaattggggattatcaatttctcaacccctatccaaaaatattaaaaatattcattaacctagatctgaaaatctaaactggaacttattcgagaaagctgaaaggccccgatccggactgcctaaagtccggacgagttctctcgacccaagccactaagtgactcggccctaaccgtttatgaggttctttcctagtctaatccgttccatatgattccgtgattcaatatatgagacgaatagagtaaacaaacaatcggatactttattgattaagcaaaggattcgatacaacctatgagtttgcatataagctattacaagtcatataatcgatccctagactaaccgaactatcaccacccatcatcccggccttgagtctctcgcgcctaagccaagtccttcccacgatcaccattcgctcctgaaagtcatagagccacaagtaatctcatttacttaatcatatgcaagtccatgcaatgctctatatgccatacactactcggatccgtggagagaattcagagaggggaagatcgcgcatcagtccggccgattctcggcaggtcagttaagacccgccggtcctccgccgagccgcgtccccgcctcagccgatccctacccggaccgagtcttgtgtaggatgcacatgacccggatactacccagccttctagtcgatcctttcaaagatccgactactaactcacatcctagaacccttagactcaaagtctaggatcccttaccttccttctcgaggttaggtcgatctgaccctccttctttattgccggccacagcccggctaccgaatcctaagactatttattctcccaagagggagagagttttaatggtgagtttcttgtgttttcggtgtgttgtggtgagtggaatggtcctggcgcccttccttatatagggggcgaatggatgcttcccgaatcaacacatccgttccttgcacctttccgaagagttgcacctttccgaagagttgcgcccttccgaagagttgcacctttccgaagagttgtatctcttcgcccataaccgcccagttcgtccgtcactcgtccagctacctcgagctcgtccgtcactcacccagctacctcgagctcaaccgtcactcgtccagccgcctcgagctcgtccgtcactcgcccagctacctcgagctcaaccgtcactcgtccagctgcccgagctggactgtcactggacctgagtaaccgtcactccttccagctgagcttaagctttgggcgagctgacccaagtgatttctttacgatcctagcttagcctgcatgatttcccctttgtccgagcttatggccagctccttctcacttgtccgagactccaccttcttctctcggaccaagtcctagccaacgatcctattgaggatcgcgggcgttacaagtctcccccccttgaattggattcgtcctcgaatccgcatcaagttgatctttacccatctccttgaaccactccggaaaattggccttcatcttattctcggtttcccaagtgtattcctcacggcctctacaattccacaagacttttaacaaatcccttgcttttccccgagtccctttcgtcattcggtccatgatccgtaccggccatgcttccaccgtcatgttctcctttaacccgggaggtatatcttccacgctttcttcttgatcacttaaacacttccgtaattgtgacacatggaagacgttgtgaaacgcatttagttttggaggaaggtcaagtttgtatgccaccgcccctactcgttcgatcaccttgtacgggccaacataccttgggcttaactttttccttgaggtgaatcgtcctgcccctttgtaggtcatcgcctttaagtacaccaaatctcctacttggaattccaattcctttcgacgtttgttggcgtagcttttctgtcgatcttgggcttcctttaacttgatctttaagaacttcattctctccgtggtttcatccacgatcgtaggtccaaacaaccgacgttcgcccacgggcgtccaacacaacggtgttctacaagctcggccatacaacgcctcatagggagacataccaatactagcttgaaaactattattgtatgcaaactctactaaccttagatatttctcccagtttcctccccaatccaagacgcatgccctcaacatgtcctcgagggtttgaatcgttcgttcggactgttcgtccgtttgtgggtggtaggcagtacttaggttcactcgagttcctaaggccttttggaaagccttccaaaactttgacgtgaaccttgtgtctcggtctgacactatactaaccggaatcccatgtaaccgcacgatctcgtctatatacttctcggcaatgatttctgctccatccttatccgagatcgccatgaagtgcgcagacttagtcaatcggtctaccacaacccataccgcattgtgtttggacttgatccccgttggcagtccagtgacgaagtccatcgttatgtggtcccacttccattccggtataggtaggttttgtaacaacccacttggtacttgatgctccgccttgaccagttgacaagtcgggcacttggccacccatctggccacgtctttcttcattcctacccaatggtagtaccttttaaggtcgcggtacatcttgttcgacccaggatggattgagaacttcgattgatgggcctctcttaggatctcctcctttaatgccctatcgttcggcacacatactcgaccgttcaccacgattgtaccattgttcgaggtttggtactcggtcttattgttttgagcccatccttttatctcctcgtcccgttcctgagccagccggatcctactaagcaggtcggcctgatcggcggctcccaaccctaagggttcaacttctttagacaaggcattcacatgcaatgtccccatcatgttaaccaagtccacttggctccgttccgcctcaacttccgagcgcctcctacttagggcgtcggcgacttggttggccttgcccggatggtacgctatatccaagttgtaatccgccacaagttccatccaccttctttgccttagattcaactccggctgggtgaatatgtactttaggcttttgtggtcagtatagatttgaactttagcaccatacaagtatgatcgccaaatcttcaagaaaaatactaccgcggccatttccaaatcatgcgtagggtagttcttctcatgtttccgcaattgccttgatgcgtatgcgataacactccccttttgcatcagtacgcatcctagtcccactattgatgcgtccgtataaaccgtatagggctcaccttcctccggtaagaccaatactggtgcattagtcaacatggcctttaactccaggaagcttttctcgcactcatccgaccagttgaatgcggtgtcttttccggtcagtcgggtcaagggttgggccatgctcgcaaaactcattacgaaccttcggtaataccccgctagtccgagaaaactcctaatctcggtggcattccttggtcgtggccactcctttatcgaccgtattttctccggatcaaccgatactccttggtccgagataacatgaccaagaaaaccaacactcctttgccaaaatgagcatttacttaacttcgcaaatagctcatgttcccttagccgttccagcaccgcccttagatgttcttggtgagcttcccaagattttgagtaaacaaggatatcgttaatgaagatgataacaaactcgtctaagaaatcccggaataccccattcatcattttcatgaaagctgctggtgcattggtcaatccgaatggcatgaccacaaactcaaagtggtcgtaccttgtccggaaagccgttttcctcacgtccgttggctctatgggaatttggtgatatcctgaggccaagtcgatttttgaaaaccactgtgcacctccaagttgatccatcaactcatctatccggggtaaaggatatttgtttttcaccgtaactttattcaatccccgatagtcgatgcatagcctaaagctaccatctttctttttcacaaacagaacaggcgcaccccatggtgagctactcggcctgatgaatcctttatccaacaactcctccaactgtttctttagcttcgccatttccgccggtgccatccggtacggagctttagatatgggggttgtcccgggctcgagttctatcgtgaacgggtctgaccggtccggtggtacaccactaacggccgcaaacacgtccgagaactcgttgacgatcggaatgtctttcaactccgcactcgcccccacttccttggttgtgatcgtggctaaatatgcctcacatcctttcccgagcatcctttcagcctggattgccgagattaccaagcttcccgaggttgttcttattccttggaattttaacataccttcgtccctctcgaattgtatccgtcctcggtgacaatctatgtgggccttgtacttccccaaccagtccatccctaagataacatcatgtttctttagtggaacaatgattaggtccgcgggcatattgacaccgttcactacaaccgagatgccccgaacaagtccggtcggatacattgcctgtccgccggccgctcgtaccattccataatcggtgtttggttctttcctgaacccacctgtttcaaccaattccggactaacaaaacaatgtgtagccccagaatcaaatagagtgtgcgttactacgtcacctactctcaaggtccctacacattcccttagaatgctgagtacctcccctttcccatatgcatgatgcaatgcaaatgcagttattgaaataatgaatagggagttgtgagaacgtaccagtgatcgccctgaagtttccggcatcgttagcttcctccgacaactcataaactcgcgatgccacggcttgccgctttgggggaggcggcagtccatttcccccgcgattgtccctttgtccggcctgcttctccgcagtcaacttagggcactctcgctttagatgtccagtctttccgcaatagaaacaagtccttgtctcttcaccgagaaccttggactgtcctggttccattttcgggcaactttggatcgcatggtccttgcttccacaccggccacatgcacctatggccttccagcaagttccgctgtgattcttaccacaggtcacgcattccccggtcttagcatcggacttggtgttatccaccttgtcaaacttccttttcttatccgcgggtttggtggattgattgttccggatcggtgctttctcccggttcaagtacctctcctcctcgatcccttcctcaatcattgctgccctttcaaccaattcggaaaccgagttgaatgtccggaccaaacaatggttgcggatctctatccttagtccacggataaatcggcgcagttgagcttgttcctcctcaagttcacgtcccacataacgccttaggcggttaaattcctcatcatattcacgcaccgtgcggttcccttgaactaggtcaaggtacgcacattcaagcctatcccaagcctccggtggaaagtacttcttgttaaactcgtcttcgaaatccgcaaaggaccggacctcgtcccctctgcgtttctcgacggttaaccaccagttatgggcgtctccttcaaggaagtggaccgcaatgtccctttggtaatcctcagggcagcgggtagacttgaagttcctcttgagtctactcctccactcatcggccacaatcgggtccgtactgcccatgaagtgtctcgtgcccagccttgagacatgttcgagaagactcagatagtctccccttttccgcccatgattcggttgtggattcacttccacaacttccgagtcatcatccttttggttatccacttttaggaccaccggatccgctataacggccttagtcaatgtggctagttgcgccatcattcccttcatcaaatcccactgttcttgggccgttggagtattgttccggttatccgtgctgtcccttgcaccactactctccggtgcttcctcatttatggacttcttcccggcctcaggtccggccgagtctgtcccatcgaacatcgtcccgactctggttttctcgttgatcatcgtttcctcctcaaccaaagtctcctcgacaatgcccttgtccttcttactctttcccgttttgctgctcttacccatctgcgaaacctccaaagttaatccacataactcctagtaaaatcgcaaaagagtaaagaacaactaccgcgagattctcaagccaacgagtggtgataccccttaacccaacacctagtcctagaaccaagcatgctctgatactttgaaaggccccgatgcggactgcctaaagtccggacgagttctctcgacccaagccactaagtgactcggccctaaccgtttatgaggttctttcctagtctaatccgttccatatgattccgtgattcaatatatgagacgaatagagtaaacaaacaatcggatactttattgattaagcaaaggattcgatacaacctatgagtttgcatataagctattacaagtcatataatcgatccctagactaaccgaactatcaccacccatcatctcggccttgagtctctcgcgcctaagccaagtccttcccacgatcaccattcgctcctgaaagtcatagagccacaagtaatctcatttacttaatcatatgcaagtccatgcaatgctctatatgccatacactactcggatccgtgaagagaattcagagaggggaagatcgcgcatcagtccggccgattctcggcaggtcagttaagacccgccggtcctccgccgagccgcgtccccgcctcagccgatccctacccggaccgagtcttgtgtaggatgcacatgacccggatactacccagccttctagtcgatcctttcaaagatccgactactaactcacatcctagaacccttagactcaaagtctaggatcacttaccttccttctcgaggttaggtcgatctgaccctccttctttattgccggccacagcccggctaccgaatcctaagactatttattctcccaagagggagagagttttaatggtgagtttcttgtgttttcggtgtgttgtggtgagtggaatggtcctgggcgcccttccttatatagggggcgaatggatgcttcccgaatcaacacatccgttccttgcacctttccgaagagttgcacctttccgaagagttgcgcccttccgaagagttgcacctttccgaagagttgtatctcttcgcccataaccgcccagttcgtccgtcactcgtccagctacctcgagctcgtccgtcactcgcccagctacctcgagctcaaccgtcactcgtccagccgcctcgagctcgtccgtcactcgtccagctacctcgagctcaaccgtcactcgtccagctgcccgagctggactgtcactcgacctgagtaaccgtcactccttccagctgggcttaagctttgggcgagctgacccaagtgatttctttacgatcctagcttagcctgcatgatttcccctttgtccgagcttatggccagctccttctcacttgtccgagactccaccttcttctctcggaccaagtcctagccaacgatcctattgaggatcgcgggcgttacaaaagccgctgtaaatgggtttggttaagcagattttatcgaacttgttcaggtcaggcacggcccacattctttagaacggctactttatatgtaatttttagaaccccatacatgtcaaattttggttagccgaagagtgtaactgttaagaaaccacagagctaaagacgtcgactttcctttactcagtgactcaaaacagatcctagaacaaaacgacttcagagatgagtgatgtacttcagaaactggttcaagagtgtttgtaagaagaacaagactttggaagaaatagagaaacaaaacagagaacacacacgagactttaatacccagttcactcccaaagggtagctacgtctgggccgagactctcctcggaatccactagaatctgatagtgtttacaacaagagtctacaagcaatacacctaatacccttcactagtacttaggattgctctgcactactctgttatcccacaaagaacagctaatacaagtttatactatgaatagctttctctcttaacacctcacaaactctgtaaaatgtctcgcacactctctcaatgacttaagcacctatttatacttcaaagtagattagggcttcaccccagcaaataacaagccggagcctacgctccttaaaacgccaaaactgccagcttgaaagcgattgttgtctccttctttaacctcctctctttgcacacacaaatggacaaactgtccttaaagcaaaccgatgccattgcgaggcaagctccttcatagccgtttgctttgttgtggtcccaaaagtagactaaccaaggttgagttactttaccttgggttaagtcttaaggttaaggccaaacatttgaatatcaccttgtgcttcaagctatcagtcttcacaaatctccactagatagcataagccacaaacattcaaactgtttagagttacaagagagagaaagagtacctgattctagcctctggattctagtctcggattctccgagtttactactcagacttgacacggagcaagttcaaagctatttgaaacttactcactgccaaaactttggtgaatatatcctctgggttcttctctgtagttatcttcaacacctcaacagttccatctgatatgatctctcggatgtaatggaacttaacatcaatgtgcttggttctttcatgatgcacattgttcttcgagagtggaatagccctctgagaatcacagaagacctccacactcttctgatcatacctgaagtctttcaacaaaccttttaaccaaactgcctcgttcactgcttcattaagtgacatgtactctgattctgttgttgactgagcaacaactctttgtagacttgacttccaacttatggtgtttccaccaagtgtaaaaccaagaccagtgattgatcttctcttatcaaggtcatcaacataatttgcatcacaatagcccacaatcttgaaacttgagcttttcttgtaacacagtcttgttttcaaagtatctttaatgtatctcaacacccatttcactccaacccaatgatctttactcggtttactcatgaagcggctgacgatacccactggataagcaaggtcaggacgtgtcccaatcatggcatacatgatgcttcccacagcgcttgagtagggaacaaacttcataaagtcttcatctctgaccagtttctgttctgttgcagcttgaaacttaaaatgagctccaagtggagtcattgcaggctttggttctgacatattgtaagtttcaagaatcttattcaagtaaccttcctgagacagccatagagcaccctctgatctgtttctgttgatctccataccaagtatcttcttagcagcccccaaatctttcatctcaaaacgcttgctcaactcagacttttaagaggctattgcttctttatcctttgctgctacaagcatatcatccacatagatgagaagatacatcattgaaccgttctgcagcaccttagtgtaagcacagttatcatactgacttttcacaaaaccaatctctttcatgaagttgtcaaacttctcattccattgttttggtgcctacttcagtccatacagggctttattcaaaagacatacctgattctctttgaacattgactcataaccttctggaggtgacatgtagatcttctccttcagctctccatgcagaaaagctgttttcacatctaactgctctagttccaagtcctcttgtgatactatagtcagcaaaacccttatagatacatgtcttaccacatgagcaaagatctcatgatagtcaattccttctcgttgagaataccccttggcaacaagtcttgctttgaatcttggttcttctacacccagaatcccaagcttatacttgtagatccacctgcagccaatgattctttgattctcaggtctcgtgactactgtccacgtgttgtttttctcttgagaatcgatctcgtcattcatagcaagcttccatttgttccaattagagtccatttttgcctcgttgaaactctccggctcaactacatcaccatcttcagttgtatacaatgcctcagcatagtaatcttcatcatcaaaacgtcttggtgctctaatctctcttctgtctctgtctcttactaaatgataactcggaggagactgatttacttcagaaacaccattatcatttgcagttttactgagtggagtagcgtgtactggactttctggtacaggagttgtctaagacatcccttgatctccacctgagataacatcatcttctgcttcaaggtcaagatctagatatgatccagtttgatcatcttcttcactagacacattctcacgtgtcagcatcagatccttgtacacaacattttcttgaaagatgacatttctactaaccacacactttctttcatccagcagtcacactttatacccttttactccaacaggtaaccaataaacactcccttcttagctcttggttcaagctttccatcatcagagtgaatgaaagctatacatccataccttctcagataactgtaaaccggtggttttcctgaccacttcttgtcaggaatctcaaaattaagagctgatgatggtgttttattgatgagaagtactgcagtgtgagttgcctctgcccaaaacttcataggtagacctcaatcactcagcatgcttctcactttctccatgatggttctattcatgcgttcagcaaccccattctgttgaggtgtgtaagcacacgttctgtgcctttgaatcccttttgattcacaaaaaccatcaaacaacttgttacagaccattgtctgttctaagagtcttcactctattgtcactctgattctcaaccaaactgacccaatcaacaaacttctcgaaggcttcatctttggttttcagaaaataaacccacacctttctagtgtaatcatcaataactgacatgaagtattggcacttccctaatgagaatggaactaatggagctccccaaaggtctgaatgaacatattctaacttcttagtggtaccatgatgagccgaattgaaaccaattctcttggctttaccataaatgcagtcctcgcaggtgtcgagaactgagactttcttaccatctagaagtcctctcttgaccaaaatctccatgttctttcgactcatatgacataaacttctatgccataacacagtatcatccattctcctaactacatcaagtgattcactagctacaggtttccagttaagcaaataaagagtgtcataccttcttccagtaagtcgcacttgacttccagttttaatgcttaagattccattttctgactcaaacttgtaacctgccttttcaaaagtccccaaagatagcagatttctatccatatcaggaatatatctcacatttgtgagaaccacagacagaccatcatcatttttgaccctgatggttccaattccttttacccgagaaacagtcttgtttcccattctgacacaacctcctgcttcttcatcgaactcttcaaaccattccctcttgtaggtcatgtgatagctacagcctgtatctagtatccattcatcttctaaacggatatcagttgatgacaacgcctcagatacataataaccagctgcttcagctatgtttccttttcctcctaaggattctccctttgctacttgactctgcttgaactgtggcttgttctggtttggacaggaagctctgaagtgtccttcttcaccataaatccagcacccgggtttcttcttggatttgcccttctttcctttcccctttcccttttgttcaccctttcctttagcctcattcttgtctttaacaaaaagaccttcagcctgaaccttgatactcttctttacagaccctaactccaactctttagagtagatggctgcaacaacctcatctaaggttaatatagacttacccgagctatatttctgagtatccttaagcagatcaaaagcttttggaagcgatgttaacagcagaatagcttgatcctcatcagagatattaacattcatgtcctctaagtttgtaataatctaaaggaattcatcgatattaccttctactgacagattttcagacatcttgtagctgtaaagcttctgcttcagatagatcctatttggaaaggctttcgacatgtatagcctatccaaggctaacaacattgcagcggctgtcgattccttctttatcttccttaggactctatcaatgacactaagaactatggcgctcctagcctttctcttcttttcttctaaagctttgaacttttcgagcttctctttatagtcttcatcaaattcgtctggacctgataactcctcacccttgctctctgattctttgagagcagtacacagacccaatatatccatatgagccaacagttctccttccacatcgtgtaatcacaacgaccatcaaacttctcaacttctattctagttgtagacatggttcaagatcttaaacccttttcagaaccacaaagaacaccaacatggtgctctgataccaatctgttaagaaacgacagaactaaagacgtcgactttactttactcagtgactcaaaacagatcctagaacagaactacttcagagatgagtgatgtacttcagaaactcgttcaagaatgtttgtaagaagaacaagactttgcaagaaatagagaaacaaaatagagaacacacacgagaatttggtaacccagttcactcccatagggtaggtacgtctgggccgagactctcctcggaatccactagaatcttatagtgtttacaacaagagtctacaagcaatacacctaatacccttcactagtacttaggattgctctgcactactctgttatcccacaaagaacagttaatacaagtttatactatgaatagctttctctcttaacacctcccaaactctctaaaatgtctcgcacactctctcaatgacttaagcacctatttatacttcaaagtagattagggcttcacctcagcaaataacaagccgcagcctacgctccttaaaacgccaaaactgccagcttgaaagcgattgttgtctccttctttaacctcctctctttgcacacacaaatggacaaactgtccttaaagcaaaccgatgccattgcgaggcaagctccttcatagccgtttgctttgttgtggtcccaaaagtagactaaccaaggttgagttactttaccttgggttaagtcttaaggttaaggccaaacatttgaatatcaccttgtgcttcaagctatcagtcttcacagtaacaaggaatttttcttttacgctactttctctctttcgcattccacctgcaattcttcaaccaccaccgtcatcagtcaccatcatcttctccatcattggcgtcatcttcatcattgttgtcgatttagaagttttaagctctaatcggtatgtttcttctcacaattcgagttttaagggtctaagatcattaaattgaaataattggaattcataaactgttgttagtagtgtttatgctctaataagtgatggatttgtataaggtcagaatcacttatcaagtaagtaaccagaaggagatgagaaaatagaagaattaggttgagaagcagaagaattcagaattagaaagaagaagaacaagagagaagagagatgatgaagaggataaacatattgttatgatctatttcgatagtgttcccgtaagggagaaagagttgttaaatacaaaggttaagggcttaagatgccaacaaattggcagcccaataacatactaaaagaggcccaataaaccacaattggatacttatcaatactccccttttgaagtatcaccttgtcctcaaggtggaaggaaatgaaactctgccagtacattgccttgtttgcccgtgcatcagcctttgttgtagcttcgagaatgtctgcaccttcagtctttaacttgatggagaagatctcattaaagtccttatgagtaatctcaaactgcttccgttcgttctcttcaacttgtatctctcacgcagttgtgttctcaattattgagaccaactttgaaaagaacagctccaaaagcttgccatcactggaaactctgtttcggaatcttgatactttccccaagaatgcaaactgtaagagagggtccttagacagtgacttccaaacatgagtgctacacgttttcttcttcatgtcaaacggtctattctccactgtcatatctatattttgggcttcacgggttgctctaaggttctcctgttcctgccattctccaaacaacagttcaggtggccgtgacgattgagacacttcacagttggtatcaatcttaaccaagtttccaagatgaaactgaaagagctgggtcgacatggtctctatcaaagtagattgatctctcacaagacaaatgaacttatttgatatcatagctacaacgtccttattgatcttgatcaacctacttgtaatcttttgttctatctctaacaagtatcccaagaccataacgacaacttccgtactttttcttaaatcgttgtgcttctgatatttctcaacaacatctctctcaaccaatatttttgaaacttcttgagttgttaatattgttgtctcatagataacctatagcaattgacgtcttggtagtggctcagtagctttaatagaacacacaaactcctctctgcccaaagagtagacacaacccaaatcaacgtcacaaacaactcttgagacactgttcttacccttgttaacatcatctttgacatttcttagtttcttctttactgtgtcgctaacccatcttctgtcattacctttactcgcccctgaaaaatccaccttgtcctcaaggtggatgaacaagaaaagagtttctttgctaaggttctcacttaagtgaacatctaacgacttgagcagcttttccaaatcaaaacctgtgagtaaaagtagcttccgcctcaaaattccttttttatacccaacacgcaactttttcaagtcccttctcatgaccttttgtaaattagtcttatcaagcttctgtattaatcttaacactccaaaatttctgtaaccttccaaacccatagaacttggctaacctctaaaccaccacgctcgcatacgcgattagctctcccagggtcagttggttgtttgttaccggtacaaactctacaggctagacgcttaacaacatcaacatcctcaaactcctagaaagccactaacccgtccaaatgaattttgtcagtcatcctctctccatgatcccaaacttggctaacgaaagtacatccaaaaaacttgttttcattcatgaacactatgtcagttattgaagaactagtaatttgtttctcatcggtaccatgaatcttccttgcataaaaatcccatcacttctttccttcactgtagtacaaagcgttcctgcaccttctagtaaactcacttcactagccttttgtagattcatcaccaagatatctcccctgtaacactcatcatcactcacagtcaattgtctaagaggaggaaacgagaatgtatgagagctgactttctcctttttctttgcaacgacccattttttattctttgatctgaatgaggcaatcacaactcgatatctatccctctctcttcgtttctgaaattggtgaaaacgttgcttgaaactagctcttggagtacctatgtggcgactttcctttaccagattcactgccatcgaattgagtctatcttctccgagatacaacacgtttcttggcgaacgagtacaaaaacttagttgtagagattgagaaagattgtcacgtttcatttttcttttcgaaccttgtggtaacttcgcttaacatgagtttgtcgtttcctcaggttttgagttgcagtcgagcctttagaaatcccagaatcataagaaacgttatgggttgagatgcacaccacctgttcgacaaaattcccgtgagagtttttggtgttttttaaggtgttgtgttcagatcttgagctctggataactggaagcttctaaatagcttccttgggattgatcttcgacctcctccatatatcgatcatttgttgcacatgatcaaaatcctgacccgtgagattctgatttcccatctttgttggctcatatttcgtcgatcgtgtttgttgcagcacctccatgtgtctgagaaacctctcctcatacatttgttgatgtctcagaaacattttcaaattagatgagaaaaaacttgagttgtgttgaaccaaggattcacacaatagatttgtttagagagggaaaacaaatctagtaatttctcttcattaggtattctatccaagactcgattacaaaagatgttctaatctcttatgaaatacattagggttttgctcaagaacagaaaaagagttagggttttaaaaaggtatagctgcatccatgatggattgcttacgtaccctgtgaagggatcaagccattcgtagttctcaataggtataaagttatgtgttcttgtgagtatccaaagatccccctcttgtgaagtccctgaggcactttatataggatccttaaaccgcccccttagcgatattcttcggaagattcttatttatccttaggtcggttctagaggataatcgtcctaaggatattctccttattcttcggaggttttggggagatttcctgatttcaacattatcttcaaagattctccttaagtctttgcctcgcgtgttcttcacggctcggtggtcgtttgagaggtggcttcggggcaaacggtatgtaccggctcggggcgcgcttgatgactgtccattaagctcagttggctgtctcccgagccgatatagatgtttcccgcagcgttctcgcgattggctcgggctgtgttcatatgattaacacccgagccattttacaaactctcttcgggacggtcgatcgaataaggtcccgaggtgctttgttctaggctaggggccaatcatatgtttaaccatgaggtgattgttattcttagactgtttggctcggtcttgcttgtgggggaatccgaccccaacagttagccccccagctcgttggttaagagttaatgccacgagcttcatgaatggtgtgaccgagccagctgctttcgcatctaaactgactaatccgtatcttttgaaagtaaggcttgttttttcttggtgctacgagattctgttcttgacgggtgttgctatctcgaactcaaaatgttagctgttgacaagttgtgagctaggaaagctgctaggagacttgttgaagaactccaagctgttgacgagctgttaggcgggcaatagcaagctaggaaggctgccgacgagctgttagctgggcgaactacgagtcagagaaactgcagacggactgtgagctaggaaaagtgcagactaggtgctagctagacgaactgcgagctaggaaagctacagacgaacaaggagctaagaaagctgcagacgagctgttagctaggcgaagtgcacacgagctgctagctaggaaagctacagacgaactgggagctagaaaggctgcagacgagctgtcagctaggcgaagtgccgacgagctgctagctagacgaacttcgagctaggaaagctacagacgaactgatgtggttggctcgggtacaaattgcgtgagtcaaagctgggttcagtatacttcgttccgagctgatcgtctcggtaccaggttattcgggataactggatttctaagcagaccaaagcagataagaaactgtatttagccgaagcaaaagctcggcaccagtgtttatgataactgggttttagtttccgaagcggttgactcggtaccagtgtttagagtaactggatttcagtagacttgaatacccacggttgcgacccgatttgattcaatcttttaccagcgtttagaaacgagctggggcaccggtgttaagtataaccggatttcagaagatagaattcatagcctgctcggaaaaacattcgagcagattcttatcttgaatatttatatagcgcgctgtaaccgaagcggtgtaaatgaaactttgaaaataataggccgtcgcccgttaaaatatttcaaagtaaaaagatttagaaatcaaattccaagaaaattcgaagtagaaaaattgaagtgggagtatggatatacggaccccactcccccccctttttgctcggtagacgagtgtttttgcaagtttacgcaaaaaatatagcagagaatgcatatatatgattaagctgtacttgttagattataatagataacacttatcttattggtttggacatagagatgatgaaatctacggcatggacgatctgaatctttgagattgtaaacgtcgttgtatgaaaatctacatttaagatgttgttcgttagaggagatctcatctttgcgtagaaagagagaaggatgaatgcttgtgatataagtgagaatgtcaatcaagcttaattaatatgtaagaaagtaattgaacttatcttttatgagggaggtcgtcgagacagaattggagatcgcatcattgatgaatgagtggaaaccttgagcgattgctagtgatgatccattgtcacttgttggtgtaatgtacttccttttgctgatttatagaagaactgataacttccgtttgaaccgttaaactattgatcccaccgttgaatctttagctgatagtcccaccgaagattttgtctgaattttagtcagatcggatattgcctgaggcttctaccgtcttatgaagttgctgtgacaaagtgaatttttcttcctttgctatatttgttttttggtttcggttgctccggtagcaacatacgatcctcagtgaatataggaggcagtatccagtgatgcttactctttggctgacttctagtgatctttcttctttacttctctttcctatgaattttcccggctggtgcaatagagctgtgatgaaatcggtttctgtaaaggttgggtcctttgcatttctccagtttatctggtgatatggcctcttaactgagctctttcttttgaattttcattacacatgtttttgtgagatctgaacaacgtcttgtgattaagataaagcagaagctctccaaggcgaggaagggacaatttttcttagatatatgttaagacgagccgattgtagatgaaagacgagcttgaggccggaagacgatcttgatgtccgaggaagaatagagtttattcgtcttatagctgaaccttgtaaaaggttgcctacgtacccttagaaagggatcaagctacacgttcatatcgtgataaacgagctaggccattactggaggaaggtcgtatggtagatgacgagccggcagatgtgcgacgagctggatgaaccgtggtagagaggcgaattggacaaaccgagttgtctgctgaaggtttagacgagctgggcgacgagttaggtggactctgcagtcaatggacgaactgccgctaggcgaggaggtagatgagttttgcagtcgagggatgagttgatagctagacgaggagttggacgagctgactagctgacagctaggcgaggagatggtcgttgagtgatgggaagagcttgaagacgagctgagcttgaggacgatctgatgagcttgagaacgagctaaggagcttgaagagcttgaagacgagctgagggacttggtgaagagaacgagttgagaagcttgacgaagaggagcgagctactcgagaagggcgagctacttgacacggacgagctgacgtgctacttgagacggacgagttgacgagctttgtgagacggcattccccccttttgacatgacatgatattctgtatttatagcactacgcgtgtagggcattcatcgagggattgaaacttattttgggcttttgacttgggttacagttgattttgttaaatctaaacaacgaccttttttgttgcgttcttagtgattaagatatatgttgcgttccatgcctccatgacacatggtccgtggtgatgaagtgtggcgatgatgtgaagctttcgtaaattgaagaccatcggtggcgaggtgaagacgtgaagcctaagatgggcatgttggtggaatcgtcctggaaacgacgatggacgtaaaatcggtcacaaaggtggctgatctgatagccgcagacatgcatctttgggctacagccaggacgtgcttgtcgcagaaaaacagtaataactcttgttagacgtaatcaattgaggcaaggatgagtccgttagaaagataagccttgtagcttcaaaatgatgtgcagatcggctcctggttccttttagatcgccgggaaatcgatctgaaagcagacagatcgggtgtagacggatctatgcatgtctcgataaacaacgcatgcttgagagaaaaacctataactctcggaagacagcaccaaatggagcaaaatcgatcttgttggaaagataagcctcagagcttcatgatgatactaagatgggctcttgatgttttctgaatcgttgggagtttgctttctaatccagttgctcccacagttcgaatctgcgatttgacaggtgtcatatgttttagtgaaacagtgataacgcttagtaaacagctcggaattggatgaggtcggtctctattgaaagataagcctcggggctttcagttgatacttaggtcgcctcgtgatgccttttagatcgccgggaagttgattccgaggtcaacagatcggatacagatcgatctgtattttgtcactttctgcagataaacggcagtatctccgagaaaacagaccctaacgaagtgagctcgggcttgtttaaaagaggagcctcagggctttaaattgatctgtagatcgtcttctgagtctctctagatcactgggaaattgagcttgagttcggctggtcggatagagacgaatctcggatcaaggcgaggtcgacggtaactcctaatagacatctcggatcgaggcgaggtcggattctttagaatgctgactcttggggcgatctgtagataggtatatcattgcctagttcatcaggattttcaaggaaaacgatcccgaagctgactggctggctgtctgctcctcgaggattttcaacttggagtgctcctcgaggagttttatagagttgggtctcatgactggctgcacttgcttgaggtaaacgtttatatctctcagcatatatcttcgattaaggcgaggtcaacttctccgaaaagacgactctttgggcgatccgtagatgtattaacccttacgagattccctgtgatttgccgggaaatcggccccgaggcgaactggtctattcggacggatctgttaagaaacagacagcatcgacttcagcagcgataactctgagcagagatatccgatggagttacggttagattccctggaacgctgatctccggggcaatccgtggaatggttatacgtcatctggttcattgtatcttgacgggaaatccccccgcaagtagacggatctgattgtcttggcttgatgagcgtacatcgaatacttggatgaatgatatgcgaagagagttctttgtcgttccccacagacggcgccaattgttgaaccaaggattcacacaatagatttgtttagagagggaaaacaaatctagtaatttctcttcattaggtattctatccaagactcgattacaaaagatgttctaatctcttatgaaatacattagggttttgctcaagaacagaaaaagagttagggttttaaaaaggtatagctgcatccatgatggattgcctacgtaccctgtgaagggatcaagccattcgtagttctcaataggtataaagttatgtgttcttgtgagtatccaaagatccccctcttgtgaagtccctgaggcactttatataggatccttaaaccgcccccttagcgatattcttcggaagattcttatttatccttaggtcggttctagaggataatcgtcctaaggatattctccttattcttcggaggttttggggagatttcctgattttaacattatcttcaaagattctccttaagtctttgcctcgcgtgttcttcacggctcggtggtcgtttgagaggtggcttcggggcaaacggtatgtaccggctcggggcgcgcttgatgactgtccattaagctcagttggctgtctcccgagccgatatagatgtttcccgcagcgttctcacgattggctcgggctgtgttcatatgattaacacccgagccattttacaaactctctttgggacggtcgatcgaataaggtcccgaggtgctttgttctaggctaggggccaatcatatgtttaaccatgaggtgattgttattcttagactgtttggctcggtcttgcttgtggggaatccgaccccaacaagttgtttcaaaactctcaatgaaaacaccaattgataaggtcagaatcacttatcaagcaagtaaccaaaaggagatgagaaaatagaagaattaggttgagaagcagaagaattcagaagtagaaagaagaagaacaagagagaagagagatgatgaagaagataaacatattgttatgatctatttcgatagtgttcctgtaagggagaaagagttgttaaatacaaaggttaagggtttaagatgccaacaaattggcagcccaataacatactaaaagaggcccaataaaccacaatcggatacttatcatatttattagcttttgattgaataggtaaaacgtaatatataatacataccatatgttcgattaaatgtctgacattgtgtttaacttttgatttttgactcatttttgctttgtgatttaggatttcctgaaaatattttaaggtttgttttgagaattgttacaatgtaatattagatatgcttacttggaatttttaactttaataacttcacaagagattgctttgagaatcagtcatgacccatgagtctacataagggacccatttgagaatcagtcagaaggaaaaataattataatggtcaaatcgccgaaactgaaaacggtatcatcattaactttttatcatcaatatacgaattactaagggagatttactgtgataaagtacaaattaggtgttattaccagaacagacaaaacttttttttattattgtcatattatcgtctttttttaatatccagcgtgcccttactaaacgttaccgaaaaaacgtaattacaaggaatgccactgtcatgtcagaaattgctgacgtggattaaatgaactcagccgtaacgcgatacaacggcaattacggctgaggtacggtatgttgcggctgacttacgacaaaaatatatgagtaataacaaaacggtaaagtatgagtataactcagccagacgttacagctgatttataaaacgttgcatgagttatacgataactcacgcaattgtatggctgcgttaaggaatgttgtccgagttataagaatttatagcataacccagataacgttatgtccgagttatgagaaaacggctgacttattacctcgacacggttgagttatatttttggacggcttagttatgggatgatgtgacggttgagttatgatcgagtgttataaatcagccgtaaagagctcgattactaaataactcagccttgttacggctgacttatgtgcaaaagattaattactataatagcatgcagttacaaccgagtttttaaacggtacagctgagttagttgagttacgacattacacggctgacttaactttgtttttttcctttttcaattactgtaatagtattcatgttgcgactgacttatagatttgcttgatggctaagttatcaaatgttcgtttggtggcttagttgccacctcatcaattcaaaacgacgttggctgtaatattccatgtcatcattccatgtcagcatcatcaaaggacaaaaaaatagggccaaagtttttcaactcgtcttcttcacctgactttttcacatcactagaaaatctaattcctcatcgttttcctcattttttttcaaattctttcatccttctcccgatatggttgatccggttccgtaatttttgtttccgagaattgggtatagaaacacaaatacatatttacaccgatgaaacagggtgtagacttgtgcagatagatgcggaaacaacgcacgacaaacttgtgaagttgtcgctcgatgataaagttagacgaaatgttgcatctcttattgtttcgcgacaaatttacatgtctcggctcagttatatgcttaagggaagacgaaaggttcagtcaatttacatgtcacggctgagttatatgttccaagaaagacgaaaggttcggtcaatttacatgtcacgactgagttatatgttccaggaaagacgaaaggttccataaaattacattacggctgagttatatgcttaagggagaacgaaacgttcagtcaatttacatgtcacggctgagttatatgttctagagaaaacgaaagattcggtaaaataacattacggctgagttatatgtttaagggaagacatctgtaaatttacatgtcacggctcagttatatgttcaagggcaaacgaaagaatgagtgtaaattatatgttacggctgagttatatgcttcagggaagacgaaaagtttggtaaattacatgtcacagctgagttatcattcagggaagacaaaaggtattgtaaattatatgttacggctaagttacatcacgttacagctgagttacatcacgttacagttgagttacatcactttacgaccaatttataatacagatcggaatacaatatgaaatttattggccaaataacaacaatcaaataaagaaacgtaagaatatgtttgagagatacataggaggaagacgaaaccgtatgaatcaaaactgataactgtgtattttgcatgttttgagaatccatttgtcctcactttagcatcatatcatcactgttttataccatttctcatcatttgtcatcactttgcatgtttaggataagtttgcatgcatgtttcatatttgtgttgttttcaggtgattcggagctgttgactagctaattggaagaagcggacctgatcatgcaaaaccactcgacccccaggtcgagtagacgcttcacaacctcaccagaccactcgaccccctggtcgagtagaggacatcaccacttcacctcaccactcgaccccgaggtcgagtgtcttcatccccatcacctgaccatcattcgatcacatcactcgaccccgaggtcgagtgtcttcacctccattaccagaccactactcgatctcaccactccaccttgaagtcgagtatcaccatcaccaccactcgactacatactcgatagcgagcttcagagtcttcttcattccgcagtcaaccagacactcgagcacaaggaagaaaagaagactccagctattcacttgacctctcactcgaccacctgggtcgagtacagttctttatctgtcccaatactgcgtcgttttaagtattagggtttcagaatgtttggctataagtagcatgtacttcacattttcgcaaacaagtttttatctagttttattccgcagacattgtgttctagaccttttgtaatccggatttctctttatctattcagtattcagtatttcttcttgatttcatttactgttgttcatcctgttatcattctgctattacactgttgttatcatgttttcatacgtttatgttttctgcaatgatgtctgagtagtgaataggtttctgaggatgggttagagtagtctagaattctcagtatgctaggtggttgagtttgatttatagatctcttctgtattagttgttcttaatgcctattgctttctgatcaactgtaatttgagcccagacatttccgcgcccaaaaggtgttcgatgaaatgtctgaaccactaattccagagattcgtggccctttaccaaggtattggttgcagggagcgttttggctttaacttgttgatttgtaatgcttgttaggttagctctcgtctatggtgattgagtctgggactaggttaacttgagggtctctgttgcggtagcacttagatttggttaatgaacttgttgtctagggataatttattgagcatgtcaatcacctgtaaactgaggaaacgaaactactcaattaccccatcctcgggaattctttatctgattgattttattgtttactctactgttgtttactgcatcttgtcatctgttgtttagtttctgtaattctttaccgttacttgacctgatactcgaccacccagttgtctggcaacagactgtgcagtcgagtatccctgttatcattttctgtctgttactcgacctgtcactcgacctcacccagtgctctgcaaagagctgtgttggtcgagtgttttattgtttctgcttgaatttctgttttctgcatgttcacttagaactgctagaacacaccaaaacctgttattgcttggcttgacttagtgacttctgatcacatcttgattgttagcatcacacccatttggattgacaaccttcagtactacaacgacatgatagtgctttaggattaattgatcttaaaaacctattatcaaaaacattgatagaagtagaaatatctttaaatagatcgattgagaggaaaactaaacgagagacatataaaatcaaagtaaaagagtagttattcttgattcaactcaaacatgtaacgaatcatataaaattccatagatctctttgatttgggttttgatttttttgacttgaaattcgacaccaccgaaggagtttcggccgaaagagacgagataagtatagaacggcgacgaaattagggttccgtcgactgaacgagagaagagagcggcgttttttttttttttttttgtgcggatgaacagtgaaatatgctgaaaaaataagaaactgaaagttttaagggaatttttggtttcggatgacgtggattagggtaaatgacctggataattattgttatttatttattttttaattaaaataaatttaataataatatttaattaaaactaataaagggtgttaactgtaattacacaagtactgaaaacatgtgagtaataaaaaaagatatgttttattgtatgaataaacatacaattgtgttctatcctagtaattattttaattactaatagatatatttgtttgtatttatagttggatgagaaatataattgactatatcagagacctatatttagttttggatatattgaatattaagtatatcgatgggccatataattgactatattacctattttatatttttgacaatgatctttttatatttttaaaattaataaaagaaaattattgttttacatatttctaaacaaaccttacttcgataatttaaatgttcatattgcgatctaatgtaaacaattaaaattatcaaattcgccgctgaacacggtatcatcattaattttttatcatcaatatacgaattaatgatagatatagttgtctgtatttatagttgaatgagaaatataattgactacatcatatacctatatctagttttggatatattgaatattaagtatatcgatgagccatataattgactatattagctatttacccgaaaacaaactacaaaatcctagtatagtatatcccaaaaatataatatttttacagtatgatatttaaacgttcatatctgtattattgaattttaagaatttatttatatctatcgcaagaatgtataacactttctaattttaatgtgggctagatagaaacaaaattgtgacaatatgagatggtctatatctagttatccacatcatgtaagtttttttatataaatattttatacttattcaaaataatatcaaataaaagtgaaatgatcatgatatatttatgtttaaattaggtagagaggttttaggaattagttcaaatttgttatataagcattaaatcttcatatttttcacttccacttcatcttctttatttttccctatatcttctccattcaatgaatttagtgcctactcccctcataatgatgacttgacctctcttccgaaagcttataaaaccatgacctacgtaactgtaccaatcaaccaaaggcctatgcaatcagcatatcaaatccaatcatggcatcaacagctctctacacttcttcccatccatcatatttttattgcatcaaaagtgtatctcacaaacgttgctaatatattatatatataatcaaacgtttaaccctaaccaattaggattaataatgggccaaagcccaataactctttttattgatccagtttgcttaggtgtgttaccctgtaggtttgtataatattagtaatgagttataactcatagattataagcggtctctagcaaaacattataatcacctaatattatacaaatgtcaaacctcgacattacaactttaactagagtaaagtacaactgatttcaggacattcccaacaatatttttattgcatcaaaataattagccaaaaaattagatcactaacccatgataaaaaaatattcataaaagtataaaacaatgaatggtttcatacataagcttttaagaagcacaaaccatataacaaaattaaatgttcctgtaaccttgttgattattttatgaaataattactagagtagaacacaattgtatgtttattcctataatagaacacatcttttttttattattcacatgttttcagtatttgtgtaattacagttaacagccttgattaattttaattaaatattattattaaatttgtttttaactaaaaattccatgccaccaatccatgtcatttaccctaattcacgtcatccgaaacctaaaattcccttaaaactttcggtttctcattttttcagcatatctcactgttcatctgcgcaaaaaaaaaaaaaaaaaaaaaaaaaaaaaatttgttgctctcttctctcgttcagtcgacggaaccctaatttcgtcgtcgttctctacttatctcgtttcttcggccgaaactctttcggtgatgtcgaatttcaagtcatcaaaaatcaaaacccaaatcaaagagatctatagaattttatatgatttgttacaggtttgagttgaatcaagaataactactcttttactttgattttatatgtctctcgtttagttttcctctcaatcgatctatttagagatatttctacttctatcaatgttttgattcatatagtttcgtcttcctcctatgtatccctcaaacatattcttacgtttcttaatttgattgttgttctttggccaataaatttcatattgtcttccccagaaaaatgttgttttccgatctgtattataactcagccttaacgtgatgtacctcagccgtaacatataatttacacaacctttcgtcttccctgaatgataactcagccgtgacatgtaatttaccgaacctttcgtcttccttgaagcatataactcagccgtaacatataatttacactcatctttcgtttgcccttgaacatataactcagccgtgacatgtaaatttatagatgtcttcccttaaacatataactcatccgtaatgtaattttaccgaacctttcgtcttccctggaacatataactcagccgtgacatgtaaattgactgaacgtttcgttctcccttaagcatataactcaaccgtaatgtaattctatcgaacctttcgtctttcctggaacgtataactcagtggtgacatgtaaattgactgaacttttcatcttcccttaagcatataactcagccgtgacatgtaaatttgtcgcaaaacaataagagatacaacatttcgtctaactttatcatcgagcaccaacttcacaagtttgtcgtgcgttgttttcgcatctatctgcacaagtttacaccctctttcatcagggttaaatatgtatttgtgtttctatactcaattcccggaaacaacaattaccgaaaccagatcaaccatatcgggagaaagatgaaagaaattaaagaaaaatgaggaaaacgatgaggaattagaagtttcggtgatgtgaaaaactcaggtgaagaagacgagttgaaaaaatttgaccctattttttttgtcctttgatgatgctgacatggaatgatgacatgaaatattacagccgacgtcgttttgaattgatgaggtggcaattaagccaccaaacgaacatttgataactcagccatcaagcaaatctataagttagtcgcaacatgaatactattacagtaattaaaaaaggaaaaaaaacaaagttaagtcagccgtgtaatgtcgtaactcaactaactcagccgtaacgttttaaaactcggctgtaactggatgctattatagtaattaatcttttgcacataagtcagccgtaacaaggctgagttatttagtaatcgagctctttacggctgatttataacactcgatcataactcagccgtcacatcattccataactaagccgtccaaaactataactcggtcgtgtcgaggaaataagtcagccgttttctcataactcagccataacgttgtctgggttatcgtataacttcttataactcggccgacattccttaactcaaccataccgttgcctgagttatagtataactcaggcaacattttacaactcagacgtaacgtctggctgagttatactcatacttcgccgttttgttatgactcatatatttttgtcgtaagtcagccgcaacataccgtaactcagccgtaactgtcgctgtatcgcgttacggctgagttcatttaatacacgtcagcaaattctgacgtggcagtggcattccctgtaattatgttttttccggtaacgtttagtaggggcacgctgggtattaagaaaaagacgaaaatatcacagtaattaaaaaaagttctgtctgattctggtaataacacctaaattgttacccaccacagtaaatctcccttattttataccccacgttgagccttgttaactagtttgcatttgtcggtccatttcttctttcgtcaagatcaaccttctcgtaatcaaaacaaaacaggaaacaaacgtaagaggcaaaatccttgtttgtatgaattaagttcaacgtctctgtgttacggttgttaaggcaaacacgatcccaactagaaatcattacgacgtcgttgctttgagtccacacaatctgacctaatccaatgcttttaatatctttcacttttatccacgcctttcctcacctgctctttaaaacccataatccgtgataatcttcttgatctttgtttatccagtgacgaataagacctagcttcccttcgtatctgaccaactctatgaaaataccaaagttggggatacgtaagaaagaccaagtttcagttttgagacataaccggatcacattgttgttccatgatctccaatgcaagaaccccgaagcttgtaccgggtttgaaagaataaaacggtctgttattggtagacgctgattttttaacctcttccacataaacgaatcggaataaaaaacttggcacccaaaagtactgaaacgattcatacccggcgtgttcaacccagttaccgttataccgagttacttatcacggctacacaattttgggtttggcatgatctgatactattttgtggttggtttgaagactatgtatttagatatttggcctgtataattaacaccatgcaatatcatgtgacttgcatcacaagctttgatcagggagagcgaaagttcaaagcttgtgatgcaagtcatgggatattgctttgtgttaatccaccatataaagaaaattaaataaattaacaaaaacatctaaattgcaaagaaattcataaacattataacccaaacaatgatgttgtcaacatatattagatatcaaatatagaagaacaaaattaagactaaaatgtgtaagaaatttaaaactaaaaatggaagaactgacctaaattgcatggctttggaaactcatcttctaaacttattcatcacctagacggtcaacttgttcttttttgacagctaactcttcctcttcgaaccaacgcaaaaccttactcatcaacgtgtaatatggtcatgtaccttaattttttgctttcaattatattaagaaaataaagatctaaataataaaaaatgcatcaaaataataaaaactgttttgcccagaaaataataatgaaaaatgtataatttgtaaattgtcttgttaaaatcattgcattaaaaatattaattgttataataaatagattggactaaattttagaaagtgtcaaatgtggaaaagaattattttgtaatcacacagtttcatatattttatattttttgctttatattatttcaaataaataaatatctaaataatgaaaaatgtatgttgtgtaatgataacactgtattttactcatttaggtgtatgtttatcatcatttagctttacatttgctcattgtatcatgacattttgcaccattttagcttaatttgcatacttaggcatctaggatcatcttgcattcgcattgcatgttttggtatgttttcaggtgcagaaagagctaaaaaggactctactcgatccattcactcgatccaggcagctacagaagaggcatcattctactcgacctctttactctatcgaggatgctacaaaggaggttgtagtttactcgaccctcctactcgatcaaggcaacctcagatgaagcagcagattgatctactcgcccctcctactcgatccactactcgatccatttactcgaccaagggtgaccaactctacaagacttgttgagctatcaaagcgtcttcggatcctcctcattccccactcaaccagacatctgagcatacaaataggagaggatgaagcatctactcgaccaattgatcactcggagtatagacacaaaggcgcagactttgcaacaccctctttactcgatccccaagatcgagtattcgcccaaaccgcctcaagtctcttgtcttctagtgaatctagggtttccaacattttagtataaatagatcactttgggatttttccaaaggatctatgctttatctttcagtttttctttgtgtttatgaatcttgaaaccttaattactcttaatctatttcgtttttgcaattgattgtttaagtaaagttgtttagcttgtttagatctacattttggtatgattttagtaatttctgggtttatgttcttaagaatgttgcttgagtagtgattagggttcttaaggatggattagattagggtaatctctaggttcgttaggtggttagtgtttaggtttatgtccttctggattcgcttggcccctatgcggttttcgctggctaatgtgaagattcgatgacgtccagcgtccaaaagacgttcaaatggatgtcggacctacgaattccagagatttgtagactcgacaaggagagaggcttttctgcctattggctttggtagattgtttcttaaaccgtctctgctatgtttcatcaacgagagttgagattaggaagtggtagagttatgggggtctctgtcacgagagtggattgaccctgtttttgaatctatcgtcatgggtatctacctttcgcctattagccatttgatgaatcctagagttgcccttatcaatgaatccatccttagaacttctattacatttatttgtattccctgttgattgcacttttatttacctgttatttgtatcccctatttgtatcccctgttgattgcattttagttcttaattttgtcacatgttggttctactcgacccaatgatcgagtagggctcttaagttctcatttttacttgttcgaatcctgacctaggattgttactagaaaccaaccatcattataatctgacttgacttagtcgtctctatacacatcttgattgctaacaatacagtggactggattgacaccccctataactgcatcgacatgtttgtgttttaggggaattgaactgaatcacacacatctagtataagtaggcataaaaacatgtatatcaatttggcgccgttgccaattcattgttgcattgttacattcaagatatcagaaacttttaagatcaagttcttttacatttatcaagttactaactcatattttcgtctgcttgtttttgtggtataggtactaatctttgtgcatgcaaactcgatccaaaggttctgcacacctactatcattcagagacagaattgacagaattgacagaatagctcgtgagttacaagaaaccaaagcaaaggcagtctgtgatcagcaaagaccagctgctatggatcaacagaacagaccagttgatgttcaagacccacctaatgttgatcaaccaagaaacattggtgctggtgatgccccaaggaatcatcaccaaagacaagggatagtgcctccaccagttcagaacaacaattttgagatcaagagtggtctcatctcaatgatccaaggaaacaagtttcatggtctacctatgaaagaccccctggaccatcttgacagctttgataggctctgtggccttaccaacatcaatggtgttactgaagatatgtttaagcaaagactatttcccttctctgtgggagacaaggcacaccactgggagaagactctaccctcagactccatcacctcatgggacgattgtaagaaagcttttcttgccaagttcttctctaacgcttgcaccactagattgaggaacgagatctcaggtttcaaccaaaaaaacaatgaaactttctgtgaagcttgggagagatttaaaagctacacaactcagtgcccccatcacggtttcaagaaggcttcattattgagcacactctacagaggagctttaccaaagatcagaatgctacttgacactgcctccaatggaaacttcctaaacaaggatgtagtaaaaggctgggagttggtcgaaaatctagcacaatctgatgggtgctacaatgaagactatgatcgctgaatgagtggaactgaaggaagtgaggacaaacaaagcaaggatatcaaggctctaaatgaaaagttagacaagttattgctggctcagcagaagccttgcggtatccaattgatattagctgaaagatcagtcagaatacctcatggaattctcacagacctgcctgttaaagtcggatcaataaacatccctactgatttcgaaatactggagatggatgaggagccaaaagacccattaatcctaggaagaccattcctagctactgtaggagccattatcgacgtcaagaagggaaaaatcgacctaaacctggggaaggagatgaaaatgaccttcgacattaacaaagctatgaaaaaaccaacaatcaatggacaagtcttttggatcgaagaaatggttagattggatgacgaattaccggaagaacttacaaaaggagatcacctagccagtgccttaaccaacgatggagaagaagggtatctacacttagaaacccaagggtacaaagagtatcttgacgcccacataccaatggaagaaccagaagagtttgaggaattgattgttccctcagaagaagtagtatcaggatgcaacatgagcctaatcgctgaaaaagcaaactctactgagatgctcgaccatggaggagagaatataagttcagatgacttgtcagaactcaaagctccaaagcttgaccttaagcctcttccaaaaggtctgaggtacgcgtttctcggtccaaatgatacttatcccgtcattattaatgatggactaagtgatgaacaagtgaaccagttgttgaatgagcttagaaagtatagggggcaattgggtattctttagctgatattaaaagaatttcacctagtttatgtactcatagaatccatcttgaaaatgaatcatctactagtattgaaccacagaggagattaaatccaaatttgaaagatgtggttaaaaaggaaattcttaaattgcttgatgttgatataatctacccaatttctgacagtacatgggtctctcctgtgcactgtgtatccaagaagggaggaatgattgtagttaaaaatgatttagatgagctcattcccgctagaactataacaggacataaaatgtgcattgattataggaaactaaatgctgcaactagaaaggaccattttcccttgccattcattgatcaaatgttagaaaggctagctaaccatgtttattactgttttcttgatggctatagtggtttctttcaaattgcaattcaccctaatgatcaagaaaaaaaccactttcacctgccctaatggaacctttgcttataagagaatgtcttttggtttatgtaatgctcctgggactttccagagaagtatgacttcgatattctcggattttattgaggagataatggaggtattcatggatgatttttcagggttctcctcatgtttgttaaatttgtgcagggttctagaaaggtgtgaggaaaccaatttggtactcaactgggagaagtgtcacttcatggttcatgaaggaattgtgctagggcataagatttctggtaaaggaattgaagtcgacaaggcaaaaatcgatgtcatgattcagctgcaacccccaaagacagttaaggatataaggagctttctaggccatgcagaattttacaggaggttcataaaagatttttcaaagattgctcgacccctcactagattgctgtgcaaggaaactgagttcaactttgatgaagattgtctcaaagctttccatttgataaaggaaacattggtgtctgcccctatctttcaagcacccaactgggaccacccatttgagatcatgtgtgacgcattcgattatgcagttggagctgtcctagaccaaaagattgatgacaaacttcacgtcatctactacgcgagtagaacgatggacgaagctcaaacaagatatgcaaccatagaaaaggagctattagctgtggttttcgcctttgagaaaattagaagctatttggttggtttcaaagtgaaggtctacatagaccatgcagcactaaggcacatttatgccaagaaag

SEQ ID NO: 199 - DNA, 33329 bp, Arabidopsis thaliana
accctaaccactattttatcaacccaaacctaaatataatttcgttttaatcacaaaatctaaaccctaaccactattttatcaactcaaaccgaaatataatttcgttttaatcacaaaatctgaactctaaccactattttatcaacccaaaccgaaatatgatttcgttttaatcacaaaatctaaaccctaaccactattttattaacccaaaccaaaatttaattttgtttaatcacaaaatctaaaccctaaccacttttacatcaacccaaaccaaaatataatttcgtttaatcacaaaatctaaaccctaaccactattttataaacccaaaccaataatttctttaataatagttctacggaatttgtttacataatttgttttatttattgattttaatttatttattctttaaatatatgacatgtcaagttctaattggtcaataaaaaggggatgaatgaatgaattcacctcgtagggggtgaacccaagtatttttctaaaagaaataaaaaataaaacatgttgctaacaaaactaaactaatgaaacaatttcctttcttcatcctcgtgttcatctccctcgatctcgatcccttgaacaataataatagaagagatcctaaaatcaaagtccccatttgccttaaaatatgtctaaggactaaagttaaaagagcgtattttctttggtggtggtggtgactcatttccacaagtctcgagcagcttcaatccgattttcgaggaatataaacaaagattcaaattgatgaacaaaaccattcgacgattagaagtcatattgttgtgaggttggttttgatcttcaattatgatgtttcttcgctaataccaaaatagagctttctttgtgaaattaatgaatttaagatgttattttaagttggtttatgtgtcgtcaagcatggaagtgaatcttgttttgtttatgtgtatatctttgattttcgtggttgatactaggtaaaactaagagctctaaaaccttatgtattgatttggaagaaagtcgtaagtaaatttaaggtttataacactagatttttgaaattaggttgatggagaggcttaagtttttatcttgagctcgatcaaatattccaccaccgtcaaacgtcttttcgaacgacatatttaagaagttaccacaaactagagaaaattataaaggcaaatttttgtgttgttatagattggctagttacacctggtacttattgatggttgtcccaattacttttaagtctttgaatgatttattgatttgactatgcggtctgcaatttttttttaaaatcacaattttttattcttatgctaaaaatctcatcaaatcacctaatattatctcgttaaaagttcaccaaatcacaaattatattttcttttttacaattaaaaataacaattccaccataagtattctaaatcctcacttaactctgtacgaatccaagattttctaatttctaccaaaccctcccaaatctttgattgactatacccttgtagtgtcgaagctagaggatttaaacaactaaattgtatgatggttgtttaaaaaaaatccttaatacagtataagtattaatttgatcatataccctaaattgtattagaaatttgaaatgtacacattaatttttaatccctttattattaaaagggaagtacaaattgaaattttgtctaatttggcttcaattttgaattttgttctttgctattcaaaatcagtaaaggtaatttggtcttaacaatctcctaaactttatatgatccaattcaatctaaaccgttcaataaaattaattcccttcaatctaaaccgttcaacaaaaataaggaatctatgtcgtttttgaaatcaaaatataatcacatttcatccttaaaaacactatattcaatcacgaaatcaataatcaataatatcccaatcatatattacgattcttcactaatcactagaaatttatatttataagtttatgatatcaaacttattcaaatatttaatataagaaccaaataaattgattgtccgcggtaaaccgcgggttaaaaccttaatttttttaatttttaatttttaagcatttgagatgtaccttaatgttttttttgaaaatttcctttccatccttattaataactaaatttcagaaaacaaaataaaaaaaatataattatttttacaattattatttaaaataaaatttaataatccatgttaagatttttgttatactagaatttatttctgtttggtcaaaatttaaaataatgatgttaatgatgactctcattactatggttaataatttaaaagtaatcaaccattacaattaaaattcagattaaccaaaagttcaatcaataaaagaagtgaaacatatacttttttttgtggacaattttattagactactttggataaggatatattttatattaattaagaattttcaaaatattatcaaaagtatttttttctttcaattagttaagatttaggatatttttatttataatttatttttgggttttatttttttgcaaaaaatgttttaattacattttcttgcagttttattctttatctccaaaataaatttgtcaaaccatgaatcaaaaagtaaaacaaaatataagaaaattaacaaaatttttaaaataatatatcaatcaaaactcttgcgacgagaagatcaattctagctttaaagttttaaaaaatcaaatgtaggtgatcataaggatgtttagaaactatttatgggcgttatagtactttataggattgattccactttgaagagataaaacgtaagttgcaaaaactgactaaggtttttttttcttgtttctttgttttggtcttaaattagagaaaaacataagctgtttctttttaatttaattatgaaaagtattaatttgaattttataaccaaattattaacttgattttcagaaaatcatacttcaaaaatcaacaattaagtcgaaaaataataaattaaacaaaagataagctaattattttaatataagtcaactagattttaacccccaatacactgtatgaacaatttcttttttaaagttagtatatataaaagtttgcaaattgaatctatctataaaataattttattttatagtttacaattgttattaagtaacgtcctgccgaacccgtcccaccaacccgtcccgttaaaaaaactcaattttttattaatgctgatcttatttatgataagtttatgaatcattgtctaaatattttgtaattttgtagtatttatatgctataaaatatctctacggtttgttgattataatcaaattattataatcatgcagaaaagcaatatcaaaaataataatttgtaaaattattccaacaaagaagccattgaaaatgtaatcgaatcaagttatagtattttaaaatggtgctttttctattatcgtgtagttaatgcaatatccaagtaggaagtttttcctagcaagtataaatctttagaaaaaagcacaatcgttgcatcgatttccgtgaaactctctcttttgcggaagagtttcgtttcttagatctagtccgctgttttttctttgttcttcaatcgttggtcaaatctactcaatgaaagtccaggagtgggctgaatctattctctgtcaacggtggtgtggtgttttcccctcgatgtggatgtggctcgggtctgttggaagggagttctacagcgtttgtcacacggttattgacgttgtgggttgcttcagttgctccggctcatcccttagtcttgagctccgcccacggcggaagttggggggataaaggagggttcgttgttcgcacggtggttagctgcagatgctttggatcttagagggctgttgtggatttcgcgtttagaggttttggatttgagtcaccagcttctagatccactacaattttgcatccatcgagtcagattgaatcgtgatagcttaagaattttttggctgttctcggttgggagagaggggttactgcccagtgggttgggttagtttttcaggatccgattacgtcgatgtgcctaatttgagcgactaactttccgggagatttgtggtgtgttggtgcttcagaggggtggatttgacgaagaaaaccggtctctttcatcggagaatcccgatctctggttgctacctcgaatcggtctttaatatgacttaggtacggtaagcacaccatcaaaccgattaagactaaaactttgaaaatttctcttcaaccaaaaacaatatgatctttcacattcttcagcctgtttctaactttaatctatgtatgaattgatttatgcatattattcaatatatagttgtatcatatacatgatctcagaacacttggtcttgcccacccgtgcaaggcagaatgagggtttggtattttgtgttttttttaggaacccacggcgcgggtcaacccctagtgacagtatactctttgacaaaatattcttggattcacccctagggatgaacctatcatattcacccttcttatttagtcgatcaaattacaacaatatgtcatgtaatactatatttaaaaatcaatcaaaataaaaatcacaaaataaaaatattaagaaaacaaaatctatatgcttttaattaaacaagattaattatatggcggtttgagtttataaatatgaattaggatttagatttacaattaattaaaattatatgttggtttgggttaatagaaaaatgattagggtttaaacgaaattatatgttgatttgggtttacaaatattgattagggtttagcttttacaattaaatcaaattatatgtcagtttggatttatcaatgaggtttagggtttagattttacaattaagcaaaattatacgtcggttttggtttatataaaaatagttaaagtttagattttacaattaaatgaaattatacttcggtttaggtttataaaagagttgtaagggtttacattttataattaagggaatgttcaacaataaggcacgagaatcattttccgagacactttttacactaattcttatattttggaaatttgtacccttaattcaaagaaatgtaattggcttagttgtgttgcaaaaattattaaattatattgttcatcacctcttcttgtaaaacactgtgactctctctctctccgaaataggaatatccatttttctcaaactaaactaaaataatgtgggtggttgaattggtgaaagaccaaatcgccgtaaacacccgcccacagtcgtcggttttggttctggccagatctaatatggtggcttcattcttcctcctgatctcttaatttgaatcggttactaggcttttgctagtggcaatggaagtgagcgatgggtcgtctcaagttttaaattcgatgaagcatgttgcgtctctgcgcgccgatgaagatcccgacgagacctcccttctactttcctctacgctcctcgatttggttgtgtttaggctcgtgttggttttgtattgtgttcgagtgttgatgttggatcaatatcaagaggtaattatgtaggagcttgatggtcaaagacaatagcattgtctcaagaggtaatgatggaagacggaagacgtgagtttaacgtaccgatgaactgtccaatacccgtggtgaagcgaagaatgaaggcaccaaagcatgtggatgaagacttgttcaaaatcttcccacaggccacaacttatctccgtcaaatccaaaagggtaataaaaattcttcaacttgttatagtttttttttttatcttagttaagttgcttcgattattgtttaaaggttttgagtattgaaaatgttaataattgaaatttgcaaataaaacgaggaggtgggtctgggtgctttgaattcataagaggagaagtttgcacgaaagacttgagtcagaacaacactttttattttattttttaatattgtaagaactatgcttgtgaaattgttatgtatgaaaaaaaaaaaagaagaaaattgttatgtatgtatttatttatgcttaggacaaaaagaagatgaattctaaaagatagtagaccaatgtaatttttggtaaatattctatatccataaggttttggaagtggaggtctctacaaactgtaagaaaaatcaatatacaattttttggtgtttataataacgagtccatttaaatatatccattcggaaacctttttaccaatctatatccattctatataccatgtccataataacaagagattcgattaatcgtggtttgtaaagaaaccaaagttccatgtccataaggtcttggaagtggaggtctctacaaactgaaagaaaaatcaacaaacaattttttgatgtccataataacgagtctatttatatatatccattcagaaaccttttattgattcatatccattctatataccatgttcataataacaggagattcgattaaccgtggtttggaaagaaaccaaagtgccatgtccataaggtcttggagatggaggtctctgcaaactgaaagaaaaatcaacaaacaattttttgatgtccataataacgagtctatttatatatatccattcagaaaccttttattgattcatatccattctatataccatgttcataataacaggagattcgattaaccgtggtttggaaagaaaccaaagtgccatgtccataaggtcttggagatggaggtctctgcaaactgaaagaaaaattaacaaacaattttttggtgtccattataacgagtccatttaaatatatccattgggaaacatttttacttatctatatccattctatatatcatgtccatattaacaggagattcgattaaccgtaatcttgatgctacgtagatgaaacgaatttgacccatgagagagagcaaaaatcaaatcaagccaccattgttgaagaagaagaagttttttaaaggaactgaatctcaagtttatatcaaaacaaagatttaaattgcaaaataaatcacaatcttaaaaaaaacaacggctatgactatccaattaagataatttattctttggcttgagaataaatcaaaaaccaaaatcaaattaccacagccacccatttgctcaaggcggtggaggaacccgtggtggaggtggtggcagataccgcagcggaggcggtaatgaatacggaggaggtggtggcggaaatggaggaggcggtggtgattacgagagacatagcagaggttgtggtggaaaaggatacggtagtggtggccgtgagggaggtggctaaggaggaggtgacgttggaagctacggaggaaacggagtgggggttagtaatcaaagatagtcttgttttgtgtcaccgttagattgttgagagatagggaggatgatgataaaccctatgagattcaaatttaaattttgaattatgaatattgaggttgtcctataatatttgattttgattctggaaaaaaagagagagatgaagaagagaagctttcgtaagagaggtggcgaagaacagaagaaatgttgctaaagaaaacgagaaaagaagtttgagggcaaattggacaatttaacaagtcaaagtgccttctcctttggaagtgccttctcctttggaagtgcctaaacccacaaatttttgtaaaagtgtcccactgtgtaatattttctataattaaatgaaaatatatgtcggtttaagtttagaaaagaatggttagagtttaaattttccaattaatttaatttaggggtttttaatgaattgatttatttaatattaattgttttaatttggttaattagatgatatggcaaatttcaaattagttaattaagagggggtgaatgaaagatgttcaccccaaggggtgaacccaataattgttcttatttgagtgggtcatgacaaaacgtcaattacatgcctcatcccgatgtagtcaattatatgcctcatttatatgcttaatattcaatatattcagtttggaaactaacatttatgttacaccactaatttttaagtaagtggatatagttgcatcatataatagattatatttaacatatacatcgatatatctacatcggccttggaaattataataggattttgtagcttgtattcagctaactagaaactggatatagatctctaatgtagtcaattatatggctcatctttatactgaatattcaatatatccaaactggatatagatctctaatataaccaattacattccacatccaactataagtatagacaatatcaatatatccaaactggatatagatctgtgatgtaatccgatatattccacattcaactataaatatagacaactatatctatcatatatatggctttcttgcaccaacaagtatcttctgcgaatcaaatctcccctgattgtcatttatttaacacttgtttctacaagaagctcggggatatttacaaggtgattctttctcctaattatatcaagaaaatgttccaatggttttcctaacgcattatgtttatttttttatttacaatcctaagttctcgtgatgtttaaaggctattgtcttatactttgatcagccatatgtaaaataaaaagtaactataacaatgcgatactttcgaaaataatgtatatcttggcattcttgtgattcacaatttttgttacttatgtcgattggtatgtcttttccttgtaatgagataggggaatcacaagggtgccttatttgccaagttcaagaagtggtggaagcatgttatgagatatgagcttacacaatatatcaacatgcttccaccaatacatgatgtggaagtagttttccttctacccctgcaattacaactttacgatatgagcttaaaccaaaaactgtcgtcactgtctctctgatggaaaaatgataaccctttttttttgtcattaaattttatttagagctcaaaagagccaattctgaggaaaattgtttacaaaagtgatatgaagcgattcagtacaaattttttcatgccaatttgtctgcttttacatttgcatttccagaaattaaagataaagaaaatcttgtgaattcctccaaatacgttgaaaatgctagccattcggttagggaagacaccatcttcaccaggtctgaaaagtatgtaaaaaatgctacttcttggttgtcggcaccaataatacacttcatcgcccagagtagagtttcgacttctgtatgtagtggagaaagacttctacgaagattagcagctcccatggttggcgagtctctatttgatgatgtgcaaaaccaccctaatccagaaaacttatcgcttcctttccaagatccgtccacaaaacaacgaaaacctgaataaatattatcgtgtgatatattctggacccgaatttgtttttccgatcccatggaaccgttatttttggtattgagcttaaattgagctaactgccataattgtgcctctttttctgctaaacataatacgtctaacggatctttatccacattttcaaatatttttttgttccttactttccaaatataccagattatctatggaaatgaagatgaatctaattctgaaggtattcttgagaataagtgatcaaaattcgtaaaaatagaatccgtaggaaaaattcctggaaccgtaggaatctttgagagggcccatctgtctcgccggatgacattggaaaagggtacggtttattgtttccgtaatagcgccacatctgacacatcctgtatcacaattcttctccgtaaattctctgtgacaaggacacaaccttaggtggacattgaactttccaagcatgtgcttttagaacatttatttcagtaccaatgaaagatgaattatcctcccagttttctaaccttggtgtatgataaccagatttaactgtatattttccggatttggtgaaatgccaacctagagtatcctcttttgttgatgcacccaagtgcaatgcacttattagctggacatcttccggatcaaagagctccttcaagagattagctggctatctattaaatgttgaacttttaaagatgggtcaataattaaacgattacgtattgctggtctcgggaattgagccgaaatccacagatccttccaaattgagatggatgcccctgaaccgactcttttaataagtcctttattaaccagagatcttgctgaacaaatatttctccatccataagacggagaatatgattttatattttccaaaggcttcgattttcaataatatctccctttgaaaacctttgcagaaagagaatcttgaaccattatcaaacgccataactgtttcgatagtagagctgaattaaaatcatctatactccgaaaacctaaaccaccttccaatttgctactacacaatttgttccaagccatccagtgcatacctctagattcaccgttcgaactccaccaaaatcttgcgaccgcagttgttagtttggaagtgattgttttcggaagcctaaaacaagacattacataagatggcaatgtcgtagctaccgattaaatcatcacttctttctctcctctcgataagaattttgccgaccacccatttattctagtctgtaatctatctcaaacaaaagataatatttttgtcttagaacccctagactttccggtaacccgagataagaacccatgccaccgatatcatgaatacccaaagtcgatttaatttctgcctttatagaatcttctactttatgaccgaactggatcgatgattttgaaaaatttatcatttgccctgaaactgcttcatattgttttaagatatttaaaattactccgcattgttctttatcagccttacaaaagtaaagactatcatacgcaaataacaaatgagatactgaggggcttgcagttgctactttgatgcccgtaatcatttttccttgttttgctttccgaatattcgcaattagaacctctgtacagaggataaataagtaaggagaaagcggatctccttgtcttaaccctcgttctggtattattagtcctctaggttgtccattcagaaggaccttatattggactgaagtaatacacaacattatccatgatatccacttttcacagaagcccattttcctaataattcgtcaagaaaattccattcaaccctatcatatgctttactcatatctgttttaatagccatgtattttcctttacatgacggattagttcttaacccatgaaacatcttctatgcaataagaatattatctcaaatcagacgtccttcaacaaacacagattgagtttccaaaataagagatggtagaaccgtcttaagtctttgacaaagaatctttgaaataattttatacccaacattacaaaggctaataggccgtaataccgtcatatgtgtcggtcgctttgtttttgggatcaaacatatatgtttgtatttaaccgtttatcgaatactccattttgtaagaaagagtttacaagaaataataaatccttttttatggtatcccaagctttctgaaaaaacaatgttgtcataccatctacccctgttgccttttccgggtgcatcataaataatgttgcacaaacctcactttttgtcgcgggacccgttagttattcatttatttgatctgttattaaagtccgaacttctgccaaagaatcctcaaaatcttgaggattagtcgtagtgaacaaatcctcaaaataagacaccgctatgtgttgaatatcttcatcctctacagaccattttccattttcatcatgtagcccggttatccgattcctagtccgtctctgctttgttagagcatggaaatatttcgatttattatcccctaatgtcatccataaactcctactttttgataccaatattgttcttcatctctataagcctctttcaaccgtagtgttaaatctgtaatctcctcccgtgttctcgaatcatccctctgtgccgcacctaattcagatttaatttcctttattgtctttcgtccataaggagttaatactttccaccattgtgatatagcccgcctacaattagataatttttccacaaattttccttctcctaaacaggtagcgagattccaaccatatgaaattgcctcttgcaatccttcttttccaatccatcttttatcaaacctaaaattttgtttcccgcgtggtatcttatccgtaatcgtagctatcaccagtgcatgatcaaaagccaccatttgtaaatactcaataaaagaattactgaataaataatgccaatcttcattagctaatgctctatccaacttacatcgtattggttttatatctcactaatcccgccaagataaccaatctccaagatgagggaactccaaaagtctgcaatcttgtatcattaaattgaaaggtataaacgaagatgcatgtggtaatttaccccctcttttttcatgatttccttttaattcattaaaatctcctactaaaaaccaaggagtaccccgagatataccgattcgtgttaaccgtacccaaacttgttctctgttttttggaaccgggtctccataaacaaaggtaagatttattgtaatacctttataaacgacttcaatgtcaattaaccaattactttgataaatgattgtgtcattaaaatcattattataggaaagagctaaaccaccactgcaaccaatagggtcaactgttgttaagtttttatacccaaaatgaccaacaaagttttccatataagaagtagattgttttgtttccgataaaaataaaaaatctggccgatgttttttccataaatcccgtaaataaccgattgttgctttattccctaaaccttgacaattccaacttaatactatcttcatataatattttgttttttcaaaagggtgctttgacccttccctaagaccatttccgctagcatagatcctcgggtaaaatccataaccgatttggattttaaacttatgttttttcttatgaaaaccaaggcatatttatataaaagagccatgcataacccattttgaaattccccgtaaaatattccgttaaccattaccgaagttaccttgaaagtaagagtcaaatgacacttaattattaaaattatatttaatttggtcataactccatccttgataaagaaaaaaaaaaatcacaaccaaaccattagtataactgctgatatttctttggtttaagaatttacaacagtacatgagaaccagaaatttcgaaaccggaacatacaccaatagccaatgggtaaaaaatttcccttgtattattactttgagctcatagatgatatgaaaaacataaccaaactgtaactgatatcttacattgaaacataaacagactatacaaaataaaatcggatttactgaacaaaaccggaaattgaaacaacattgaagagcacgttcttgtaaagaatttatttctatgaaataaacttttcaccactcacccaaccagccaaaaggacacatcactatgattaatgtttaataggaggtttctctctttgatgagaaccagcacccaccgttgggccaccagtttttggaactggtcttttgcgaggtgatgtcagataattcctcttcctagagctaactactgtcaaaaatcgtttatttttacccatttttctttttgcaggttgatccgtctccaactcatcttctccctgagattttccctccatttcctcctcatgtgcttgctcatttgggacattctccgaaacagaaaccatattaacattcatctcagagaccgtgttgattgggagcagaaccacctcaagtttgtccccatcaaaattctcttcatttgcagcgaaaaactctccatcctcatgggttagctccacaccactactttttttatcctccattttggtatccataaattgcaaagaagggtctccttcaagaggagaactttgagcaagcaactgacttaaatcatcagagaatagatcatgttgctcagccaactcgagagcattctctgccttgttttgaatagtaacttcttctggacccgaaaaaaatttcttacgtaccaccttacttggcatcgtgccactaagaataccttccatattagcacctagagtacccaaatctgtcaccgtcttccccgcttcaggagcaagaaaagcctccagcatcttcttctcatgatccggaaaacccatccccacggtatctgtttgtagttgggataacttagttacctgaacagccatttgagatgatgaagcttggacaggagccacaaatagattccttctcccctttttagccttaataccagagatctgctttgatcggttatagctgtcctgaatagatgcatccttcttatcaattgaagtcagtccttgagaaggttcagcaaagacagccctagtcgaacccgaggaagttccaggaactgaaccattaatggcagcacctttgtatctttgaagcgtattatccctctttggatcctctttgaaaatactctgcttccccttgtccccaaagatcggacatcgcatctgctcatgacagagactataacatctttgacagaagccaaaaagtctctcataccacagcgagaccattgtctcttcgccactatgaaactctacagccgcctcaaaacacaatggtttaaaaccatcaagtttaacttggacccttccaaagtccaggtccaccgcttgaacctcacctatatcggaaccgatacaccgaaaagtttcatctgcccagaaatgtagaggcacccccaatacccgaatccataaagtaataagaaaagggtatctccggtccaccacttgttcccacctaaccaaagacaacatccaatgatcaatgaaatggttccacttccatgatctcctagatatcctcttcgtgttcaaaatcgaattgaaaacgaccttgacccaagttagcaccaacaactctatcctctaatttccaaatcttaggcaacatgaacagcaacgacttcatgtcttgcattgctggattcatacatctgccgataagagtcttggaatagccctcgatcaaagaactgttatcaaaacgaggaaccttgatcttaagcttcatggtgttactcacgttgctgccttgattaaccaaaccgctttgcgacatccctcttcctaacccaaacaagatccgaacaaatacaaacccaagagaacgagcaacctgaaaacactcaataaagctgagtagaaacctttgaaaaaactcttgcgacactgagactgtaaaaaatgattgcgatgaggacaaccatcagttcgtacctctgatttatacaccagcagatccgctgatgttaattcctggaaccccttgatagaagatattatttccaaaaaaatcacctgatattaagtcctaaaatctcgatctatccccactgtaaaaactcggattttgtggccgtaaccaagacgaagatttctcttcttatgacagctttaatccctcttcaacctttgattgcgagattgtaaatctcctttgccatagatatatcgttatgtcatgaatcaacgcaaatcaaaatcctaactttggatcctaaccaaagccaatgacgatttgtgccttctcagagaaacccactctaaatcccggagcttgatcatagagaatcccaacagatctacctttctccaaatgaacaacaactctcgtttgaaagagattccttattacaaaagataaatcaaaaccttgaatgaccgtgaaaacaaccgaagatctctccttgagatcaaacaacaacactagaaaaataaccatatcaaatctgaatagaaacaaccatcatcgccgcctcaaaaaaaaggtttagagggagagagaaaaaaaaggtttagaggaagtaaaaataaataaatatatctttacattgttttttacattgtttaaagtttctaaggaacttgtgttttcactcttatttgtgcaccatgtttccgtgcccactggcctcggaatcgtttgtatcccgtgttggatttagcttgaaggattaagctcgaataaagcttaagaagaaagtaatactaaaccgagttatggtttagatcctaaccgagttatggtttaggaagtgataatctcaaatctctttaggagttatcttaatatatgttttcctagtaggattaggactagagttttcatataaatagaggtgctgagttatgtcataaacaagagagttgtattaacagtcatcctgaagttcctgaagtacttgaccacaacctctacagcaaatcactcgaccacgacattctatccaccactcgaccacaaggtcgagtagacgacttccccacttcacaacaccactcgaccccttggtcgagtagctgccttcaccatcatcattcactcgacctatcactctaccaacatggcagagtatcaccatcatcattgactcgagcaatcactctaccaatatggccgagtatcaccatcatcattcactcgaccaatcactctaccaccaagtcgagtactacagccaccatccactcgaccaatcactctaccacatggtcgagtcccttatcatcattcactcgacgtccttactcgactgccagcttcagagtcttctccattccgcactcaaccagacaatcgagcacaaggaagagaagaagactccagcttatcactcgaccattcactcgaccacctgagttgagtatcgttcttaatccgtcccaatactgcgtcgttttgagtattagggtttcggaatatttctctataagtagcatgtattttacattttcgaatctaagttttatttttcgtagacattgtgttcttgatcttttgtaatccggatttttctcttaatcgatatagtattcaatattcagtattttgttcttgatttcgtttactgttgttcatcctgttatcaccttgctattactctgttgttatcatgttttcattctattcaacgtttatgttctctgcaatgatgtttgagtagtgaataggtttctgaggatgggttagagtagtgtagaattctcagtatgctaggtggttaagtttgtttgatagatcccttctagattagttgttcttaatgcctattgctttctgatcaactggaatttgagcccagacctttctgcgcccaaaaagtgttcgatgaaatgtctgaaccactaattccagagattcgtggccctgtaccaaggtattcgttgcagggagcgttttggctttaacttgttgattcgtaatgcaagttaggttagctctcgtcaatggtgattgagtctgagactaggttaacttgagggtctctattgcggtggcacttagatttggttaatgaacttgttgtctagtgataattttttgagcatgtcaatcacctgtaacctaaggaaatgaaactactcaattatcccatcccgggaattctttatctgattgattttattgtttactttgttgttgtttactgcatcttgttacctgttgcttagtttttgcatttctctcctgttactcgacctgatactcgaccactcagttgtctggcaatagactgtgcagtcgagtatccctgtttcgtttacggcctgttactcgaccaactcactcgaccacacctagtgctctacaacgagctgtgttggtcgagtgttttactgtttctgtttgattttctgttttctgcatgttcacttagtactgctagaacacaccgaaacctgttattgcttggcttgacttagtgacttctgatcacattttgattgttagtatcacacccatttggattgacaacctaaaatactacaacgacatgattggtgttttaggataattgactaaaaacctattatcaatttggcgccgttgccaattgggtgtttgtttgttacatttaagatttcagacttgcttagatcaagttctttttccatttttttttcaattactaactgtgtgtttttcttgttatcttcttgatccaggtacacctcttctatatgcaaactcgatcaacaggcaatcagaacctccttttcaacgacaatatcgaccgcttagctcgcaaaatcagagaaaggagaaacacagtcaaccttgtacctcagcaaccactcgaaatggctgatgaacagaatcaacagaatggtcctgccaacattggtgcttgagatgcaccacgggaccatcgttagaggaaagaaattgcacctcatgctatctagaacaacaacttcgagattaagagtcgtctcatctcgatgattcaggggaacaaattccatggtctaccaatggaggatccactcgaccaccttgatgaattcgataagttctgtaacctaacaaaaatcaatggtgtcagtgaagacagattcaaactccgtttgtttccattctccttgggcgacaaagcacacatctgggagaagaatttgccccatgactcaatcaccacctaggatgattgcaagaaggcttttctatcaaagttcttctccaacgccagaactgcaagactcagaaatgagatttctggtttttcacagaagagtggtgaaagcttctgtgaagcatgggaacgtttcaagggttacaccaaccaatgccctcatcatggcctcacgaaagcctctctgctcatcactctttacagtggagttctaccacgcatcagaatgcttctggatacagccaagaatgggaatttctagaacaaagatgttgaagaaggctgggatattggttgagaaccttgctcaatcagatggtaattacaacgaggactgcgataggaccgtcagaagcacatctgactttgatgacaaacacaggaaggagatcaaagcactgaatgacaagctggacaagattcttcttagccagcaaaagcatgtgcacttccttgttgatgacgagcaatatcaagtccaagatggagagggtaaccagttagaagaggccagctacatcaacaacaactagagtagctacaaagggtacaccaacttcaaaaccaacaaccccaacctctcctaccgcaacaccaacgttgctaatccttaggatcaagtgtatcctccatagcaacaacaaggtcagaacaaaccttttgttccctacaaccaaggtttcattcccaagcaagaattccaggagaactaccagctgcaaccaccacctgggtttgcacctcagtaaaaccaaggtcctgctgctcctgatactgaaatgaaacagatggtacaacaactgctacagggacaagcatctagctccatggaaattgctaagacgttatctgaattgcaccataagctggactgcagctaccatgacctgaatgctaaagtggaggcgttgaattccaaagtcaaatacttagaaggacaatccgcatctacctctgctcccaaagttacgggacttccagggaagtcaattcagaatcccaaggagtttgctaatgttcatgctatcaccataaggagtggaagagagttctccactagagagagaccccagtcagtcactgaggacagtgcataccaagatagggaggatttcaatctcaataaagatcaagctgacaaacaactcgagcagccactcgaccagtcacttgagcagccactcgaccagtcactcgagctgccactcgaccactttactcgaccgaccttcccagcaacatcacctaccgctcccaaactagttgctgtcaaaaacaaagaaaaaatcttcaatcctcctccttataagcccccacttccatttcctggtcgacacaagaaagagttagaagataagcacagagctatgtttgccaataacatcaaggaagccaaattaaggatacctcttgctgatgctctaacgcgtatcccggattcccaaaagttcctcaaagacttgatcatggagagaattcaagaggttcagaaaacaacagttctgagccataagtgcagtgccatcatataggagaacgatgtctcggaaaagctaggagaccttggttcattcactctaccatgctccctaggttcattgactttcaatgaatgcctttgtgacctaggtgcatcagtaaatctcatgtcactctcagtagctaaggggttgggtttcaacaagtataaatactacaatatctccttaatcttggctgataggtctgttagactacctcatggattattagaagatttgcctatcaagattggaaatgtggaggtgcctacagacttcgtagttctgaacatggatgaagaaccaaaagatcccttgatattaggaaggccctttttggctacagctgcaacaatcatagatgttaagcaagaaaagattgatcttaatctagggaagaatcttgaaatgaagtttaatatcaatgatgctatgatgaagccgacaataaaagaacagaccttcttagttaaggaagtggatcgactagctggtgaactgctagtggaacttgaagaagcaaataactcaaaaactgttttgaccaagagtggtaaagccgggtatctccctagtgaaactttgagttctgagaagtcattagactcacacaagtcagcagttggctcaaaggtttacaaaggcttgatggggtcagacacaaaggttatgaaagctaatgaagaaagttcaacacacgctcgaccaactgattccaccaacaactcgaagaagcctccaacttgccctaaaagctcatgctcgaccaaacaactcaaggcaaacactcagacatcagatgattggttagaactcaaagagagatctaaatggcaggacaaagccatacaagagctaacacatattgtgaaagagctgaaagatcaaatcaaggagctcaatggaaaagccaaccaagtaccactcaacatcaaggacacccctgacgatggagccactattctggtcagcaaaaaaggaatttgaattcacatcggaatggtctagaggaaaagactatcttgataaaaaagaagcttactgtcaggacatagccactgagtacccaattgcagacctgttaggaaaccctaatgagtatgatgatcactctactcaaggaggagaggagacctcatttcctctctacaacccaccctaagcgtaatgagtatgaagtcaagcttagagacttaaaacaagctcacttgggaggaaatcccatgtctatctttgtacatatctttattttccttgttgtttttgatgcatttggttagtgtcttcaggagataagtataaagagctcagtgaagtggattctggctctgcgaggaaagcagtatactcgaccacagagcaatgaaaaatactcgaccatattttagcttatccacgcaaggagatcactcgactgtggtgctggccgcagcagaagaggggaggtcgagtaaactcatggcggtgctggccgccacagaggcaatgaggtcgagtacccacatgctagagctgatatagaacagggcgactctttaatgccttgggagcaatcacaggcacccattgacgaccaactccgttcattcttcgactgaggtaagcgcctcacttcaccattgtactatataatctcttgtttatattgtgtttttgttatgtgttttgtcctgagtactctcttccaaatttggtcacacagtggacagtgtgatttaagtttgggggagggctcaggaagtgtgtgttgcattgtatatactcttgagttgagtcagcattcatatttaagtttgggggagggctcaggaagtgtgtgttgcattgtatatactcttgagttgagacagcattcatctaaggcatataaaaaataaataaataaaattgaaaaattagagaaaatgatttcacaaaaacagagtgttcatgtagttgcattacatttagaatcgagtctagagtgtttcatttaggattgtttcatatgcataggggacaatgaggagataaccttgtaagcatgatgatttactaaatgagttattagttctctgatgcatttgaatgaatttgaagtaaaaccaccccatgttctatagaaaccactcgttgcatgtcatgacacctttccctgtcaatttgaacttgaatctgacttataattatcatgtttgcatcagttttgaactcatggatagaatacatatttggattttcttttacttattcaccactcttgctaatccaagtagctgcttctattattggagtagttcccccacccttaaccaacccttctttcaagccatgttatttatgagagcatgtgaggcctattttcaggattgagcttggtagaacgtattaggtttgagccgacaagagtagtatcccatgtagttccaatccgcgttttcggactttgtaggactaggtgggaacttatttggggattgagattgagtgtgaaaaaaagagaaagaaaacgggttagaatctttaggagaaggaagttgaaaatcatattgaggtctagtgaatgtttgggaagcatagaattgataagatatactctagaaaaaaatggcaacaaatacagaaaagaaaaaaaaaatcataagaaccattagagtttaagaaaaacccaattcactagattaggctcatagagtttaagaaaagcttctccttaagatcaagagccaaagaaatgaaaagaaatgacttgatccaaaaaacaaaaatcgaaatatgcctttagtgcaaaagggtagacttaggatcattattgggtttagagataggaccatctacttgttattcacggtttatgtcattgggtagatggggtgctattcttgtatgcatatgttggcacttacctttagcattcttctaaacctcagtcctttttcaatgagagtcccctgttattaatgtatgaaccaccttaaacggaccatctttgtctcataactcgtctttagccaaatgagttcactagcgatgcatatcttgattcatgttcctgaacttaataaatgttaacgggattggttgatcttgacgtattgtgcaactgagtgtgaatttggatcataacagagcatggctaaagtttttaagtagaagtcgatcaccccgctttcaaacctcacctccaccttgttcttaattgtttgcttgagggcaagcaaagactaagtttgggggagttgataagtgtgcattttacacgttttgagcatccatttgtcattactttagcatcatatcacaactattttataccatttctcatcatttgtcatcactttgcatgtctaggatagttttgcatgcatattgcatatttgtgttgttttgagctgatttggagctgctggtgagctaattggaagaagtggacttgatcaaatcaacatactcgaccacgagctcgagtacagtcatcctgaagttccggaagtactcggccacaacctctacagcaaatcactcgactgcgacattctatccaccactcaaccacaaggtcgagtagacgacttccccacttcacaacaccactcgaccccctggtcgagtagctgccttcaccatcatcattcactcgacctatcactctaccaacaggtcgagtatcaccatcatcattcactcgaccaatcactctaccaacatggccgagtatcaccatcatcattcactcgaccaatcactctaccaacatggccgagtatcaccatcatcattcactcgaccaatcactctaccaccaagtcgagtactacaaccaccatccactcgaccaatcactctaccacatggtcgagtcccttatcatcattcactcgacgtccttactcgactgccagcttcagagtcttctccattccgcactcaaccagacactcgagcacaagcaagagaagaagactccagcttatcactcgaccattcactcgaccacctgggtcgagtaccgttcttaatccgtcccaatactgcgtcgttttgagtattagggtttcggaatattttgctataagtagcatgtattttacattttcgaatctaagttttattttccgcagacattgtgttcttgaccttttgtaatccggatttttctcttaatctatttagtattcaatattcagtattttgttcttgattttgtttactcttgttcatcctattatcaccttgctattactctattgttatcatgttttcattctattcaacgtttatgttctctacaatgatgtctcagtagtgaataggtttctgaggatgagttagagtagtgtagaattcttagtatgctaggtggttgagtttgattgatagatcccttctggattagttgatcttaatgcctattgctttctgatcaactggaatttgagcccagacctttccgcgcccaaaaggtgttcgatgaaatgtcagaaccactaattccagaaattcgtggccttgtaccaaggtattcgttgcagggagcattttggctttaacttgttgattcgtaatgcctgttagattagctctcgtcaatggtgattgagtttgagactaggttaacttgagggtctctgttgcggtggcacttagatttggttaaggaacttgttgtctagggataatttattgagcatgtcaatcacctataaactgtggaaacaaaactactcaattaccgcatcctcgggaattctttatctgattaattttattgtttactttgttgttgtttactgcatcttgttacctgttgcttagtttttgcatttctctcctgttactcgacctgatactcgaccacctagttgtttggcaacagactgtgcagtcgagtatccctgtttcgtttactgcctgttactcgaccaagtcactcgaccacacccagtgctctgcaacgagctgtgttggtcgagtgttttattgtttttgttttctgcatgttcacttaggactgctagaacacaccaaaacctgttattgcttggcttgacttagtaatttctgatcaaatcttgattgttagcatcacacccatttggattgacaaccttcagtactacaacgacatgatagtgttttaggattaattgatcttaaaaacctattatcaattatcatcattctctccaccaccgactatgtcttccacagcatcgcagtcttcatcaccatacacaccgcagtcttcttcgttgttagcgtcaacccccaattcaggttcgtcatcctcctcctcttcaagtctcactctttttccttttcgttttcgaagccgctgtgaaaccagagcttcaactccgacaaaagactctgctacaaaaacagccggcaaagctagaactccaccatcaaactccatctccggtttcaacttcacgtcgtggtggaacatgagcaatgtggacttcgccttccattgctaaggcaatcacaaaacgaattatagataaatcgaagaacaaacacgatttcaccaaagttagaattcgggatttggttttagagaattagggattttgagggaattagggattttgagagaattagggattttgagagaattagggattgagttttcgatttgggaattttgatttgtttcgttagtacaaaacgacgttgttttgtctttaacagaactcattaacgtcggttaacggggttaatcggcgagttaacgtctcgggattttagccgggtcaacattttgtttatgttaaaaaggctggtcaacgtttttatcatgtttaatttagccgactttagagttcacgtattgattggccactttttgaaagttaatgtataaaacattattttcccatattgaatattaacactccctcttgagctcttcgattgaaacccatagtcaaatttaaggatttgaattttgataccttttgttcgtcgcgaattgacctttgcttcccctgagaaggagtaactcatgggcggtgatcttttctggaaatcagcgtagttagcagatcagtgtgtgtcccttttgattgtggtttctgttggacctgtttttgcaattggttgtgctccctcttgagtcattgtcttctgaatcttcttgtaatttgtgtcaattatttggattagtatacttgaatcattgttgattagtattaacaaatataatttcatatttaaggcttgcccaaacagggtttcgggttataatacttaataaatttagtacattatgtgatattgttaaatcttttgaactacatctaatattatgaacccttttgaactcttgcatttcccattaacttacaagaagcagttaaaatcttttttgtttgtttgatttgagttgattcttttggttatgtgggtgattcttgagcttatagagtatagaaaggtgataaagcttgagtggtttcagtttgtggcttaagttattggctcatcttgagctattatcagaaattactcatatctcataactcatccaattgggtaactcatcccatacgggtaattcttaatgccaatttctgaagctttagataattatgttttagctttcagtattgttatgatgaatttatgcagaaatcgagtggcattagtttcttgattgcctatatatgacgctgtaaaagttatataacctctcttgcagtcgctgtgtttcttctcattagcagcaagctcttcagatagtattgcttagtaaagccactgaatatgcccgtcaaggtacatcttcatcacactttttatttagtcagtcacttattttatattatagaaacaaaacaatatacaatatggcttatgtgatgttcattgacttaccagtcacttattttatgcagaatggatttgaatattatgcaggagttaaaagttcttaccactaccatggctttgcaaaagtttacctcttggaaatttgatccaagagtagcaaacctagtccaaagtacttgctgaagatgcagagtcaatcaatcggctgatggcgatcagagcgttgatgaatttcaggacgctgcatcgggtttcatcagacgcttgatttgcagacatggatgcgagagcaaacgtggcaagctaaggctggaagttgacttggcgtggtgtcaaagacaagaattaccaaaaagatatggaagatatcatctcgaagatttaggaaggactaagcttgaagaaaacaagaaagattccttaaaacgagattctcggagatcctaggtttagggttctggagagtagatatatgtattctagagtttagcgtgaggcgttttgagcactctagaatactacgatacgattgaaaaacttcagagcattgcaaaagcttgaaggtgagtgtgtaattctctttgtcttcacgtgagagtgttaaaaaacagagaagagaattagacttagatattcttagtcgggtttgatattttgggtagaatagatcaagtaatctccgagataacatttgtaaacaacttgttatcaatacgaatatagttataagcaattctctgtgttgtgttgatctctttaccctttaattggtatcagagctgacacctaacacaagtggtatctgttcaacaggtgagatcttgctacagggtaatggagaaatcacaacagtacgttacaatacaacagccattgaagttggatgctgagcattatggctactggaaggtgtctatccgataggctatccaaagtgctaaaatggatgcgtggttcgcagtggaagaaggatggaaagctccgatggtcatggatgccaaggggttagaaataccaaaatctaagaaggattggactactgaagagaagacagctgctaagaacaactcaacggccttgtcaatcatcttcagatcattgccaatgagtcaattcacgcatgtgcaagggagcacatcagcaaaggaagcatgtgacattctagaaacaacctttgagggaaccagtaatgtgaagaggaccagattggatattttagcgtctgaatttgaaaacttgacaatggagaatgaagagtcgattgaggaattcagcagtcggctgagttcaatttcctagtaaactgtcgtcttgggaaaaacgtacaaggacaagaagctggtcagcagtcggaaccaaggatttggataaacttttaaccatgggcagaacgtctaatgttacgtggggtcttggatacaatggaggaaatacaaaaggtgagactcagtttgtcaaaggatccacttcagacgataaatctcaggtcaaacccacaaccactgttcggaatctgtttcgctctaagcctaaacgagcatctcaggcttacaacttgagacaaacttacttcaaacctgagttcagaagcaagagaacaggatgctggtactgtggaggtctgagtcactacaaagcagactgctacaactacttgaaacatgttgttcagactaggaggaattatcaagtgggtgctcaaggacgacgagtcagacaagtgtatgtcaagaaagaacatctatagtgtcatgttactcaaacatcagcgaatgcagaactcaaggatctgatgtggtgctttgatagtggatgctccagacacatgactggaacactagacaatcttgctggatataaggatgtgccatctaggaaagtcagatttggagatggaggtcatgccttgatcaaaggaaagggatatacttccggacaagccttgcctcatctaaccgatgtatatcatgttgatggacttaaggcaaatctgatcagtatcagtcaactgtgtgacgatggtttgagtgttttctttacacaaacggaatgcaaagcctttgacaaacatggatttgtaaagatggaaggacaccgtgctgcaaataactgttacatgtggaatccagaagagtcatgctacactgcatcacagatcgatcaatctacttcagaagatcaatcgctagtgtctctgctagaatctgatcatatgggtgaagccatgagttcggttcaggagtttaccatatacacaatgagctggcaggctccattcaagttcacaatcaacaaggtatgcaattgtttagcttggtatctgaccagtctgtatggcttacttgtctcaggtggttggtgggaaggtcagctgatctcaggaaacaagcaatctcagttccagttcctcaaacacacggttcacgtcatctcacaaccaatacagtgtggaatctcattaacactagtgtcatgaatgagattcaagggggaagagtgatcttggattcttcgtgtgttaacaattaggaagatgcaatggagtgggaactgaacttacttaagtctgtcaagctattgggatctgatatctgcaatcagatcattgatgaagccggtgttgcaatccgtcttagacatctgctgttggctcagggctatattcggatggaagacgagtcaaagattgatacacatcttgcttgatgtgaatctatcaggtttctgctaggatgtgtgtgtgcaacacagttctatgtttatcagatggtactccagaaagggatcttgagtagtgaaccccagagggaatggtttgagagtcacccaagagcattcggtgttccgggacatccatactcggctcatagattgaaaacagttgtctactgcttaaagcagcttccggagaaaatgtgttgtatggctcgacaaatcaaacacttgtacaagcttttgttgaacttattaccagagagtttgaagtaagtatgtacggagttctgaggtacatgcagggcatacagattaagcaaactgatgagggcatatctatgtcgcagaatatatacgcaagaacaatgattgagaagttcaaactggatgcacaagagattgtcacaacaccgatgaagatctcgacaagacttactgcagatgagagaggaggagatgtaaatgttagtatgtatcaggggatgatcgagagtcttcagtacttgactgtgagtagaccagatatctgtcatgcagtgaatgtgtgtgctcagtatcaagtcaaccccaagatgtcgcacttgtcagctgtaagaagaattctcaagtatgtgaatggtataccaactttcgagctgtactacaccaaggacactgacaatagactgaagggatattgtgctgcggattgggcttgatctttggatgacatacggggatcacttagaggatgctattttgttggaaacaacatggtgtcttggaagagcatgaagcagaacagtcagcttctatcaactgctgaagcagagctaagttctttggagagttcgagttctcaacttgtacgactgaaacagctcatagaggagtgtggtatgatctctgattttccagtactgtattgcaataatcatagtgctatacattgtttccaagaacctgctaggaagtctcgtacaatgcacatagatcataaacataactatattcatgaattggttaaggagaaactaatagcaattgaacatgtgggtactaaagctcaactagctgatgtgtttatcaaacctctgatgtctaacaaattatgtactctacgaatgttcattggaatgtttgaactataattgtgtttgagttgtgctgatctagaatagggacctgaagcaagaacaagtcatggaaatccaaagatgcatagaggatcagcacttagcaaagtcatgtggaaaatagttgcatgtcatgccggttcaaatcagacgtaaaaagttgtcgtctaacaggaggttaaagagctgagaagatcaacaaactgaatgaacttggtacacaaaaaaaaaaaaaaatgtgtatcaagttcaccaggttcgaatatcaagcaattgagaagtcaagtgatattgctgatataacaaaataagggagtaattcaaaagaattcatatcatcacgcccctgtttagtcaaactatcttcaaaggacattccagctgcctgttacacgttgatctgattcatgagagctaaaggcatgacagtgtgaaagactagccactgaataatgagctgattcatcaacgatctgattggttatgacagtttcatgcggaagtcgtgaacacctgattggcacaaagcacattttcaagtactaggaagaggtaaactttgaaatcagtgttggaaagcttttaccctcatgtgtcaattagctgtttaggtcactaaactagttcaggctataaaatgttcaatgttgctctgaatgtgtttgaaatttaatcacgtgtttgattgaaaattctcttggcaaagaagcacttatgtgtttgttaagtgtttcagaatattaaaacagtttgggcccaagcctgtttcaagcccacagaatttcaaggaggagtgctcgagtattggagggaaaaagaggagttagggtttgaggagtcaaatcaatttcttatttggaagtcgagaaggcaatcccctgtgttcaacgcaatttcgagtgagatcgagcatgaaatcacttctctccggtctgcaacgcctggttcaatagaaagccgagtccgcatcttctgcagacatgttcggtgcacaatctagtgattcgttgccagagatttcacggccgactgcaacagaatgtcaagaggtgaaatccgatgaagcactcactgaacccaaccctgattgggctctagttctcgtcaaagacccatcgcctccactcatcatcgaggttgaggatgagactctgccttcaatcgacagtgttcagaaccctaaaccgaaggatcctgaggctaccccctcgcaaccctctgttgcatctcgattgcgcaagaggaagtcatctgctgcggatccacgcatcaaaaggatgaagcagggaaagggagttaccggttcatcttccttcgatggaattcgatttgtctctacggaggctgaaaagaggtatgctcaattctctcaacgaaatttcattgaggaagtagaactgtctaggaagacaaatgaggcagctagggagtttataaagcaggcaggactgattcgaacggttactaagttcaacccgttcactcagaatctagtgtttgagttctgggctaatctgcccactatgaaggtagacacgtatatggtcaaagtcttggtgcgcaatcgggagtatgagctctcacctgggaagatcaacgagatgtatggtctcccttctgttgatgctagacagcagcggatggatatcgctggtctggttgatgaacaagtggctgaatttctcactggtgggaaagtcagtgttctgagcaagcttcaggtgagtgcctttacacctacgagtttggaactgtttaaactctgctgctcaaattcgtctcccacatccaacgctgggtatgctcagcctgatcgattgtatattacatttctttgattgagtatttgatttttgactaagttctgtgctcaagcagggggagataaggccccttcggactccgttgatgctgggggagattaagttgtgggggagctgtgttgtttaagtttttaattgttataagcttcattgtatttcagaccaaaacagtttcttttgtgtttttgtttaaaccgatgattatatcatcgtaaacatgggtctgtaatatttttaacacaatgtttactttcagactaatcatttatgctagatgatgtttctagagtatgtgtgttatgtctccgatttgagtttcaggttatatcaataaaggagtgcttgagtatcaaactcagtcaaaaagggggagattgaagatgcggagtcaatcaatcagctgatggcgatctgagcgttgatggatttcaggacgctgcatcgggtttcatcagacgcttgatttgcagacatggatgcgagagcaaacgtggcaagctaaggcggatgatgtggagagccaaggatgaaagctgacttggcgtggt

SEQ ID NO: 200 - DNA, 94875 bp, Arabidopsis thaliana
gaattcattcattcatcccctttttattgaccaattagaacttgacatgtcatatatttaaagaataaataaattaaaatcaataaataaaacaaattatgtaaacaaattccgtagaactattattaaagaaattattggtttgggtttataaaatagtggttagggtttagattttgtgattaaacgaaattatattttggtttgggttgatgtaaaagtggttagggtttagattttgtgattaaacaaaattaaattttggtttgggttaataaaatagtggttagggtttagattttgtgattaaaacgaaatcatatttcggtttgggttgataaaatagtggttagagttcagattttgtgattaaaacgaaattatatttcggtttgagttgataaaatagtggttagggtttagattttgtgattaaaacgaaattatatttaggtttgggttgataaaatagtggttagggtttagattttgtgattaagcgaaattatattttggtttgggttgataaaatagtggttacgatttagattttgtgatttagtttatttattctttaaatagattacatgtcaaattctaattggtaaattaaaaggggtcaatgaatggattcaccccctagggggtgaacccaagaattgttcaaaggggtgaatgaatagattcaccccctaggggtgaacctctttcattaaccccctcttaattaaccaattaaaatttgtcatgtcatctaattaaaataattaatattatctcaataaataaataaatttattaaaacctctaaacttatctaattataaaatctaatccttaaccattttttttataaacccaaaccaccatttaaactcgtttacttacaaaatttaaaccctaattttcttttgtaaacccaaaccaccatttaaattcgtttaatcgtaaaaaaactaaaccctaatcgtactttcgaaattcaaaccgatatttaaccttgtttaatcataaaatctaaaccataaccatttctaattaacccaaaccgatacataatttcattttaatggaaaattagattttttaatttaattaagttattatttttattattagatggcaacttctaattgttaaaattaagggggtgaatataaaggttcacctttaggggtgaacccatgtatttttcttgttttaatcaaataccacctatagaggaatgattgttaagttttgctaaaaaggtatccaaagtctcaccaaatatgttttcacttgttttttttttgtaagttttgttaagtttaaataacagtggatttgatatggtttttgtatattaataattgaataataagagatttaaaatgatttggaatgattttgcataaatttcagtttcaatagtatggaatttgagaagagagtttaaatcactaattgaataacatgtgattttaacaaaaaagcccaaattttccaaaatcattcttccaacacacccctgtaaatattttcaatggcattgtattttatattttacattttaaaatgtaatttattttgtcgttcaactaatacgaaaaatatataaaattgtactctttttctctctttttgacagtatcatgaacgcagttcaatccattcaataaaaagagatagagaaaaaaaaaggatttcaaatcatactttaatacaagagaagaatcattaatctaaaaagcacacattaattaatgatacaagcataagggaacgatagaggaaagaatcaaagggataggatttgatatgatatatttggtaaaccaagacaggaaagattggagctctgccattctcttctcacttttttctccaaagcatctgcgtaacccaaaattaaaataattgtttgttatagaactaaattgtatactataattaaaataattattttatgcacattgctaatatctacttatagtagtactaggacacttgcatgcatattaatcgaatatgtatctaaaaagctcaacttttggtatgaataacaaaattctctcaactttaagttatataccatgtatccattttccaaacgtttcgttgaactagaaaacaaaattatgttattgccaaagaaattatattaaacctaaaaccatatttggttaatatctacatttcttatagaagattgaaattctaagtaatatgagagggagaatagcataccctttataagtggagtgagtttatcatatggaacaagtgtagcccggaggtggatttttgccacaggtaaggagaagctgaagagcaacagggacataaagattgaggtcaagagctttgagcttgagggtagtgcagagacaagccgcggcttcgacttcaacgaggcctttaagtaacggacaacatttgttaactgctggatccccaagccctatctttactaaacctcccaacaagtcgacgcaagcacctaacttcagcgtgtctattggacatgtcgccttcccgccccctgatggtggctttacgctccctggcggtggaggacagtccttccctcctgtggctggtggggttgttcccggtggaagaataggacctacaattggcaaaggcggcaatggcagattgggacctaccactggaggtatgggtagccctgaaatcggaggaaggggtagcttagggacggtcactggaggaacgggtagcttaggtacagttaccgggggaacgggtagcttagggactgtcactggaggaacgggtagcttggggacggtcactggaggaacgggtagcttggggacggtcacaggaggaacgggtagcttaggtacagtcactggtggaacgggtagcttagggatggtcacaggaggaacgggtagcttagggacggtcaccggagggactggtagcttagggacggtcaccggaggaactggtagcttagggacggtcaccggaggaactggtagcttaggggctttaggggagtgctttccgcccttccgtgggttgcaagagccgcatgcgagagaatgttgggggagatagataatgcaaatgaggaagaggcaaagagagagagatgagagtttggaggagtccatgttgagtagagtggatggtgtaactatacgaaagagtatatgaatatatagagggaaaatgagaagaagaattcacgtgaagatgggggctacttctgcaataagaagagacgccccaaaataagcatggttggcaattatcataagaatacaagatttccttgatgacccatcgctatatatcatcacatgtcgaccacacttttttcacttttttttttctaagtgcctcttgttcttgggttaactacaacttttaacaacgtgtaacttcagtttcaacagtacagtacatttaacttgtaggaattgtaatgaatcaacttagcgagactaggtcattatgagatatcatcaatactaaataacattttgatgatgtaaacactctaggaaaagcagataatatagtatcatatggttttcgctttagtgtgtggcttcataagcatctccatgcatgagtcgactgctaaggaacatatagatctgcaccatagtgaagacggcttagtctattcaaaacactaatgttgtgcctttcgaggacctcccgagactcgaattcgaatgcactctccaaaggtattatgttagggaaaaaaccttattaaaccaaatatgttactgtttaacccatacacgaaaattagatatataaatgttgaacaaatagcatatagttatatccaatatatacgtacatgagaggtaaagaagacagcaagactgacatgtgaaattcgggatacacttttgttgtttggtgattttgttacgtagtgtcattaaagaaacgatcatgtgtgcgtggaccatcttcttctttttaccgctcatttccctttttaccatatctactacaaaagagtccgaactgaccatttaatgaacgagtaccattcaattcataaactccccgtatcaatctaactgacactgtaaaagttataatgttaatatataaaaataatatggttatttagcatgaataataactttttataattgagagtatgtctagctaacattggtgattggtgcttacataaatcatatttttcaaaccacttaacaagaactttacatattcaatgataaacgaatcacatttatacaatataccattcaaaaataatattgtaagatgatttgaaattaaacgattgtaatatataatgtgttaaaagtaatgtattatagatatcttgtaattatttaaagggttttgtgcaaaaaaaaaaaccactaactcatacatttttccaatttactatccagctctaataaatgcacattaatcctatgaatctaaaataatacgcattgtaaccctttttgaccattttttgctaccatcaattttgtaaaatattgatatataatatgttaaatcaaagctctcgcgaccaagagttcaactctacctttaaaaattttaaaatgtaatgtatgtaaccgtaaaaacgcttgtaatatgcatatgaaatttatattacatattatgttaaacttcataagattaatctgcatttgttggtagtgcatttgttagaggtggaaggtaatgttgcaaaaatagatgagttaaaagatttctttttgcacaaaaccctttatttaaactactaacaatataatatataaataatttaaaacatatatctctataattcatgaagtaataatggtgtaccctatccttaccaacgaataataaagaaatgatattaactctgattcaaaagctatatataagatattctttttttttcctcgggagggatacgaatccggtaacatgaatcagtgtccaataagagccagtggtcgtaaattccaaatgacagatggatgactcattttaattcgtaacttttgtcagctgcgatatatgctaatgaaacctgaggtgctagattttgattttaatggctttagattcttactcaacactcaatggcccactcgttaatctcttaccttctaaagtgagttatgatccactgcttctttcttcttgtagatagatggacctgttttttttaggttgtgatttgtggacattaatcaacaacccatgtttatacgtgataatgtctggagctatatgtaaaggcgatatggaggacaacattcctctattctaactttaaaagccatgtagttagggctggacaccaatattctttttttttttgctaaattgtaaatatcattttgatgaaaaatcaggttttacaacagttgtataacctaaaacatttgaactctttggcaaaaaagaataaaaaaacgaagagccaatcgagagctgcatagaactcggtagtttcatagcagccacaacgctattaacttgcgaaaaaggagtctgtttcttcttgaggtgataacgtttttgattttgcggttgatgcacttgaatatagaatgcggagagagggaagtagcgttgtgcaggacattgttaggctgcttcaagatgtggaagaccttagactgaacgacaataattttaagaactgatgaagccaatattcatcattttcaaacaaaaaatatcttttgtttgacaccaatatccttgaccagcttcaaacaaaggatatacatcatttttaagtcgggtaaggcaaatgagtataaggattctcattacacatctggttgccaaaaacttttagtcaaatactagttacaatctcagttttttaccccaaactttttgccacttaaaaaactaggggtgggcattcgggtaagcgggtcgggttcgggttcgggtaaaacccgatcaggtataaagaagtttaggatctaatagggtaaatctaaaatatcggttcggtttcgattcgggtccaaccgggttcggatatagatttgtggcctttttttatccagatttttcgggtaaaattttggatttcggataaaatttagatttttgaataaaatatttgggtattttcgggttcgagtttgttttttcgggtagagaaatttaggatccagtaaagtacatcttcggatttggattaagtttcagctctaatttttcgagttagtttcggttcggataatcggttctggttttttggcccggctctatagaaaaccatcaataaatattttaatcctatttctgcctcattactcgagaaaatattcgacccgttttattacttgataaatttacaactatatatttatgtaatctatttcatattagtaaaatatattaaatttgttattaaaaccaaatatcttttgagattagggcaatcaaaagttaaggtcaagcaaatgtctcctttctaaatgtttttgtgggtaacggtaaaggacaaatatacagcccatgcccagacctacaagtagcgactccattactacacagtaagatttttattaataaaaatgtgcatggtttcatttaaaagtcattgctaacacttcactttacagtaatattcaatttcatacctttaaacgttaatcagaatcgccaattggaagccagtcactggaatcaccttccgaatccttgctatgtccaacttggctcttgctgagctgaacccagcttgacccgcttgcgtttgatgctggtcttttcagtgtactcctgttgggacttggcttctccgagagatcatcgacatctaaatcactaaaggagattacctcttcatctctgaaactcctccgttgttcttcagatgactcatcacttatctccctttgctcaatttttagagtctctatcttgtcaatgactccctcaacggtttctgtttccctactgctaccttcttcaggagtttcgtgaccagtagtgctcttgcttgaccctgtctctttcttttgcagctttagtaaaagttgatcccttgtttcaaatacctgtgccgcacaatatagttattaaagtttcagaaataggtacaatagtaacttgggaaaaaatgcagagcataaaagatataaaacaatccaattttaaaagcatcaggcaaaaatacattttttcctgaggctatacttgttcttattgcaatcggttgaaggggtcattatagcataaacgtttacgattttaataatattggatcaatactgacatttcagaagaatgtatttccagtatacagtcttaccttgcatgttgctaagagttcaaaatcatgcccattcagtctcggcatcagcaaaataaaataaatcagccagaagtgttcatcatccatgtaactactaacttgattcttcacagctacaaggccaggaaccaaatcttcaatggctgatgcatgtgccctttgagcctcagacagttcaaattctgcaatgtggacatgaaaagttggagaaaaacttcagcataattcagtaggtaaaattgatgtaaaccaccaatgctttttatcaggaagtgtttcgacaacattttcaagcaaaccaagcctatatacaaaaggttgtacaggatgacgatatgcttcgcaataaaataaataaaaagatttaagtggcatatggattgaactatatatatatatatatatatatatatatatcccaagaagagactgcagaccccgtcaagtttattcgtaattcctggagatctatctaaagaacagggacttcaaaaaaaaaaattaactgcagaaacaatcaatcttgtccaaacaggtctagaataaaacacatcaagagttaaagactgaagcataatcatctttggcgactgaaaacaagtcaactatatttccaagaacaatcatgtttattcctgcatggctgcaagttcgtcgacaatatcttcaaggtatgaaaaatgtgatctacagagagtaatgggaccccgagatcctaaagacctgagcttgaagaaatatatcccaagaggagatggcaggaccggtctaacctaatctaaaatactaggaaatctctctaaagaacaccagaggctacaagcaatcaactgtacaaacaaaaaaaatattttcctaataaatcacagtaagaaaatcataactaaacatagatagttagaaaccaccaatgcggtgcttcgactatactttcaaactaacaaagcctatatactgggaacaaaaatatgcttgaagaaatatgtccaaataagcttaatctgtaaccctagtgatcccactagaaagccaatcaactgtagaagcaatcaatcttttccaaataaaacctattttagtaacaattatgtttgcctactgggaaaaaaaaaagtcaatgcagagcttaagactattgagaatcaagctttatgattcctctattgactatacaggagcattaccagtatcgagtgacaatggaaaatctgtccaacaaccaggtttcgtcgagattttaacagcgaaatcgactacttcttcagagattccaggaacttgatcgttcaacggagatcttctactactttctctatctcttagattactaggaaattggagtaaattagatgcgaaattggagaaatttccacgaatctcggctagatcgttgcggatcccgagaagacctagctgagttggtgaattatcagaggagagtcggcgttcgtttacaggtggagaaggaggcggtgccaggaaagctgcgacgccacggagtaaggaagataaatcttctttgacaccgccatgagttgtggaaggatcgggatcgggatcgtgatcgtcatcgccgcgagatttgaagagccaagacatggtttttgagtgagagaggttggatttggggttttcagttttttttgcacggggttacgaatagcaagagagaagaaacggtacgttttaatacctttccaaaacgcaccgtttgttgtttgttcgttttgataccttcccaaacgtgaaataaacgaacaataattatacaaaataaacggaaacaaaacctactttttaaaacgggaaaatatcgttttatacgtgatgtttttaagaatggtcattttatatgtaaacttttagatcgatcaaataaaatatgataaaaatgttgatccgctatttaaacaaaacataaagtttgcctggccaaaatttccgaaatgttaacttgtattaacggatctgataaccctcgttagcagacgttagtcgtcttccgttaataccaaacgattttttgtgatgagtacaaaccttaaaattcccaaatcgatttttcattccctaattcttcataatccccaaaatttgaactattctcgatatattttttttgagctcaaaatctccattttgtgtagatatgagtttaaaaaatttgagtgttcaagaaggaggaagtgggaaccttgggtttccttcaaagtgtcattgggggagagatttcatcatctatatatcaagctcgacgaagaacccaagaagatccttcttctgttgtccaacatatcaagatgtaagtagatttgaatttgttttttttggtgtttgatcggtaaaaagttgtcgttgtaaatgcaggaccatttgtttaagtgagtcgaagattgtgtgtatgaagaggttgtagatgcaatactgataatctctatgattgatagctagataaacaatgtcaaatttcaggttgtagtcgagattgcagaattaaaggttttgatccaagaattgaaggaagatgaaatgtggagcaaaatggaattgaagatatggaaatcgatgaccaaattgtgcttggtgtgcctttgtataacagtcattgcaattatgatcataatgttctataagaccaaaaaccataagcttgttcttggttactagtgttttgtgtttgtaataaaatgtttttatggtactgaaatgtttgtttggcaatgataatcagtcctagtgttttgtcttagtgttgtgattgtaatgaaatgctactagatgcttgtttaacaatgagaatcaccaaaatgaaactcattcatacattataaaacttgtgtcacaaagacaagtcgaaaccacaaaatgaaatcgatactaagcttatgtcataaagacaaatccattatgtcaaccaccaaaaataaacttatgagaaagcttaagttcaaacaacaacaaaaagaaacttgtgactaatcttgtcttgaacactcaaaccatgatgcaaatccaccaagtccttgtggttgagcatgtggctcagtttgtgcttgtgcttgtggttctgtttgggattgtacttgtgatgctccacctgtctcccttggtctttctgatgttccgcctgttgcccttggtccttgtgatcgaatatgagattgtgatccttgatgaggttgtgatccgtgtatttgctcttgcgattcgagcacttgagatcgtgatccttaatgagattgtgaactttgatgaggttgtgatcttagcacttgtgattcctcctaagttaaatatgacagtctgaacagttgcatgattaagtgagttgtaaaacatataaaaaaaaacaagaatacaaacctgatttattcgtggatgacctcttggtctctttggtggaatcagaatagtggcatttttgcagctttgcttgtttgcccttgttgaaggcagttagagcatgtcatgattctcttttgcagtggcatcttgttcttatttgaagaagaagaagtctcatttcttccttttctcctaacataattactcggtcttccaacatttccttttgtccatggtggtggcaaaacagggagcctattggttttaggccacaatggcataccttggacaaggctaataccatctttataagtttttcgccagattacctttgtgtaaaacttgctcacatagtctgcaactgtttctcttcttcctattatcacaggtgtcgcataaatacatgggatccccaccatctaccacttcctgcgaccacaagttctcttctccgtatcaacatagtagctaacaccattcacatcaatttgatacaaattgtttctggacatatatctctcgcaatttctaaccccaactatcattttctcaatctcaagatgggctctctttgtgaaccttgtcttcaatttgtcagcaatgatatacgtcttcgtagttatgaccatgcattacctctggatgtactctagctaatccaacaaaggctttctcctagcctgtttaatagtcttattaaaagactcacactgattattgaggctgtcattgcaacgtgtccaattctaaagaaggctctcgaccatgtcattggactagtaagttgcgagtggcatgcgcatgaggattgtatctctttagctcttccatattattcatgaacacttcttcagtgtagcttcaaattgtttttcaaagagacattgtagttctatctcatggttgtctctcttccaattgtccattatatgccttgaatattgtcgatgctcaacttctggaagtatggtattgatagctttgactagaccctgtaaaataacacaaaaacataagcgtaaacccttcataaaagacattaaactgaagcaaaagatgataaaattaactgattatttatctgaaatgataactagatgttgcatttcacagtcccaaactagtagagagctgtctcaaaaaccagtcccaattatcattgttttctatctcaacaactgcccaagctataggaacaatcctcttatctccatctcttccaactacagctaaaaggtgaccttttacatcccattttagaaaacccatctattcctatcacaggtctacaagttcgcttccaagaatccttttgagatttaaagcagatatagcaccagagaaaagaatccttttgtgatataaagcagctatagcatcagagaaacctttgcttgcttccaataaaaagccctactgttgtctctatctcaaactctgtctctgggttctactttaaaacctccgcttgataatctcatattcttgaaaagtgatcattatgagtagcatgtcatgctttcaacactttggtcttggcctttgcacattggtctggagtcacatccaaattgaattctctctgaatctcaacaaccatctcgttctttgaaatatttggattcactctcagcctttcatcaaacaaaagtgcaatggaagaccgcttcaacatctttgaatatcctgacctaacacaagtatgcatataaaatcttacttgcatcttatgttttgtcttctcatacgaacaatatactttccaaccacatttaacaccatcaacaccaatttatgaccacttcgcagcaacaaccatagattcagacccataaagagaaatggtataccatgtctttaaagagtacatcaaaagaacacgcttgaagtcgtgtttatatcctcttcaccgcgtaaaccaccattataatcgttatctccaccaccaaccacatcatcaacgacattgcagtcttcatcaccatacacggcgcagtcttcttcatttttcagggtcaggctcaaatgtaggttcttcatcctcctctttttaatgtctgactcttcttcgtttttgttttcaaagccgctttgaaactcgagctttaactacgatagaagactctactacgcctacagccggcagagctagaactccgttatcaaactctaaaactgcttccgctggtggagctcgaacaacatctttggtgtcatcttcgcctcgtggtggagcttcatcattgtctaatttgccttccattgatacaatctaggactccaaggatacaaattcaagatgaaatcaaatcaaaatcgcgatttcgccaaagtaagaattagggatttggtttttggaaattagggattttgaaatcaaaatgggaatttctgtttcagtttatgaaacgacattgttttaggcattaacagaaaaaattaacgtctgcttacaggggttatcggatctgttaatgcaagttaacgtctcggggattttggtcaggtcaactttatgttttgtgttaaatggcgggtcaacgtctttatcatgttttatttggccgacctaaaagttcacgtataaaatggccacttttgaaagttcacgtataaaacgacatttttcccttttcaaaaacctaatttatttcgcataattattgttcgttttgaaaagtaggttttgatttaatattaaatttattcggggaaaaagaattatacatttacaagtaggaaaaatgggtaaaaaaaacctcacctttcccaaatacatttaaaaaaacctcaactttttgtaggtttttaaaccctcaccttttcaaaaatggtaaaataacaattagcattattaaaccaaataaatacaaattaaatactaaataaactattatattaagacataaaaaacaacataatttataatctatcttttccaaatttgagtttaggattttttttcttctagaatttagttgttttttgtgatataaaaaataagtttcattgccattagaaattggtatgtaaactaaaacaatttataacatagcacattttattttatttgtgttcaactatgttctaacctttgaagttttggatttaaaatggataaaatttattaacacaaatttgatctaaacttgagtgacctaatatttgttctaaacttgtgtgatcaaaactttattctaaacttaagtgtccaaaccaaataaaattttattaaatatattttatatttagttattacaaaattagtttagttttacgttgatgaatttcttgaactcaaccaaattaatcttgtttcagttcactgcatatgtagaagaatatatatctatatatatatacatatatcatacctaaaataaaataattatttttatccaaaatttaattaaacttacactcgaaacaaaataaataaactttgaatagactttggatatgttatcttcagtatgaaaccaattgtctgaaccaaatttaaattgttttcacataaaacattttactagaagaaaatatttaagagctatgtctttggttagattagaatcgacatatttcgttttcaagattgtttagtggtagtttgttgttttgcgtcaagttttttttaatgttttcttttcctatttttgtcgggttcatctcttgcttttggaccggtcaatctataacttttcacctttataataataggtaaagcggttgtgtgactctttcattttcctctactcaagtttaagactaaatctggtcaaatttttattagactagttatgatggtttgttataaaccatttcacaactgttgaaaaaattatttccactacaatggtttattgtaatcgaaaagtaagtgagatggcaaatttatcaacactcatgagagtagaagaaagaagataagtgtgacaagtgttatattttgattggttgctttttttttttggacaaaagcttgtttttattcaattaagagagaaacaagtacaaaggaacaaggattctaagatcccaaagtttaaaggacaacaaaggtaggcattcccaacaccataagaagaaaagctaacacacaaataaggtacatcaacaatggttccatgagagctataatccaaacacttgaagggaatttgttacttttaagatcaaggattgttgacaaatcttccacgaacaaagtagtggatgagagtatggttactgtcaaaagacttagtaacgttaacaagggcgccaaagacatgaatctcgtcgggacgagaagtactacaccaagtagtgcttttgcaaaggttcgaacaaggttttggtaaaggaaggaggatcgtcgaggcttagaaagattgatgcgagaccgtaacagaacaggtgggtcctctctcccaagaagaccaaggagattaaggaattccacacaaagcttgtagtcggtttgccacatgaagaaaaggccagacatgaggaaattgagtagatatcactttgaggcactagtcaatagggagggatctctcacaagagaattgagaagttcatgttgaagcttgatccaaacccggggagtaatggtgaatgggaggttcttgaagttggtcgatatagttgtcagtatgaaatactttgatagagagttttggtgactagcgtcacatctccgacagattggactaagaaacactagaccatgaatcttcaaaacggaatcataaaacattgccctagctaaacctagcaccaaggttctcagataatatttgtaggagcatatcaacgagggtgattcgtcattcaagtggtgtccctaacccctcaaaataaagaaacgatgtctacattgggatagactcggcaaattgcagatggaggaatacctggatttttgtgataataggtttgggtcgcaatttatgggcttgggccgcgagggaaatgggccaacattggagacagggcccatcaaagaaaaccctcgattccagattgttgggcaaggagcgttgggagtgcggcggctacggtagagaggtacgaattgcacaattgaagcagacgtctctgatgtaaatagagttagggtgaacaagctgcatgacgggtccggcgctgaggctataacaacggctaatggtttggcaaaagaacgtcggagaagccttagggagccgaaaggtcccgcagatctagtaacgatgaggaggcggagacaaggctcaggttggaaggattggtcgcctatgaaattgaaagcttcacaaactgttttctttgattcgcaaggtttggacagagagtgtagcttgctcggaggccacattttgcctatgtcggagaatactgcttcaaagaagattcaacagcaaagaagaactcgatagatttggattaaaaggtttgcaacagaagaaaactaaattacaacgaagaagtagatgaaagattgaggaaatagctcgagagatgagagggaggttccgatgccggcgagcatttgctccaccgacgtcggaaagatgaagggagatagtttcctcgatattagtgtctattagctccaccgacgttgaaaagatgaagggagatagtttcctcgatattagtgtctgggagagaaactctttaaaatcttagtctcgcaaaaaatttgattggttgctttgatttctatattttttttcttaattacataactttaattatttcataatatttataaataaacatatcaaaatttacaatttttcattctctataaataaacactatcttcatttgatttggacaaaacaaaaataatctttctttagaaaaaaaaaagtttagtctccaataaacttttgttttagctttaaatatacttttatctaaatggatccaaacaataacctttcaacacccaaaacttttctaattacttttaaactatccaaatcccaacaattattagttgcaggtgtgtcagaaggacattgaacgagcatttggagtgttgcaggctctatttaaaattattcgcgaaccagctcgactgtgggacatagccgatttgactatcatcatgaggtcgtgtatcatattgcataatatgattgttgatgatgaacgacagacgtatactcaacattggactgattatgatcaatctaaggcaagtgggccgagtacataacaaccattctcgaccaaagtgctacttgtatttgcaaatcatctgcgtggtagatccaagttgcgtgattcaaatgtacaccgcaaattgcaagcaaatctagtcaaacatatatgggcacaatttggaattttccatggtgaatgagatttttaagtttgtgagttgagattaatatactaattaagttacaaatgtttccttacttgttgtgtgcgtattgtattgcattttaaatctatgttcattgtatgtgttttagtaatgattatttttatttctagtttttattatttataaagtttttttaaaaaatatatacaaatattaaaacaaaaactattttataaaatttatttaatatttaattatttaaatttaatttaatattaacggtgattaataatatttaatcacaaaaaacataaacataaataaaatgaaaaatataaaataaaaattgtgggataaggtgttgtaattttatcaaacaaaactattgtagagggaaaaaattatgtaggtgtggaataacgatgtggaagagagagaaaacgatgtgaagtgttaaaagggaaaaaaagggtgttgtaaatgggtaaccattgtagatagtcttaggaagtgaatggtgactttaagatttgcagatttcgaaagaaaaagaaaaaaatgcactaatgtcaccaatcagacatatgtgtgtaatttgtttttttttacagataatttggcacacacatttcaaagcatgttaatacactagggataaaagaaacacactctactatcgtccaagggatatttggcagcgcttaactaaaaacttgcattacacagtaagtaataaatcaattatttaattaataataaaatgtacctataaatcagatcatgtactctaaaactattcacacattacaaccaaaaacaacatcctctcatatttcgctccaatccaaaagaaaaaaaaaacaatctcccaccctttcgtcatatattacaacatttaaatgtaaattacttttactatactagtataataattacttataacaaaatatttctatgtaattaaggtctctttataaataaataggactgaaattaagtatataaaattgttcaaaatttagtaaatcataaaatgttatatttatgtacatatttatatgactatgttttatttttatattcataacatcagtattaaattttaatcaaatcatagaaatttttaaatatgtataataaatggttgtgatagtatttactaatcaagatgtatatatatttattaaaaagagaaaggaaaattttgaagatatacaaaattactatttttttaaattatagtttagtatatttatattagatggtaatatgatattatgaattttttcaaaacttaattaaatcaattaatttaatcatatcaaaagttacttaaatcaattcatttccatcattattaaattttaaacaaatcatagaaaattaaaatatgaaaagaaatggttgtgatagtacaataaagtgattccgagttccctttgcctccgtcggagaagtattatctagttgattatgactacccaaacaaataaggatttctagttccttatagatcgtcaggaaatcgagttgtgagatatcatatgtctcaattttattttggtcctcctcctagaaacaaacatgaactatttaatatgtcatgcatctttacgttctgttatcgagagaacttttagagtttcggaaaagaaatggaggaatctttttcattttcctagatataatattcatattcaaaaaagagtggtaatggttatagtgtgattacataattttatcagaatttcaaacttctcagatgtagattttcttgatgtaatgacagagacaaatataaactacagagattatgatcatcatttagatgacatagaagcaacagagataacaaatggagaacatatgatgccaataaaagacaatattgcaaatatgttatggcaaaatcaaaataatataaaatattttttaatgttttttatgatgaaattagttaaggcatgtaacaatatgtatgttacaaaattaaatttatattttgatcaatttttgtattagtggtttataaatatctgttattgtttatttattaacacaaaaaattaattaattattaatatatatatatatatatatataatttataattcgcaccgcatgtagttttttcaccaatcaaacattattttgtaccgcttattttgaataaaccgtacttatcccgcaaatatatttctcctacacgaaccgcagtttaaccgtactacacttcaataacgctttccccgcactataaaaaccacggttaccattcggacccttagagcttgtttaaaaaattgctaggcgttaaccgggcattcggggacttatcgatattagtttttaacattttaatattgatatatacatataaattaaatatcggaatatatgacaatggaattaatttggttgagtgtcatctttttttatttggaaattgcacaatctatactctgaggagtcgttatttaggttcccaaaaaagcaactgtttggctggtactgtggatgtggaaattgcgcatgtatgaaaatatattgtgtgagacggcttcattaaaatcttattagattattattgttcttcgcatgtggtttttgttttctatatgttttttatttattgatttatggggaaaccaatcatcatcatcatttcccttccaatacggagagcttggcaatgcgaaagatttggatggcaaatgtttggtataaatttttcgacccgttaatattataatcttgatattatttttgttaacgtcattaatcttttgcagacgtatgtggagcctatcattttccctgacgtggagatgaacccgaaagaagatttaacctggtctgacgatgaggaagatgtgatgggttgataatatcgtcatgttagttggtaaagggattacttttcagctccctccattctgatttgccaactcctacaaatgctaaggttagttaactgatatttattttataatcgttgtgtttagtagtttagcaactaagtattatatgtgagtagctatattttttctttatttttgtagcttttttgcctctgtttcagagttttcaattatctccaagatgttgcaggtaaacaaatctgttgaggtccttgatcatcgagatgaagaaccggtttatttatttacactccatttttgtttaactttactgtacatttttgttaaccccctccatattttattagccggtaagattgttatcattcattttctttttaattattttattctgtcttgcagaccaaaatcaatccttcaaaattaaccactacagtcgaggaagaaaaggattctaaggaggttagataattcttccttgtttttaactttcatttggttaaatccttaaccggtgatatattgcatgtttcaattttaggattttaccactccacccctgtcaacccagtctcgctctaacgtgaaggttatcttctaactatgatgttatcgcttattgtttatattcatcttccacgtttgtaggatgtggtgtgccctgcaagtgtgtatgcggattagctgttaaaaaaaatatttccaagacgcaagaaaattcgggctgccccttcttccgctgtgtaagcaaaagagacgtgagttatttcctctctaaaaacgatgttattagcttttctggtagctacacgttttgctagttaacctatcattctttttgtagggacatttgtttaagtgggttgaggatgttgtatatgaagaagtggaagatgcattggttagacttgtatcgatttaaaatgaggtaaatgattaaaagcgcaggtcatccagttttgtgttgctataaaagagttgaaggcagattcagtgtccgaccagttggtgatgcttatgttgaaagtgggcttgcttttcagatttgtcttctctctttttgtagcttttgttatcgcaacacttcttaaaatagtcgatattaagttcattagtagtttttaatgtctatctttgtaatgtttcatagtttctataattccctatgtttaagatattatatttgttagtcgttaaccatgtaatatataccttgtatcaatcttctgtctatataatattttataacttctcatttatttctttatttttgtaccatttgcacattctttaggcgatatttataaccattttaaaacttatcttttattttaattttttggtagcattttcacatttattaagcgataatctaattcttagccatccagctgtggtcctatcttcttattttaggacgctagttatcttttttcttagtattgcaaattttaagaagagggtctatatcttggtacatattttgttacagaatatcattcaacataaacatatatttaacattcagaaggaaggtttgttgggatcgtccctgattgcagataatacacattttttggatcagtaattgtacgtatatacattgaaaattttctgatctccgaattcttgttatttataaaacatgacttctcgcgagtcttctaagcacggaaccatccgttcaaaccctcccatagtccaaaaaaacagtcctctccttccatcttcatccgcaaaaaaaaaattttcctcgtcgcttacttgcctccatgtaccacattaattttttgattagcagtcatttttctttttaatcagataacacctactttatcgacactagtttcttcatacaccatggtaaaagttttgttatcggctgctttttcaaaaaatgataaggagctatatatatagatagcaaaccaaagaaagttgccctaactacacacctgagacttaaatgctctatgtttctatcttctttcaatatttatcgtttgcagtggtttatatgttagttgtttcagttcttgttgttgcagtaatgtcgatatggagataataaataggcaaacatctatcttccatatctgcacaatcgattatgtatcatatgtaatcattactttttacatttttttattagtttgaccagggggcgcaatatcttcgaagattacagagcatttaatgctcgtgatcttgcggaaggagactagtgatcctctgcttgtataggaacaattatgtcatatttaatttgcaagaaaattttcacctaaataacgaaatgatatgtatagatccttaattattttctcctgtaggtatatatatttcattcactctttttagtttaatgaaatagtaaatgacaatattatcctcatcttattctttagatcttagcgactgcaaccctaatttttgtcgtatcgtttttcacaattcttatcattttttcttaccctttaatgatttatacccaaatataatagatctacaacctaaagaccgatttaaaacttgtatttctttttaaaaaatgagtttttctaagagttttcaattttttttggcgatttcaacaaatcgaggcggtggtggtctgaagagcgcttagttggacgagtaatcggttagacgaccaatttttagaacaagggtcttgacaatccacaatgcaagtgttgaattatttattcaattgttgaaccttcacattgcacatgttgaatagtttaaaaaatcttacgtggattcaacttggttgaaagtattcaatatgttataaagaaaaaatttgggcccgcgcatgccacatgtcaataaatgagtaaaggatgtgtttcaaactcggagaaaggagagcgtattgtccaaacctttttctttttacttttatttttttttgcaaaaagaagagattattgagatgctcacacttgctatattttcattagatattaagattttggagattttatttctatcttatttatttacaatcaattattacataccaaacaatttttttttaaaaacttatatttatatgaaaatttataaatttttaaactctagaaatagagacttagttcattttatttggacacataaaaaatattatttctaccataattttcttattcttctcccataaactcttggttatatcctttttttttatggattctaataaaatccctatgcaaaattatactaatttttcctttccctatcctaattccaacaataatcctacgcaaaattcgactaattacgtttttccttatcaaaatcccaacaattatcaatttcaaaatctatctttcaaccaacctcaaaatttcccaaattatgattttctaccaaatttttctatgctctcatctgttccaaactataattcatattatagatcgattccaaattcatctcaaccacctctttatgatttgaggttgtgattttcattgacatcaaaaagaaaaaaaaaaaaaatatcacagaaaggagacaatgaatatgattaatatttaattggtaaactattagattaggcgggggttttctcaaaaattgtctcttttgtaggactgttgtcaccaatattttcagtatcttttacttttattaatttttaataaaatttatgataataaaaaaaatgaaaataatcgtaaataaaagaaaaaaagagagttgtgggttctttctttttagttacccacgcatcgctgtcgaaagattaattatgaaatcagatgtttggttgagtataatagtaatgcatgtcattagtttaaatttataatattaaacaaaattataaataagatatttgaacaaaacaaaattaagttagtttaaacgttaattggaaaccaaataagagatctgttaggaaaaaagaaaatatataccaaataagagatacaggaaatcagaaattttaatattatgtgtttgaatcttctcaccaaaaaaaattatgtgtttgaatcttctcaccaaaaaaaattatgtgtttgaatctaattgattaatggacacggtctagtaaattataatttttttgacccgcgaaatatagtgaaacagagtttatctctatacaacaagacaaaaaagaagttctaagatcaaactctgtttgatatacaaaaattatattgtaaatgaaaatggaactttgagattgatctacaacaagtctgctacactcatcacaaacgtaatgtgattatacacatccacgttggccgcaaaaactaaggatcttgtatcatctggatcaacagacaaaatcatattgcaatagtcagcagcatcacgtgcgagactaaggtcgtcatcagtctcatcaacatcaccattgcccattgaccgctgtgccttcattagcccctcgacaacagaatctttatagttctccatacaactcttgaaacatggcttcttaggagaaccaatgagaaactgtgtgtgctctgccttctccatggctagagaaagagccgccttagccaactctaatacagtcgatgcggatttcgtgcgatgatctaacgttagggatttgatacattcttcttctagggacgagaatgacgcggtgcctttacaagcctttgatatcagtaatgatggatatggacatgtctttggtttggttgataaatgggtagcaatgttggattttgcattggtatatggccaccgcgagaggagaaggaaggttaggatatggattgataggtatgcatgagaagcatataaacaaaccatcgttttatatgttcaacaaagcttgttctttgactataggtttaaatgaaatagtagattgaagtttgtacatatattaacttttgttgtgtcaatggtttaaattgtccattgtttagttccacaagttttaaacatgatatgttatttataggtttggaatgaacgatagaggaaaaataaacttgtcaacgctaataataaaagagtgtatcgaaaaagagagaaaaaaacaaaaattcattgtgattcttttgttattttgtttttcaatgattcaattcaatgtcttaatttctctcctaacataaaagttagttatgggcattcggttatccagtttcggttcgtttccattccgttatcgttctttcggttctagagtttagtatccattcagttattttgatatttcggttcgtttcagttcttacagttctaaaatttaatatacattcggttattttgctttgagtatttttggatatttctgttatttttatatttttgagtatttttactatttatatatactttttagtatttttaattatttagtctagaaatgactagtatttttgaaaatataattatatttcggatacttttggttatccaaaatatttcagtttgtatccactcgatttcggttcttttggttatagaattttaatatccgttaggttattttcaaattttcggttttgctccgtttttttacatcggttgcggttcggtacattaggttcgttttatatgcccaagcctaataaaaatcatgttcattttggtatttatagctttagtagacacatgtttagtaaaacaaattctcaaacaagaagatttatggaataccttgtaagactacttagactagttacaatggtttggtggtgaaaaaaacatttccactacgatggtgtgctgtaatcaaagctaggtgatgtggcaaatttagtattgataaatatcaatacccgtgaaagtagaacagagaagataagtgtgacaagtgttatattttgattggttgctttgatttttattttttttgtttcatctcaactatataacttcaattattttataatatttgtacataaaaatatcaaaatttatatcaaaatttctaattttacattctctataaatagagactattttcatttgatttggatacagaaaaaaaaactatttttagacccaaaaaaggtataatcgccaaaaaaaaaacttttgttttacctttaaatatctttttatctaagtggatccaaacaataaccctttcaacacccaaaactcttctaattacccttttaactatgcaaatcccaacaattatcagtttcaaaatcaatctcctaaccaaccccaacaattatcagtttcaaaatcaatctcctaaccaaccccaacatatatcaaattatggttatccactaaatttcttcatgccgtaagctgttccaaactatcgtccatttcatggatcgatgatgtcttatccatcttaaacacctccttattttcctactccaacaggtaatgaaactgattcgaatcttggagcaactgattttcccgagttttctacccaaatggctcttggtggtattagggtattcatgaagccattccagatgcaaaggattcaactccttctcgtcggagaagtcccaaatggaccactgatcaaaatttggttctcctgagtgggtggattaaatttggaagagacagtattattggcaaaaactaaaaatgtgagtcaactggggtaaaattgctgaatattgtaatgaacattgctcatttgatcctccccgtgatggagaagcattcagaaatcactataattatgtgaacaaaagcgtgaacaaatgggctggcgcttatgataacgctaaatgtatgcaacaaagcgggtggttggaggatgatgtattggtaaaagcgcatgaattatattcaagtgctggtaaaagaagtttcaaataggaggaaatacttattctggaagcagtggatctaaaagagcccacgagagtgatgctagtgactcaaactctgtaggatctagtgctcgtccaatggaaagagatgctgctaagaaaaagctaaaaaaaaaggtaaaggcgcagcgttgaaagtggtcaacgaagagtcgaacgaattttaacaattcaaggcacaagagttggataggttggagaaaataactatgatgcacagtgaaacaaaccaattgattaaggaaaagactcatgctaaaaagatgaagatgtttatagagctaactgaaaaagagaatctcgatgacaagagcaaaaagctattgcaacaattgagccacgatctatttggaaattaattattgtcaagtggttatctgtattttgtcacttcatgctttaacgtgtgtttgtcactttctcctttaataatttgtattgtcatgttatgctttaataatgtgtgtttgtcactttctccgtaatttgtattgtcttctatgctttttttttttgtgcgaaatattgtcttatatgctttattaatattatccatgattttaaatagagaatcttatcttatccatgacttttggtttgaagcactcaattcgaatccaaggcaccaacaatttaattcgttgtttccattttttttataaattagaactcattcttccattgatgtacaaaccataaatcttaccttactaaaaatctcaatggatccatcagaatatccttttgacatcaaagcttacaagaggcagtctgaaattgaagagatgtatatcatcaatcggtttagggagcgtcgaaacaaaataggggaagactatccacctcgtagcaagagaaaatactttaaaagagaccatgcatcagcaaaattaaagaatattgacgactactttgccaatgaacctatatatgacgatgcaatgtttcgtcggtgattccggatgagaaaacatattttctttcggatcgttgaagacttatcaaacagcgacaactatttcacccaacgatatgacgcagccaagaaagaaggtatatctccattaccaaaatatactacgaccatgcgaatgtttgcatatggtgtggcagctgacgcggtggatgaatacagtaaaattggaggtactactactttagagtgcttgcgaagattctgtaaaggaatcataaagctgtatgagacagagtatctcagagccccaactcaagatgacctccaaagaattttacgtgttagtgagatgcgagggtttcccgggattattgggagtattaattgcatgcagtgggaatggaaaacttgtcctacagtgtgggaaggtcaatttactcgaggagataagggaaccaccactgttatttctgaagcagttgcatctcatgatctatggatctggcatgtttttttggatgtccgggcacactaaacgatataaatatccgttcaccggtgttcgatgatgttgaacaaggaaatactacaagagtgaatttttttgtgagccaacatccgtataatatcgcttactatctagctgatggtatttatccttcttatcctactttcgtcaaatcgattaggctacctcaaagtgaaccagacaagttatttgtacaacgtcaagaggcgtgtcataaggacatcgaacgtgcatttggagtgctgcaagctcgatttaaaatcattcgtaaaccagctggcctgtgggacatattcgagttggctatcatcatgagatcgtgtatcatattgcataatatgattgttgaggatgaacgagagacatatgctcaacactggacggattatgatcaatttgaggcaagtgggtcgagtacacaacaaccattctcgacccaagtgctactcctatttgcaaatcatgtgcgtgatagatccaaattgcgtgattcaaatgtacatcacgaattgcaagcatatctagtcaaacacatatgggcacaatttagaatgttcttgttgtctgcttattgtatttttgtattttaaatttgtgttcattgtatgtgttttagtaataataattttttcttctcgttttaattatttgtaaaagtttttaaaaatattatataaaataaaaacaaatataaacacaacaatactttataaaactatttaatgtttaattcttttaaatttaatttgatattaacgatggttaataatatgtaatcacaaaaaacataaacataaataaaatgaaaaatatggaataaaaatggtggggtaagatgttgtaattttactaaacaaaaactattgtaaagataaaaattgggtaggtgttgaataatgatgtggaagaaagagaagatgatgtggagtgttaaaagtaaaaaagtgggtgttgtaaatgagtaaccattgtggatagtctaaggataaaaattgtataggtgttgaataatgatgtggaagaaagaggagatgatgtggagtgttaaaagtaaaaaagtgggtgttgtaaattagtaaccattgtggatagtcttacaatggacacgttgaaaaaaatatttgaatatggtgcaatggttgttttaataaatgttgtagaggatgtggcaaatttggtgagtagggaaaaatatcgtttaatattccaactttcaaattatggccattttatacctcaactttatatgtgaccattttaaatatgaagatatcgttgaccaaccgtttaaaccataaacattagttgaccaggctaaaaaaactaaccgttatcactcgttaacagattatctaacgtccgttaacatctccattagctacccctaaacgacgtcgttttcatattttaaaaataaataacgaacgtaggattcaaacttgtaacctagagaaaaactagagacttacttaacaccctcaccaacagtattttattggtgaactttgagaaacatatatttattaaagttttctccttcaactttaacctacaaaacaaaaccatctccatagccgccgcctccaaatccgtgttctctctccattgatttttttaatcttaatcatatattgttttttgttgattgaaaaaaatttgtatttgctaattcaattcatctggaacctatttctatgaacaccattgatggattagtcaattgatatgaaatcagttacacaaacagcactagttcttcgtcgtctcacatgcaccttcgttgtctcacgtacaccttgtgtatatgatctgtgattgctcttaagcggatctgatgtatttaacggcataatatataattatgtgtttccgaataataattattaaacactttatcttagttggtgtggacaagcatagggagcactcgaaagttacgggttcgaatcttgagtaagttatttctttttaaaatataaaaatgacgtcgtttaagggtagctaatagatgttaacggacgttagataatctgttaacgactgataacagatagtttatttggcctggttaacgaatgtttatggtttaaacggttggttaacgatatcttcatgtttaaaatggccacatataaaattgtggtataaaatggccataatttgaaagttggagtattaaacgacatttttcctgttgtaatttgtcaacaccgtgaattttactgggtggggttatctttgtcttgtgttgtgttttcattggtcactaaaatttgactttttcgtccaataatttttgaactcaattaaattataataaacttttttttttgtcatctgataatttattaaagaaaaaaataataaagtacatagttagatccaaaagccaagtagaacagaaagagaaacaaaataaaagagaaacaacgagagatacaaaatgaaatttaaactttactctcctcaaacacttgattgtgaaaccatgaaggctctccaagtgctatgtaagactgaaaccttctttcttgaatcacacttcgagaaatggatcgcgcgatcagatttgcgtttgtggcaatatgacggaatgtacaagattcaaatgcaccagcaatctcatggatttgtgctaaccaattcctgtagaaaggccatttggacggctgcaaaacggcgttaactgcggctggatattccaactctattatcaccttggagacgtgaatatcttgaaatgctttcaacgaccgtagaatgcagcacagctcagcccctgttcgatcttgaattggcgtaaacgcatctcgtgcatggtgtttagcttgccctatatctcttacaattcaagctcctccacacatcgattgtttatttatccaaaaagaattcaaaatgcatttaagaataccttcttggggtttcctccatttgtttccatccaaattggaggtgattgccgagagaatactgttgaaggctacgtgttcaccattttccaatgcattgtgtcttcatacgctttttgaactaaaacatgaaaattccatacctttactttgaaaacggtatgattacgattcttccaaattgcccatagaacccatggaattgatagtcgagtttgctttggtatgtgcttgtcttcgataacattcaatagatgagagaagtttgctagtaaggttgttgaagaaaaaccttgatccgaagcttgcacaaaatgctgagattaatatgcttaaaaggagaatatggaatctaaaatctgagccacaaatcaagcttttctgttggcgtgctctttctggtgctttggctgtggcagaacgtttaagctcacagggaatacaacatgacacaaagtgccaaatttgtggtatagctacaaaaacaatatgtcatactctattctcttgtgacgtatagaataagaaaatgatgaattttggtgtaaattatttatgtatctaatagtagttattaaaaaaaccattgtagtatatgaaagtaaactgaatgttgaatgatgatgtgtaagagagagaagatgatgtgtaggttgttgtaattttaaaccaatgtaaatagtctaataaaaaaatatttgggttcaccccactcttgttcaccctctcttaataagccaatcaaaatacaacaaaatgccatgtcgtttaatatttaacaattaaaatatttgggttcacctctagggtggttaaagtttagattttataaataattgaaaatatattttggttgagtttataaaatagtggttagagtttaaattttataaataaacaaaattatatttcggtttggattgataaaatagtggttaggtttagattttgtaattaaacgaaattatatttcggtttgggttgataaaatagtgattaggtgttagattttgtgattaaactaaattatattttggttttggttgataaaatagtggttaaagtttagattttgtgattaaacgaaattatattttagtttgggctgataaaatagtggctagactttagattttgtaatttaattaatttattttttcaatatatgatatgtcaaattctaattggtcattaaaaaatggtgaacccaagaattgttcttgtaataattaaacttcttagaacaacaaaaatttacaataaatttataaaaggaacaattaaaaaaaaaaaaaggagcaaaaagcatgataaaagctgagagaggaaacttaaaaagcacacttgtttccaaaactaaatagggtcagtcccaaaattggatttgtatagtaacaaatgaataacggaaaagagagtttcaagatctacgaacaacagcagtagcgaaataaggatgatgggtgaactcaaacgataccttaagcgaacggtcttgacagaaaaggttcacagcaacaatattgcgttccgcgactttctctaatcccgtgacttcagccagcttatcaggatcgttggcgtaaccgacctttatgtccttagcgatcttttgagcatcgtgaaagtactcatacataggaagatactgcagcaaaagtaaatagatacaactttacttgcatgttcaaaactctttctaatcgaacatagtagatttatacgtgtacacattcatcactaaaacattgtaaacattacctatgttattatttgctcaatgaagattgggatctcaattttcatgtgtttatatttattaatcaagttattgcttttaagcaaatagttaactaataaatcctacatagatatattttaaataaactgtgaatcctaaatttttccgtattttccgaattacctgaaccgaactcaagattttgcgatttatggtattaaagcagatagtgattgtaggtacccggactacctttacagtactcgattccctatcacccaaccaatttttttaagtgtatgcttcgggtagtagatttagatatacctgaaataaccatatccaacccttaccagctattacctgactctataccctaaatgcacatgcctacttctacaattcatttgaccaagtaaacaggattaagcacaaaaacaaagttgaataaagcacacttacgtcgagacgagcatgggatgtggattttgagaacgattcatatgcgtcatattctggaagggatgccttctgaaggagttcaaaatgctgtataaatttctgcatgtcaaggaaaatgggtagttgaagtcatacacaggaagggataaaaccactcacccattactaaggctgaggatttttatcttacacattaattcaataactatgcaacagataaagagacttatgcttacctcattttcggtattaaaaggtccttgactctttaaagacattccttcatttctcaaagctgcaatcatctacgggtaaatacacaaggtttggtcaggtttagagtacttgatatcagcaatagaaggagctggaaaccaagagattgaagacaaaattaccactgtgaggccttgtgcaagacaggtctgacatttgagaaacaatacccatagactaatccgatcttcccgagccatgtccctagaatactccttattcctctttgcttttctttcctctgatccagatgaaggtaaatgcattataaaaagctacaaatacacactatgcagttatgccaaaccaattactgtacagatggttcatctccgaaacactaggacacaaaataaaaacaaatggatatatgaatgcttaccagtgttcacaacgattaagaccctgaaacgtgctctttcggcaagcttccagagtataatatacatgtaccagtataccatgcaatattcacttggcgagtagaggtctaggtcaaatcccagcatgagaaagcgaattgccacccaattaatttgctcttctaatccaccatatatatggtttaaaatgagtagagacttatcctgaaaggtacataaatgcaagttaacacaaaattcaatatctgcttatcaatagagccaaaattttccgaaagagaaaacagaagttgtaggaattttgactactggtttgttcatgctaacaatgaatagacagccgtcaactagattcagatagaggtttgattaaatggacccatagtgatggtagtaaacctaccccatttttcgaactgcgtgatgtatcttgctgcatcatttgaccaacagcaatccccatctgccaaatacaggaaaatgtatgaatgagatcttgacacaaaaacccaaatcaatatgcaaacaattttagggtaagcgagcttacatatagttaagtaaagaataatacagttccaacaaaggcacaaatggtataacctgcacatggaatacgctccagtcatttaagattttcccaagcttacgcctctgccatggggtattagcgcatagtattttaagtagattaaccatcaactgcaccacaaaatgagaatagagatcaaacagagatttctaagaaaggagccagttgaataattatctaactttttcaggatccagaggctaccaaaaccacaaaacatagacaaggcattctcatcaaagtccccattaaaacaaataattttttgttgtttcaatcttcttgatgattgcaaattagttacatccacacatgctgaaattctctgagattggggcttatacgccagacaccgaatattgaacaaaaccaatgaaagattattcttttcaaggttttaccaagttccaaactcttttcaaggaagaataaagagctacctcatacacgtttgtagaaaaaaatgtacccaacgtattcttttaatatactgtgtttacctgattaagttgaagaatgtactcattcgtatggaggccatggttcttggagacatctaatgcaagagatctggcgcaaattgtcaaaaaggtatcacggccgtaaagtttcccatcttgcacaaggagaagctgtagaacaagattatttattgagtataaaaggtaaaagcattttgctagcttaatacataatttattcacaaatattgctaatatcataacaaaaatggacaaccatatcaatgcttaacagaaatttacaatcagaatcaacctcaactacaaatattggatctatattcttataagtcttcataagaaagaaaaatgagagtgtcagccactacatattccagtgtcatcataaataatatctagataacaataatagtaaagagtcaacaagaagaataagcagagcattcaacaggcctgttggcgaaatggggcttgaggtggttcacgagagttggatattctctagtccattggttctaagtttatgcaactgttcttacagaaataaaggagatttctactatagtcatatggctgaatcactcaactctaagtgacaatgaattgaaaatgagtgctaatgaacacaaaactgcaaagcaaggaagcgggtaaaagaagaagccatattatccactatacaaacacaccctagtggatgtatgcgaacatcagtgcaactacagccaaaatagttactcaaaacaagaaaacaaaatgataaatgggtatctgaaagcacagagctgcatgatattgatgcgttaagttaaagtaacgcacctgaagatgagccctagcaaccaaatcaggacgagatttttgaaactgaatcacaaactccaagacggcctctaaatctggttccaatgaaaatgcacagatcttatccagattgtgaagaagtttcacataatagtcaatagcctggagaatcaaaaattgaaaaaagttactaaaaagttatatacacacaaactaaattacgtatacagagaatttagaagtcccaacctttttccaagaaagaagtttaatggcacgtggcggcgttggagctgataatcttttgtttaaagtaggatcaaatccaatgggggaccgaccagaagcagttgtactttcttctatctcgtttacgccattctcgaaaatatctaatcttagaaattctgctgaatccagaacagaatctagctctgatatgcaatagcctatatgtttccttgccaattcgaggccacgtccttgtggtcgtctcatacaattaagagcatgtagaaaatgctgaaagttattgaggatatgttaaaacaactagcagtgcaaaagtatataacagctactatttttttttttaaaatggcttacgaaacaaaataataataacatcatgaatcacatgtctggcgagaatttttaaccaaaaataagggtaaacaggtaataaaagctgccatatactcaaaatttagtctctgctaagcttgttcattcttgtaagttgcataacatggaaaatttaacacaataaaacatatattaactttgtctaccactccccattgtgaggttaggttgaagaaaagcaactcatcatactcttgttacgtgtagtttatcaaagaaagaataaataaagcatgagaccttacggaacactggataaaagaccaaatgcaaattttaagtactaattgtagtttttctttttcaaagcaagcaataaaaaattctattcatcgatggccaccagaatactaataaaaggaacagacttgggactatattatacactagttaacatgacttaagttgggaaaacctgtaattaacaacatttatcaaagaaagaataaataaagcatgagaccttacggaaacgtatccggcataacagagatttgcaaaaactctcttccagatggggattactttgtagaggttccaattctgcatctttaacaaacaaaaggaaagaaagttattgttctcagttcgtgctgctgtgcaccattgttacaaataaacaatagaccatatcactcaaagagatggtaaatttttaaaaagaaaaaatcaattgtaataatcagcggacttcacatataaatcattactcaatagaagactcaaagttatcgtatataggccagagaggctaatttcaagttggtatatgcttagagagcacttgcaaaatatctaattccaatgcattatactgtctccaaatcacaaatcaccattaaatgtgtaaacaacatatcataagaaaagaagcaacagaagactcttcgatcccctcatatgaatacgctcttcatatttcaattctgcaagtgtgtgtatgtaaaataaaaaaggaagatatgcaaagcaaaaaaagtaccttccaacattctccttcttgtggccttacaagcacgcagctgacgacagatagtttcttcaaccgcattcaagagtaacaagcccttggcatcttcttctccactaaaaggaagaccatatgtcatcgtaaaaagatcctcttcctgttaatgagcaggtatcaggtgaatcattcagagtaaactatccatgaagcaggggcatctgtctagttaagagaaacttctatccaaaatatcacaacaaatcttctcaagtattttatcttcatttagctgcataatggtggaaatttctacagaaataagttatacgctctgctaatcatctcaagattaaataacaactgcttaggctagatgagaacggatgccaagacttcattagaagagtaaagtcaagtgaatccagttttcgtctctgatgtcataagcttaaggttaatgacaactatgaaatgtcaaaatgggttagcaactgtttttctttacgccataaaagaatgttggacatagcaaaagattttaggagcaaacattgaacacaaactaaacctttaatgaaaagccaaaaaacatacagaaacatttgcttagccccacaagaataaaagaggaccaaaaattgtaaaagttaattacttcatttgtacgcgcatctgaaacaacagaaacaactgccctgcaagttgctcggatgaccctacaataagaatgtaatagagcctgtgaagatgtcctctcaggcctcagaacatagatgcatgaaaacacagtttgggccaatgaatgacccatgtgccatgttgcctgcaaaagagtagagacacaaaatgtggataaatcaactccaaggctgacatgttagctacatacatatctctttatcacaattataccttgcaaactcacacagtattatatgagcacatgtaaagaagagattacctcacacgccaggagatggtccataatgtcaatgatggattgcacattaacagtactatccgaacttatagggacgggcgcaaaaccactttcgatggcttcatctatagaataaaacgtagacaccataccagaatccatctttgggtccattatctagtacaaagcaaggacaccacaccatgtttgttatacacacttatagcaacctcacaatctaagtttacagctaagaacagtccaaacatattttgttacaaaatagaaacctctaaagcagacatggcagcaaaaagattgaaattatctccatttatgagttcaccttcttgaagatctgcaaacagaacgactcatgaaactaaaacaagtggggaatacaagcaaaataggcaattgcgatcagtaccagagcaggcggcggagaggagaggtgatacatcggcccagacggagttattatcaccggaagggatagaagaagaggttttagagtcgtgatgaatcggagaagacgaatcttcatcttccctaactgattgcatcgtttgttgttgttgttgctcaggaaacttgaaaatcgctttaatctctcgtaattggttttttttgctacttatggtataagtttcgtcttgctcgatggaacactttgcctgggctgtttagggtaattttcgggtcggatcctcagcggatacccaacccccaatcacccgagcctcctgccgtcttttttttataaatcaacctttaaaaccaacaaaaagattttcaaaattttaaatctatagttttatgggtgaatttgcggtataatcaaaatctaatgtaaaataaaaaatataaaatcttattgaaaaatattaagaaagtaattagattagtgaaaagataaaattgtatagtgaaagacacgcacaataaaaaaaaagaagaggttttgaatgttttgtagattttgtaagagtttttggtttttgttttttaaaaacttatttttataccaattaagattttaaaattttggtttccctacaatttagtaaatttattttattgtagttttccattcatgattttagttttttagttttcctaaaatttaggaaatctagtttttattcaatcaacgttatttttctcaaaaaccaaaaaccgattttttggggtttttaaaacaaaaatataataacaaaaatctaaaactaaaatctaaaatctataaactaaaatctaaactcaaaaactgaatcaaaaatcagcatccattcagagctagagtatatgatgatatatgtaaaaaagtagagagaataataaagaggaattgcaaaactaacacatttttactaaaatattaagaatataacattatatatgtatcagttaactaactaacctaaatggtagattaaatgatcataggtggtggtttggatccggcgacggcggtggctccggcggcggcggtggctccggcgacggcagtggctccggcgacggcggtggctccggcgacggcggtggctccagggacagcgatggctccggtgacagttctggtggtggctccggcgatagcggtggcttcggcgataattccgacaataacagtgtctccagcgatagttccggcggtggttccagggacggtggaggctccggtgacaatgggaacaccgacgatggggtggttgctctggtgatgtcattcgttctcgtaacgggggtagctccgacggcgacggtggtgttgatgacggtggctgtggcggcggtagtgggtgtagtgatgattgttgtggtggtggttaatggtgattattgtgatggcgaaattataatataatatattatacagttattatagtgtaaattttttctaataggctagtttcttaatttgtaattttttttaagttatacatgcaaattcccaaaatactaatgacatggctaaattaatatcaccccaaataattttgcttgttgatttagtcttataaattttgcaataattttataagaacatagatttttttgagtataacatgatttaaatttttaaaatctaatacaaattatttaaattagggaacaatgtttgtctaaaccacacaaataaaatagtatagaacaaaacgtagataattcaaaaggccgagttaaaccgctctaataaaaaaaatactatccctatgagatacaatattggcaatccaagtaactaaggtaaactatagcggtgagccggtgacgttgacgatggtaatagtggtggtggcaacgatgatggtagtggtggcagtggcactaaaaatgacattgatggtggtaatattaattgttagtggtgacatgatgatggtagcggcaatgacggtagtggcggtgggatggtagtgtagtaataattgttacttgttagtaatggtaattataaactagttttttattttattttattttaatataaaaatatatatagaagatgagattactagctagagagaaagggagaaagaaaaatccacatgtattgataaataaataaccagagcaaaatactaataatttacaaactcccaaatattgtgttataaataggtttagtgttttcaatgggttgcaaataaaagagtcaaataggtagaagagacctttggggaaactataaaatttagcattcgtggtagatgaagaagggagaatctaatgaaagaatcagcatgaaatgcaacagaggaggggaaaaaagaaggtgtatgtagtgtagagggcaaagttatcattaatacaaaaaatacataatatatcaaccttttttttgtttgatgttagttttttaatttataattttttgttggttatttatgcaaatttccctagttttatttaatcaccatcttattatataaagtaccattttgaaagttactaactcacataatggtgtcacgtgtcaagtctaataatcagatatttacatatgtcattaaagatttacctttttattctcttataaaaataaaaaaacctaaaaaagtaaacaaatttacatatactaatttttatatctatatatatgtatataatattttgattaaccaataggaaaattaacaaaaaaaaattttggtagggtgagggggaccaacccttcatttattatagaaaaaaaaatagaaaattacatacgaacattaacaaatttgcttttacatgtgatattggtcaattaaataaatctagcatgcattaactaattaaaaagaccatcgaaatattgatttttcccgcctaaaatattacaaaaataaatttcccgcaaaaaacatttcaaaaaaaaagtccgcccaaagtttttttccaaaaatatttttcctacaaaaacctttttggcgggaaaaagatttacaatgggttttaaaagatttttaaaggctttacaagagttttaaatgatttacaagtgtttttgaaagatttttatatggttaacaagggttttaaaggattttaaaaaagatttaaaaccctttaaaaacttttgtaaatctttttaaaatattttgtaagggttcaaaagatttttaaaatggttcaaaattatgaaagggtttacaagggtttttgaaaagatttttaaatggtttacaagggttttaaaggatttacaaggtgttttaaaagatttttaaaagatttacaagggttttaaaatccgttaaaaacacttgtaaatctttttaaacccttttataagggttcataagagttttaaaatggttcagaaagagttacaaatgttttaaaataattacaaattattttaaatctttaacaaaatgatttaaagactttataagaggtttaaaaagattttaaaaagatttacaaaggttttaaaaatccttgtaaattgtttgaaaaccattgtaaaaggttttaaaatgatttaaaaaagggtttaaaaggggtttaaaagtattaacatatgtatttaaagactttataaagattttaataggtttaaaaatgattcacaagagtttttttaacaactttacagagctttttaaaaactttacaaggttttcttaagagtttttaaagggttcttaaaaattttacaaggatttttaaattcttttttttgtagggaaacaattttgaggagaatattttttttggcaaggaaaaagtttacaaggatttttgacgagaatatctttttggcggggaaaataaattttggtgcaaaacatttttggcggaaaaatttcagtttctaattatatgttcttactagattttaacccgcggtgtaccgcgggactatttattttattaaaaataactaaaaatatattattttataaattatctgtatgtaacatattgtttgtattttataaatatataatcctaatttctatatattgtacaatcccttgattttatcatggagtacaccgtaagtcgatttttaaaatttaaaatttaaaattatatatgatttttgttaagattgtttcttttgtcatatattttaaattatatcattgtattttaattgttagttataggatttcacccgttgtataacgtgtcgtattactataaactcaaacccgtcttaccatctaattccgttcaatgaaattaaacatatttaatggatttcatcctaggtatattgtctcatattactatcgacccaaacccgtcctaccaactaaccccgttcaataaaatgaaatattattttattatttttgttttaataatactttaatttgaaatatatataattcaaatcaatttcaaactttttattttaaatggttatttaattgttataatttataaagttcatatattttaatattctaaactcgtcataccatctaatcccgttcggtgaaattaaacattattttttaatttttttgcttaaataatatttttattaacagatttataattcaaataaatttaaaaggtgtcgttcaaatagttatttgattttttatagatttcacatctaaaatatttctctatatgtaacatatagttttgtattttagaaatattataaacgttttttccttaaatattataaacgttttaaaaactttaaataattacaatatttaccttttaataaagtataatattaataatcatttaaataattatgtgtagctaattttaagggatttgatttaaagcttgttgtttggattaaatttgaatgaataatgtgattgatatattaaatcaagaattaaaaatcaaatcaaataattaaggaaaaaagaattaatgccaatggcatgccattgtaaataagtgtcaagtagaggatttatttgctaaaatataattttagttttttaaaaattaactgaaaatatattatattaatttgtatttttaaatatagatatcaatctctgtattatttagtatatgattactattatttaggtttcaatttttgaagtatagatacgaaaatacatatttttttaagtaacgatgtatggtgaattttaaatttttaatattttatccataatataccgtgggtcgattttttatagctaaatttttaaatttcaagttataatcgttttgttaatattgtatgattttttgtgtttaaggttgtataattgtattttaattgtaaattttaagatttcatcaatgatatacctttctttattaatatcgatcaaaacccgtcatccaatataaacccgtctatattatctcgttagctaaatattagtattataaaatccaagaaaataaattattattgttagaaatacaataattttaggatctcacccgtgttatactgtttttgaatgattttaaatttctactactaatatagattttaaatttgtcatataaagtatatgattttaactttttgtatttttttatttaaataaagcaacggcttaaatgatgatagatatagttctttttttgtatgtgtatatgatttttatgtgaatattttcattattataaattagtatttttattgttatgcaaaatgttaatataaatattttctataaatcggatttatgcatattttatggagtaaaattcacagaattttgtttttgaagatatatggaaagattgtgtagagatttttagaaataaattaggcaagatatcgtttggttaatatcttttaaaattttgtaaaactaaataataaatgctagtgacagccgttgtaaataagtctgaactccaggatttatttcacaaaatggttgcaaaaatgtatatgtagattagatgaggataatttgttcattttgttcaaaaaaaaaagggagatttgcaaaactaccattttttactacccttttgcaacaatacccttttatattgttcatttttaaaaatatcccttctcttgaacagaatgaccaaattaccctcatctaataagaacatgtaattggaaactgaaaatttcccgccaatatttatttttcccgccaaaaaaaaatttccgccaaactttatttcccgccaaaattttttctcgtaaaatttttttcccagccaaaataatgcttttaaaaatccttataaattttcttaaaactcttttaaaaaaccttgtaaagttttttaaaagctttggtagttgctaaaaacccttgtaaatcattttaaaacctcttaaaatctttataaagtctttaaaaacataggtaaatactttaaaacacctttttaaacctttgtaaatcatttcaaaatttccacaatagttttacaagatttacaatcattttttagcataagtaagtggcattgaatgatttacaagggattttaaaagcttataaaagggtaaaacatgatttacaatcgtttttaaagcataagtaagtggcatataatgatttacaaggatttttaaaaagggttagcatggtttacaatatttttttaagcataagtaagtggcattggaattatttacaagggattttaaaagcttataaaagggtaaaacatgatttacaatcgtttttaaagcataactaagtggcatagaatgatttacaaggaattttaaaagtgtttgtatggtttacaatcgttttaaagcataagtaaatggcattgattgatttacaagagattttaaaaggggttaacatgatttacaatcgttttaaagcataaataagtgtcaaagaatgatttacaagggattttaaaaaaggtttgcatggtttacaatcgtttttaaaggataagtaagtgttatagaatgatttacaaggattttaaaagcttataaaagggtaaaacataatttacaagagtttttttaaagagttttaaaaggatttacaaggattttaaacctttgtaaatccttttaaaactcttataaagtctttacaagtattttttaactcttagaaaaagaattgtaagtatttaaaacatttacaactcttttaaaccattttaaaactcttgtgaatctttacaaaaggttttaaaaagactagatgaattcctacgctatgcgagggtttgttttgaaaattgtttagataaaaatatgttaattatttttgttgctaatttctgtttattttttgtttgttattttataattagtaaaattagactcatcttatgtacttgcattttttattgttaggttcatttttgactctaaaatatcaatttctatatgttttcatgtataatctgattatttttataaccaagattctaaaatttgtttattatcatgaatatacacaacaagaataaaagatgtttttatttcaagagttttcatatgaaaaaaaagaagcaaaaattaaagagttattttagtaacactttttagatttatgctattgcatatagccatataagacaaatggatttgttttgaatttcgtggtatgtctaacgtctcaaaaatctattacttgaaaatgtttaatgtcaatgttacgaacttaccataagatacaaaaataaaaagacagaatttcatatgataagatatgaaccataacgtaataataataaaaaaatcaaggtaaaataattaaactaatattaggtagcaaacaactaaagtacaacacaaataactatttagtcattatagagtgatgaccattgaccattaagtttttttaaaaatatgaaataataaagtaaaataaaagtagtaattgatttatttaaataaataattttataaattttttattttgaataaaattatttaagaaatgaactaatggaggatttaacacaatatgagacttttgattttctctcaattaattttgctgatttttaatttaatcaatgttaattgacacatgtcattttcttgtgtgatgatgtgtcacccatatggagaaagttggccaactttcatatatatgatttacaagagtttttaaacggtttcttataatttcttttaaaatcttttaaaaactcttgtacatcttttaaaaccctttaaaaatcccttgtaaatcttttaaaacacttttaaatcctttaaaaatctttaaaaaactcttgtaagtcttttaaagccctttaaaatcccttgtaaatcttttaaaacccttttaaaatcccttgtaaatcttttaaacccttttaaaatcttttgtaaatcttttaaaacccttttaaaatcccttgtaaatatatttcccgccaaaaaacaattgtttacgggaaaaatgttttcgaaatttttttttggcgggaaaattttggcgggaaattttattttggaatattttaggcaaaaaatattaatatttcattttgttaacctaaatcaatttacaaataggaataaaagggtcattaaaaatttaaatagggtataaatgaaaatggtaaatagaaaagggtagaattgaaaaggggtagtgtgaaaagggcattagaaagaatttttcatttttaattatactttcttctaatttttagtgatcattttaaccctatttgaaaatgttttaggttaacaaaatgaaatattgattttttccaccaaaacggctttttgcctaaagaaactttcacgccaaaaaatttcccgccaaattggttttttcaaaaacaattttccccatataacaaaaaaaatggcggaaaatatatttttaaaacctttgtaattctttttaaaactcttgtaaaactttttgaaaccttttgtaagggttcacaagagttttaaaatatttcaaatttttttacaaatgttttaaaatattaaaacaaaactttttaagagttgaaaaatgatttaataataagaattttaaaaggccttacaaaagtttctaaaatccttgtaaatcggtttaaaactatttgaaaacttttgtaaataattttaaaaccttttacaatggttttaaaagaattataagtatctttaaatatttattaaggttttgaagtatttacatgtgtatttaaagactttataaagattttaaaagatttcaaaatgatttacaagtgtttttaagaaccgtacaaagcttttaaaaaactttacaaggaattttaagagtttttaaaggatgtacaagagttttcaaaaaatattttgcgggaaaaaaacaatttggtgggaaaactaaattttggagccaaaactttatttggcgagtaaactaaattttggcggacaaatttcagtttcttattaaatattctaattaaatggagggtaatttggttattttgttcatgaaaaaggatattttaaaaaatagacaatggtaaagggtatttttgcaaaagagcattggaaaagagtatttttacaaatcttccaaatacatttgggtatatttggtacctacctatttattaaattttattcattaaagctttgatggattttgaaacctcttacattggatagttccatatttaacaatatagactaggtcagtactcgtgtttcgcaaggggttcatgatttaattagtttataaattttgtttctgtatatattactaatatagttttatttttattcaaaatagatttttagattatcaattcccaaaacactatcctgtcgttgtagtattttaggttgtcaatccaatctgctggtgtgatgcaaacagataagatattattagaatgcactaagtcaaaccaagcagagagtttttggtttctaacagtcctcatatgaaataaaagaactgaaataaaactgaaatgcaaaatggcagtaacatgcaaatgaatgacaaagcagataagataacaggcaatcaaatggataagagattcctaaggatggagtaatcgaatagcgtggtctccttaatctatttagacggttgacaaaacttcacagaagatatctctagaaaacaagttcaatgaaagattaattcactaccgtgtaagaaatcctaaagtgacgttatctccattagcgatctctaactaagcagacaatatcgaatcaacttgttaaagccaatacccgttctaaacggccaataccttgggatagagacgaatatcactggaattaatagatccgacattccatcgaacgccttctgagcgcgggaatgtctggattcatattccagttgatcataaaggaacaagcaataagcgcaactaatctagaagggattccaatattctaaactcaaccatctagacgactaaggttaccacaactactctatcccatcctcagaaatacaattcactactcagacataagcaaagacaatatcatagaaacgaatgaaaacatgataagggatcgagaaatgacaaaagataaacgaaatgatactaagactgaaatatttaatacttgaaagtgaatacaaaatcgcaggagagcgttgcggctacaaaagttttagaaaaaaggatcatgccctagggaaaacccctagaggctatttataaaagcaagacaagttaagtaaggaaagtctttgatagtagtcttcacatcgggagattgcgattgggcatatgatgggctgaaatgggactcactgcgatggagtatgtcatggatcaaacttggcttcagggactccaccttgcaatcgtgtggtctggagtgaagacgagataaaattgtccagcgaccctgcgatcgagtagatgtcatgaggtggtgatcgagtggtttcttcagcttctcttctcttccgtatgctcagtgttggtgtcggatcccgcaccaaaagtccgaagtcgtctcagcctgtaataagcccaatcgctgacttaataatgattttacaaatatttttaaaaggggtttaaaacgttaataatgattttacaaggatttttaaaaggattagtacctgagcagtaggaaaagaatgagaaacaaaaggatttgaagtcgtctcaacctataattaacacaatcactgacttactaaatctatatataaaccatttttaaaattataacacaagaaagttattgaaaaacctactccactgtcacagaaatttgctctactctgtgagaatttgtgcataaaagttgcaagttgtctatcgtttctaatataaagaggatgagattgtattgttctagaagtggagacttgcttataactaagcttcaaagaattggttgaactatctattcgaaaattctctacaagaatatcaaccaatgcgtgataggtaatgtgctcatcaatgagcactaaagaagctcccatttcaatgtctaattcaaattcccaagtcatattgtttgtcaacttccacaaaccacaaacagaatactattctatcattataacctgataagataaataacaacaaaatcaatacccacaaacattgtcactacagagagaagcatggtttacaattatttttaaagcataagtaagtggcatataatgatttacaaggaattttaaaagctttgaaaatgggttaacatgatttacaatcatttttaaagcataagtaagtggcatagaatgatttacaaggaattttaaaagctttgaaaaggggttaacatggtttacaatcgtttttaaagcataagtaagtggcatataatgatttacaaggaattttaaaagctttgaaaagtggttaacatggtttacaatcgttttaaagcataagtaaatggcatagacctatcacgaaagcgtaagtaaaggggtaaacactaaatcaaaaccaaaatttatcacggaacaatataacgaattcaaatctatcacaaaacagtataacgaattcaaaaggaattaacgaattcacataatcaaccccaaaatcgaaagcaaaatagtagaatttacaaggattttaaaaacaattcaatcattaaatctcaaacaaaattcaaattcgaagcatcaacaaatgtcaaattgtcgattgaatcaatatcacgaatcacataagcaacaacaaaatcgaaaacgagacatttaggctaaaattacaaattcgaaatcgattccatgagagaaaaacaaacatggggaaaacaagagattgaaatgaagactgagacggtgaaatcgataacacgaatccgacaatctccgacggccacgacgcaatgcgacagcgacaattaaaacaatctccgacggcgatgacagacgaagaatacatatgacatcaattgaaattagatcgattagtctctgtagttcactaagggtattttggggataaaataattaggtggggtagaaataaaaatggctaaaaaatgggtaaagtttaaaaggagcatcatgaaaagggcattagaaagaattttacataattatataataaaatatgttttccttataaaaatggtttctatcactaactctttaaccatcaacaacctactattttattaaatgacattgttttttccttagattcttattggatatctcttctaagtcgttaatattcattttctttatttttgaattagtatttattttgcatttttctctaaactacaatatgttgttgtatgtttgtctttgtttgaggttagtatattttttactcatcgctatttgccaattttcataattattttgaatcaatggtggagtatttattaagatattagtttgtttagtgacaaagtatgagataatatatttttttacaaatgtgagtacttacaatttgttttcttataggattaacaactgattgtataatttttttaatcctttttctatttttcatatttttcttgtttagttagtaacttataattaaaacatttagattaattttctaaattctatagttttagaaaataaacatataattttattatatataagtatagtttccttataataatctttttatattcttcaaactgtttaaattgtataattttgttgtaattatttttttataattttttaattgttaaatacaaaacttttgtttgcgacataacaaaaatctcctatgaaaatataggtattaaaattgcattgatagatttgaaatttcgtgttttttttagttgaaatttatcctcttaattatatgattttaatttttacttattttgaaaatctgtacttttcattttttatgcatatatcaaaatagagaagcatttccatatgtacatgtgtgaaatctcattaataaatggacataactttatacttttattttttataatattttttattttttataatgcatagtttcattataattatcctctatcttttataatattgttctaaaaaatttattttttatacatgtcaaaatctaagatctctaaaattgacccgtgttataatctcctgagttactatcaaaaccgtactttgtataataagatccctttaggtagacaaatatttgtacttttttatgttagtatccaacattatattttgttgcctaaactgaacattattaaattgttaattataagatttcacctatagtataccttcccgtattaatatcgatccaaactcgtcccaccatataactatacaacactggttatttagaatttcgattgccctttaaggataacaaaagaaagaaacaacaaatgttgttttcaaatagatattccaaaaccttgtctagattaattaaaatggtatgaattttttatttatttaattacttttacatattaattattctacacaatttatgaaatactaattgttttttctttagtatgtgcaggttgacccattaacgatccgatccaacgcttcttcacctgaaaatttgcttggattctcttcgtttaaaaacaataccaaataaacaaacttttgcctgatgaaatcaatgaccgatcttggatgcaagtttaaagagtctttcctcatcgttcgttcagtttcttaatcgcttctttgtattttcaaattcgattgatattctgtaaattccctcattttggtcaattgctttaatgtaacttcaaatttgagttttttcattctcttcaaactctgtttttaatggatttgatatggtgaaggagaatacactaaacatggatgggaagaagaaggagaagccagcagctcagtttcactcaatcgcatagccggaggaatcacccactctatatcgttcacgtggcaatctttggttggtcccggactttcggtgcgggattcgacaccaacaattagccctccaagtctttcgaagtgttatcctaattcggaagactttaatgctttaatgtacaaagattgcgctagatgattgtatgatttcccaccaaaatcttgttactcccttgattccggcactgtccatatttacccgtatgacatctgtcaccattatgaccacatcttaattatttaccattaaagcgggaaaatccttcaccttcccccacgactcccaaggcggttccatcatcatcaccagcttgcgtgaggtaaatttattttatatctttctttttttttacgcttttctctcttagaacaaagatcctctctgttttactctaccaattttttcttcgaacaccggatttttttattctctacgatgaatcctgatactgaaagacccgaatccccatctttcaacgagtgtggttatagcaatgatatatgcactcgcccgaacgacatcgccggtccacactatatgtctacttgtacccttcaatgccttgagcgactgaaggagctttgccggattccgccggagattatgacggaatcaaagatgcatggtcccatggagtccccggaggaccatcgctccggttatttttgcgtttacgagatctatttcaagggctgcgggttgacctttccttttcctgaagccttggtctgttacttggaaactcttggaattgccctgtcccaactaacccccaaccttctctgaactatcttggggaacataactgttacggcggaagccggatacgttatcgaggttcctgaactaaacaagcttcttagcgtgagaagttcatcgaagaaaactgggtacttttcggcgtacccgaatgccaacaggaacctcatctcgcacctcccgaacaaggatgagaactggcatcaaccttggtttttgattaagaaaacccttgcttcaatcggaaatctttccgatgtgcttccatcgaagtggtctacgaaacccggtagaaattaggtcgcatataccttctctgtttacctttactgtttattgaccaaatctgttgtttcacttcgcagctttcatcgctcggactctctcgaccgaggaattcatcgaactcttcaaaatcgtcttcgaaggggaaaccctctggaattccttcacccgtgaccggtttatagaggccaatcacaaactcagaatgagccctcccggacagcttcatcaacttccgccacctccttccctatctcaaggaacattagcccgtgatcttgcttctcggtggaaggtgatatcaaagccgatggctgaggcttgcgaggtaaacaagacgttccttgctagttgacaatggtagcgccgaaggggccagatcggccgatgcgtttaggtcaacactccgtcctgaacgccatggtggtcgttctcctcggagaaaaagatatccccgtcgtgactctcctcgctcttctccccgaggtggactgagcagcgaacccattggtaatttagtttgcaaaaagagagacagaccggctcgtggcagctcttctccccgaagggacaaatcaaaggcccggacttttgacagatagcgtcccggaatttgagaacgcttcttactccatgcttactattcatcgcggggtagtttcatttccctttttctaatcttgctattcctttacgtactaacttactttctcgggcttatactcagtgccaggcaaacagcaaacttaacgacatggttgagcactatgaaggattgctgcttagtagggagcaagacatcgacacttggaagggcaagttttcttccctcgaggctgacctccgtccctctccggttccaagcaaaaattggaggaccaagtcgaccatctctcttctgaactcatggaatcaaacggcgagttgcaagatcagtaccgtagacatgacaaactccaagatgaactctcagttgcccaagataggctttctgaatctgaatcggttgcttacaccttgaacaaccagttcaccgaacttaaggcaaagtacaaggcaatcgccaagcttcgagatgctgagttagctaagtcggcgttaaaagccagaaaagaagtgaaaggtcgcaggatagagctgattcagggggccattcttttcattcaaaccgaaaaggcaagatcagagctggaatctaatattaaggagcacgaaagcaacctactcttgttggaccaggtccacgaggaggatttcagcgaggagtaagagaggtccgatttgacagccgttttatccgagaaacatagccgccttcttgctctccccgcttcatccttcaaccctcagcacttcaaagagttcttcatcgaatcaccccctttgggtgaatcgggtttagattgggctggtaaactttcatacttaaagttttatcacttacagtttttttatatatactctttactgatttgaactgttctcctcaggttcaagtgaatcggatgatactgctgcacctaaggtgcctgccatactggtagagattgttgaacctgaccctattttgcccaaagctcctccgttgtgaacagcgagacggagatcatcccggatgatgagtgtgatgctaggcacgagccgggaacctctttcgagacactccctggcgttgaaccgaatgaaaccgagacgactgatgtcgagcccgagatagctacggattaatagtggttgcgtccacttgaaattggaggttgtcccaaatatttaagaacttgaaattaattattggataagtatttacctaaggaggcttttaaactttttttaaactatgatcccaagagggtttgactaaagtagaatgcgggtttgcaaagtccgcctttaaatattttgaccatgtggttaagtttcgagattctaaggttgatcagacctttctaatagaacgcgagaaatgagctcatcttaacgcgaatttcccatctcgggttgagttaattcattacatttattgggcttgggccttaactgttataccttgtatttaatgggctctttgtcttaaatgcgacggttgccatttcccatcctatttctcgagaaaccggaaaaaacctcacgcctttgaggcaataattgccttttatcgatttccaaatatggcttaaaccattcggacacgccatcattattgaatttttggtttcaagacaagatctaaacctctataaataaaagtttatctatcaccgaatttcccccaagtatgattttagaaatttacttgataaacaccacgagaatggaaaacgaaggagcctccactgtctgtcctctcgaccctggcagtccattgtttctgtccggcgatgatttcgaacctgccggcgttctctttccacacaccgctttccactttcctccgaaagataaaaaggaggcgtacgactatatggacaaggtcgggattcattcttcttccctctattacgattcttcatcttttttttatatatttaccggtttccatgttaggttgtcgacaaacatcgccgcttgtgcgatgagaggcaacgtctgggcctcaaaaggcaaacgctcgaggcccgaatcgctcgagtggagaggaaggtgagggaaatggagagtgatccctttcaatgggagttgaggaacttcgactgcgttgccaagatcccgactatgctttggatgtacctccgcgctcgtggtcaagttctcggtctcgtgaatgctcatgttgaggtggtcccatccgatagcgaggaggacgacgaagaagaggacatcgacccctcgaattgtgtcaagaatgaacccaaggtagacgacaaaaatgaagcgtccacttcgaatgctgaatcggcgatgaaggagcatgttcctaaacctcttccataaatgtccccgaacttgctacttacttttttttattttttttttaactcgttatgggctccggctcatttttaatttatggaaacttttttatttccttgatctcaaaatactcgttttggagatatgttttaaatgcagggccaactggaaggcgtaggtctttccgcgaatcactccggcctcaaatagaattgcaatcttcaaaggtgccaagtccctataaattgcgactccaagttttctttattttttattacaactttcttttccttttgcagctatggagtttaaccttcgatgttcggagtccatgccagacttttctagggtcggaatgatggatgaggacatcccaaacgtgcggggaagagggccttctcaacctcgtggcttcttaaggtcccaaatccgagctccatgtgcattgatgaagggactttctgacatagaccaagaaatcacgatggcattcatcaaggctcttgcggttcagcaccagaagcgttcgttggaaaggaggaaaatccgaaaaaagattaaccgaatattacgtagggttattgcgatatcgagggaacttcacaccctcaactctcaccccggggactggattgagcttggaatttccgaatttgatcgcataccggattgtatgatgccgattcttgaactcgctggtcaaggagtccaactgttctacaagtcgagaagagtttcttaatttgaagtgctagcgtgacgaaacttcgtcttctttgcttactgcttgaatactttcgttttgtttcctgtatttgcatgttcgcgtagtcgaacttttcttgctttgttcgttcgcacagtctgaactcgttcccaagctgcgtacgtacctatttcaagatcaagcgacaccgtagttcatgtacataacaaaaaacgcgtgtttacttaaacataaaacttctttaaaatgaccacattccaaagaccctagacaggcatgtcttcttaatcttttaacctataaacaccattctgatccacttcggtaataatataaggtccttcccaattaatatcgagcttgcttgctcattcttcctttttattgttgaaaacgcgctttagaacgtaatcacgtacaaagaaaggtctgattttgattttggaattgtaatatcgagctgctgcctgctggtaattctgaatccggatcaaagcttggtctcgcctttcgttgatagtatctaacgaatcatcgagcattgctgagttttcttcttcggttaggggagcctctgttcagcaaagtccatacacgttgagctcggccgggaccactgtttccatcccataaactaaaaaaaacggattttccccagtagaccgcctaggagttgtgcggtaagcccataaaacctgttgaagctcgtcgtaccaacctcccttcaaatgattcaggcacttttttagattggttaggattgtcttatttgcggcttcggcttgaccatttccttgtggataacgtggagtggagtaactgactttgattccccaatctgtacagaaagtttcgaattcgtgcgaaatgaattgtggtccgttgtctgtgactatctcgtatgggacaccatgccgacatctggtatttttccaaatgaaagtttttactgccaaatcttacgtatgcttcagcctcaatccattttgaaaaataatcagttaagacaaaagatattgtacgcctcgagttgatctgtgcaatggtccaatgatatccatcgaccacctcataaacgggtattgggcagagatagaaaagaataactccaaagattgatggattagaggtgcatgaagttggcaacgcttacacagctgggcgtacttaacacaatctgttatcatagtgggccaataatatcccattcttttaattttgaaagccattgcccttcatgatgaatgactaccacacagaccttcatgcacttcgctcatgacaattttgacttcgagcccaaagatgcatagtaggtaagggtcgctgacacctcgcttatataatgcgtcctttgacaaacaaaattttgcgctaacgattctcattttcctggcctgccacttattttttgggagcttgcctgtcacaatgtaatgttttattgtctccctccaatcagtctcccaatctttagcctgaatttggtcaacctcgtgaaatattcttggttccggtttgggatgctcgtttagctcaagtatatcctcctcgataagtggctcggtctctataaccgtttctggaactgcgtcttctgtcaggtcaataggctcctcgctactattttctttagatgtgccagactcaaatatggttgaaccttttgacttcctccactttatggaagtaattctattctcaggctcaccaagctcacgcgccgcagctcgagaccttgtaatgacgagggtccttttttcctccttaatgttctattctgaaatgcattctactggagtgactctttttaccaaaggatctgacgttgacgccagcgtggcaagtgcgtccgcggttgtattttctcctcgaggtatgcgaatgagttcaaatttgagatatgcttccattcttgaatctttggttttgtaatatccattgaactggttaacaaccagttgtgaatcacaataagcgatcaattctttagctccaactccttgtgccaacctaagtccagcgattagagcttcatattctgcctcattgttagaagcattgaatagcaaacagaatgattgctcaagaatttccgatgtgggagattccaacttgattcccactcctgttttgatgaacatctatctacatgcaacttccaagtttcattttgtggttgctccggcgcgccaagtactggtagtttggtcaggatatctgccaaaacttgggccttcatgctgactcggcttttgtactctatatcatactcacttagctccactacccacttcgccaatcttccggactgacttggactatgaagaattgttcgaagtgaatgattggttaatacttcgatcggatgagattggaaatatggacgcaactttcgggcagaagttacaaccgcaagtgcgagtttttccatcattgtatatctagtttctggatttgtcatggacttacttacgtagtaaatcggcttctgttctccgcgatcctcccgtatcaagactccactaactgcaaggttcaacactgaaacgtacaaatagagcttttcatccacttcgcgcttggacagtacgggtagagttgttaggtatgccttaagctgtccaaatgcctcttcacatttctcatcccaaaggaatcctttgtttccttttagaatttgataaaagggtatagatttatctgttgatattgaaataaaacggtttagagctgcaatccgacccgttaaccgttgcacttctttgaaattttttggagacggcatgttgagaaaaacattgatttggttcgtattggcttcaattcccctttttgtcacaatataaccaaggaattcccaggatggaactccgaacgtgcattttgtcgggttcagcttcatttggtattgattgagaatttcaaaacattcttctaaatgcttaatgtggtcctttttctttaacaacttgaccaacatatcatctttgtaaacttccatagtcttcccaagatgttcgtggaacattttgttgaccaatcgttggtaagtagctcctgcattttttaaaccaaaaagcattactttataacattaaatacctctatccgtgataaacgatgtttactcctgatcttcgggattcatcattatttgattataacccgagaaggcatcctaaaagttagtaactcgttcccagcggtagattccacaagactctatatgcagaagcgggaaactatccttcgggcaggctttattgaggtctgtgaagtcgatgcacactctgtcttttccattcttcttcttgaccacaatagagtttgctacccaatctgggtatggcacctcccttatagaccctatctttaaaagtttatctacttcgtcatttaccgcctttgctcgttccactccgagttttcttctttttggttttacaggcttgaatctctgatccacgtttagctcgtggcagattatgcttggatctatgccacgcatatccgctgctgaccacgcaaacgatgctttatttttgttcaaaagttctattatggcttcttttaatttgtcggttgatatgattcaaactacctagaactactctctcaaataagagatcaattgcagtattttaggatcgatttcacggagttcttttgttcaaacagtgagttaaatgtcgagattaagctagcagggtgtgagtgaaatagtaagaaaacaaaataagaaaatagaagattgattgtgttgtaaacgatttaataaaagaggtaggaacagggtattctcaggaaactattggttagtagatctaattaaagctaggttgttatcgaaccattcttaaactcaaactctaattatggaataaccggtgggcgtgccgcaaaactccctatatctatagctaatagtgaccggagaagccgagagactatcaacttaaatatgcattcttaacgagttcaattgttcatcttagtaaataggccgattcttattacacacctagaccagactcatcaaataatagatccaactacagattcctatggcgggcatatctattgtctggattcaagatctagttaattactctagatctagcattaggtataattagagatgaagaattctaaagataacctagcaaagggggcaatctactaaaccatatgaatccctaatgagaaaccctattcctaacaagcagactactcagacatattgaatgaaacaaacaacataattgagatagaaagcatgaacacagtgaatagagaaggggaaagaagggatctcttcactgtatatagatctgaatgaaactctgaataacaatggatgaatagcttatgtctcttacaatagggtttgcaaagaacttgataaaagacttgataaaagaaacttaggtctaaaaacaatatatatagaccctaaaaacgtctagggactaataatgcaaatagagaaatcttctggggcaaacttgagcttctggaaactcgaaagcggctagggtttttgctgggccagaactggtgtcgatcgacaccaagagtgtgtcggtcgacactcctcgctgattcctgaaccaaaattgtccttagcttccttttcattaggttttgctccaaaatgtctccttatctccaatgttgtcccattgcatagaatacctgaaaagacacaaaaaagactcgagaaataacataaagactcaaaatcctatacctaaaacaaagataaatcggtgaatattgggttatatcatcggttagagtagctccaattcgaactttccgatttggcttgtcctcttctaacattatttctttcttcgcgggcttcgttaattgctattggatcttcagacggtggctagctagataacatgtccgagaagctttaaagtgatacaaaaccaaaaaaaaatagtaatattagaagttgtttctcaaggcaaatcatttgtgaatgtaaaaacaacttaaaaacaactctgttcctgggtgattttttcttctcgagtagatagtggtgtttgtataacatcttcatcatctttcttggtctcttttggaacatgtaaaccaaaacatcaaagcaaattttttctttttttaaacaattttatcatgtctttttcaaaagttaaggaatgcatacctctgttatttcttatttttgttgttgtgattctttctctgtgggtgcagtatcattatcttcatcatctaacaaaattacatacgcttcttgatctgcaaaatcattatgttcatcatgttcttctactttttcttcttcctcttctcttccttcttcctcttcctttttttcatctccttgtttgggattctcttgtttttctgtttcttcatcattgcaagtagaatgatgacctctgtattcaacctatataaataattacaagttttataagtacaaaccatgacacatttgtttgttccttaaaatcggaaaattagtcatgtaaatcacttttcaaaagcatttaaaatcccttgtaaatacttatcgaacactgtctatcctttaaaaacggcttaaaatctttaaaatagaagctttaaaaatcccttgtaaaaacgataatcacaaagatttataatttcaataactataagccattataaaactttattaaaactcatacagattaacatataccttttcttcttcttcttcatcttcttcatcgttttcttcttcctcttcttttccttcttcctcatgtttttcttcttctccttgtttgggaatttctttcttttttgtttcttcagaatgatgacctctttattcaacctgtataaataattacaaattttataataacccaaacttttaaaattcctcgtaaatacgtatcaaacactgcctatcctttaaaaacgactttaaatctttaaaactccatttagaagcttttaaaatccctttgtaaaaacgatgatcaaaaagaattataatttcaataactataagcctttattaaactttatgaaacctcataccgattaacacataccttttctttttcctcttcttttccttcttccttttccttttcttcatctccttgtttgggattctcttgtttttctgtttcttcatcattgttagtagaatgatgacctctgtattcgacctatacaaaaaattacaagttttataagtacaagccaggacacacttggttgttttttaaaatcaaataattagtcatgtaaatcacttttaaaaggcttttaaaatcccttgtaaatacttatcgaacactgcttatcctttaaaaacggcttaaaatctttaaaactccatttagaagcttttaaaatcccttataaaaacgataatcacaaagaattataatttcaataattataataagcctttttaaaactttattaaaactcatacatattaacacataccttttcttcttcctcttcttttccttcttcctcttccatttcttcatctccttgtttgggattctcttgttttttctgtttttcaatcattgttagtagaatgatgatctctgtattcgacctgtataaaaaattacaacttttataagtacaagccagaacacacttgtttgttctttaaaatcgaataattagtcatgtaaatcacttttaaaaagcttttaaaatcccttgtaaatatgtatcgaacactgcctatcctttaaaaacggcttaaaatctttaaaacaccatttataagcttttaaaatctcttgtaaaaacgataatcacaaagaattataatttcaacagcacataccttttcttcttcctcttcttttccttcttcctcttccttttcttcttcctcttcttttttttcttctctagtagaactggcagaaactctttcgatccctaaatagccctccacccttccaacttttttcttaagaacttcacagttttcatagaccagtgctactttctcaccaaaggacattaatttcctttttctgctgtgatgcacaattgtttcaattgtaagtttcattacatgatcaattctactttcatgtccttgttccacttgaaccaaccctgacaccaatcctttttgctcattctataccctttgatcacaagatcaaaaacatctaacagatcattgtcttcaatatccttctgtgaaaccaagtggtcatattcatgagaattaacaccaactattggtgtacttcaaactgcaaagataaactaaattccaaactatgtaaaaatcatgtacaatgcttaattaacctttaaaaatcccttataaattgtttaaattgcctttaatcctttttaaatccttaaaacttgattgtaaaaactattgtaaaacatactctttatttataaacagtgtttaaaaaaaaaaaagtcataggtaagaaaaatgtaccttgtcaccatctgcaattattgttacagcttttgcacttggagacgatgttgatctccattggagaattaatggaatatttccactagatgattcatctctaagccaaacttttctcccaacttcagaaccgatgataatgcccatatgtgaattgtagaaacaaatcgactatattgtttccttaacaaagtgtcaatattgaatttcttcacttcagttaccaaatatgagtaaacaatctgcgcccatcgatacttgcagaacttttcgaaatcactagctctctgcagattctcaattggcagcaaggtagtcggattttgagctagcaatatcccctccactagtaacaaaccccccaatctcattctctccttctggcagcatttttttggatgtaagatcgacaaatcacattttatcattaatccacaaatcttttttctgcttttcttcaaagtctgattatcttctatctaccacttttctatcttcttctcttcacatttggactgcttcctgatgcatcatctattggaagttatgttgttatgataaactctttcagggagaatcacataggttgatcagcaaataaaaaccacaattcgtcattgctggttagtatccttcttttgagtaaatgatggacgatatggcttgaaaaggctatgtcattgcattcaacgaattccactacaggacccaagaacgtgtccattaatgtcttgtactctatcggctttaatgcttccctggccttcaagacaattttgtttgatgaatgctttgatacccttgtaacattatctatttctctgcctagttgaaatagtcttgtagggaagtacagtttctttgtactcattttctcaaaacctgatgaaatacattaacacagtctttaaattaacacaattttgaatatcgttttaaaaaccattgtaaatctattgtgcttgtgtagtttcgaaacataaacacagtcattacaagtcattttaaggaagtacagtttcttcgtactcattttctcaaaacctgatgaaatacattaactcagtctttaaattaacacaattttgaatatcgttttaaaaaccattgtaaatctattatgcatgtgtagtttcgaaacataaacacagtcattacaagtcgttttaaggactttaaaaccccttgtaaaaccatttttaaaaatccttcataatccttttcaaagacctttttgaaattttaaatctttgaaaagcacacagccgccaaaaatagaaaccaataaaccctttttcaaaccaactctaatcaactggtaacccatcaattaagtgaggatctataaattaaaccacaaacccaaacatcaatctatttattggtgtagtttcaaaacaaaaacccttgaaaacggttgtaaatccttttaaaaacggttgtaaatcttttcataataacagctattgcatctttttcaacacttttaaaattcttttaaacagctagtaaatcattaaaaaaacctgctaaaaagcatgtttaacattttaaagccctttccattcaaatcaaagcacctgttaacccaaacaaccattatacaataattgtgttaaccaagagttgtactaaataaacttcataaaatttgttccatacagatgttcataaaatattcaaatgacaaagttttatgaaataagaaacaaaagctgctaaatctatcttatactccactactttttgattaggaatctgctactcctgcatagtgactgaccctaattctgtgatgatgtcaacagccaatttcttccttgagtttccgataatgtttccttcaaggtttgaatggttggtatacattgagtaacactccataaacttcaacatatatataccggaatcttcatttctaggagcctaccacgaaaaaccaaaagaattacttgagcaaagaggtcaagacttaaggaatcttcatttctaggactatgatatattaaagaagttacctgaggaaaagtggtcaggactttgatgctaaatggagagacatcgatgtctttttttttgaggatgttccgaacaatgtatggcatagctatagaggaggcaccaacatattttttcttgacttcttctgttaaataagaagctgcatattcccatatacaaattgtattctgttccaagtatattagcaaggcaacccaacattttcctttgatacagaaaggagccaatatgcacttggtatcttcctctattatcagcttacagatttcttcagatggaaactgaaatccctctttaaaatccaaaaactccatgtatgactcatcaatcgcatttacgaaaaacgatccaacaaatacaactgttttgtttttgaagatttttggattgctttccttcctcgttttcaataactccaaagctgcatcaacatgctaaacacaacaaaaataaaaaaattatcatattagaaaatctctttaaaaacgattgtaaaccatgcaaaccctttttaaaataccttgtaaatcattctatgccacttacatatgtttttaacgattgtaaatcaagttaaacacttttaaaagcttttaaaattccttgtaaatcattttatgccactaacttatgtttcttaaacgattgttaatcaagtaaaccccttttaaaaatttttaaaatctcttgttaatcattctttaccactttctaatcctttaaaaacgattgtaaaccatgtaaacactttttaaattcccttgtgaatcattctttaccactttctaatctcttaaaaccgtttataaaccatgtaacccccttttaaaatcccttataaatcattcgatgccacttactgatgctttaaaagcgattgtaaatcatgttttacccttttaaaagcttttaaaatcccttcgaaaaccaattttacaaggatttttagacataccgttgttgttattgctttccctggcgtctctaggcttgtaaaccactttgtatttataatattttctgcgattgatagtggcctacaacaacaaaactgtcaccaatgactgttatatttttaaaaaaactcactatcttactaacaaaaactcacttgttttttcttgacttcttccactcagccgatttctcaaatcttgttgcatcaactttcgcaaatggatgcaatattgggggcttcttctttagctttgaaaggtgctttttaggaatagaaggaaacgtacctcgcttactctttctttgtgtagcgggatgatcatcattactgtcgtcaacattatcagcgttatcaccatcactgccaatagttttcctcttcttactatgtgcctatcaaaaagaaaaaaaatagattttttaaataccttgtaaacaaaattttcaatcttgcaagcattcttttaacagaaatttctcgcaatctcataataaattagatactaacctctttccttgttggaacatcaacatcagcactatcaacttgtttctgcctctttctcggcacctaaaatagtaaaaaacaccgtttaaaagtacttttaaaatcccttataaacatcattacaagacaattgacaattttttaaaacagtaccgttgcaaacactaacctgttttcttgttttaacattatcctcagcatgaacacttggtttaactctcttgttttgaagttgcaagaaagataaactttttaaagatttgaaaaaaacataatatataaacacttggtgagataatacaaattttttaaaatgttaacctcatttcttcctctgctaactctcttcttatccttttgaacatctagactttcttctagaaaatattgaaatttggtgtagaggatcgtggagtaggagactgatccttcaaaagataatagaatgtaaagttataaaaaggatactaatcatttttgtaagacttttagagaaataagattactgcacttttgatgattcttcagctatttcatcactaacatcacgttgggtgttttcatcatcacccagatagctctcatactgtgtgtttggctcttggattgaatcttcaaatgtgtcattttcattctacaacaaaataaaacaataagtcaatcgataatatacgtagtaaacctttaaaatacctatatgatacattgtaaacctttctaaaaaccttttaaataactttctaaatacctatttaacctctaaaatacattgtaaaacctttgtaagaccttttgaataacttgtaaagattttcaattacctctgcttttctttctagtcttcgttcttctttagactgcggaaaaagagtacattgtaaaggtttactacgtatttaacctctgctattctttctagtccttcatcttcctcagattgcgaaaaaaaagagtacacctttttaattaacttttgtaaattgatttaagtacataaaatctttaaaacttttctcttaccttttgttttctttcttcatcttcatcagatctctgattattcttttcctccattttagtgttctaaaatcctctcaatcagctcgactctcttgttaagatcttaaaggattgtcaaaatcctgtcaagcttctcgctatcaaatattttgttattcattttctgttgacctacttcttcaagggcaacaagaacatcaacgcatcttgtattctattcagttttcttcattttgtagcccatcttaagaagttccaaaacttgttggaattctatgtcgtctgtgcggaaatcaggaactaaagacttgaagtcttctaggtttccaataattgtattcacttcaatctacaaagatacaataacattaaaaatcttgagaaagcagaacttcaaatctcaaaaccattctaaacaccttttaagagctcttcaaattctgtaaatagacaaaagcttacctcagaaacatcatttacaaggtttacaaccttgaaaaactctggcgtggtagtgcttttccacttcaatatcaatggatattcagattggcattccttatctctaactccatatgctgcaccaaatgctggaactgcgctcaacacccatatggtccgcacgagtccaattcctctcagatcatatttcatcttttgcccaagttttctcgtccattctcagaattgaatttgatagaacactgaatgcttctttaccccatggttgggctgtgtacatctcaaaatcagaagcatgctgcaatcttaacaaaggtatcttctctctttcaaatggtgtgaatagaattccttcagtcaacaatactgcaccaagacacagcttttcttcattttcaacagcaggttcaccttccttagtttttggaaacaatcgatcttcgagatcaccaagagtatatactccttccctcgcccaaaagtatggttcttttacatgatctttgccctttcgtcgaagttccctattaacaggttcacattgaattcatgtaagaataaaagacaatgtagagactattattacacgttttatagtaaacactttaaaaacgattgtaaatcatgtttaaccctttaaaaagcttttaaaatcccttgtaaatcattctatgtcacttacttatgctttgaaaacgattgtaaatcatgttttaccctcttgtaaggttttaaaatcccttgtaaatcattctagaccacttacagaccagttgatattcaagacccacctaatgttgatcaaccaaaaaacattggtgctggtgatgccccaagaaatcatcaccaaagacaagggatagtgccaccacaagttcagaacaacaactttgagatcaagagtggtctcatctccatgatccaaggaaacaagtttcatggtctacttatggaagaccccctagaccatcttgacagcattgataggctttgtggccttaccaagattaatggtgtcactgaagatatgtttaagctcagactatttcccttctctttgggagacaaggcacaccactgggagaagactctacccccagactccatcacctcatgggacgattgtaagaaagcttttcttgccaagtttttctctaacgctcgcaccgctagattgaggaacgagatctcaggtttcaaccagaaaaacaataaaactttctgtgaagcttgggagaggtttaaaagctacaccactcagtgcccccatcacggtttcaaaaaggctgcattattgagcacactctacagaggagctttacgaaagatcagaatgctacttgacactgcctccaatgaaaacttcctgaacaaggatgtgtagaaggttgggagttggtcaaaaatctagcacaatctgatgggtgctacaatgaagactatgatcactcaatgagaggaactagaggaactgaggataaacaaagcaaagatatcaaggctctgaatgaaaacttagacaagctgttgctggctcaatagatgcagatacactacatcactgatgaagagcacttccaaatgcaaaaaggggggaatgattaaactgaagagctgtactacattcagaaccaaggaggatttaacaagggctacaacaactacaagcccactcctacagaagcactaatgttgctaacccccaagatcaagtgtatccacctcaacataatcagtctaagcatttgttcagtacaaccaaggttatgtccctaaacaacaatttaatggaggctaccaacagcagaatccaccaccagggttcactcaacaaccacaacaagccccagcaactcaagatcctaaaattaagcaactcattcaacaaatcatccaaggacaagctactggagccatggcttttgaaaagaagatagctgaattacacaacaagatcgattgttcctacaacgatctgaatctcaagtttgaaactctgaattcaaaaatcaagtatgtggagagtcaatttgcatcaacttctgctccgaagcatccttagcaacttccacggaaagcagtccagaatccaaaggactatggtactgctaattctatcaccatccaccaagaagatgaatctccaccaagtcatcagactcccaatactgaggacagtatgattcaagaaggggggggattcaactcaaattgatgcacctgccacccagcaattcttctggacaatagagcacacacctttgctgaatactcaacattctggaaaaaagttcaaaattgaaaaactcaagcaagagcagaatcaagagatgattagcagtgccagcactcaagaaacatacaagaagaaagtcatccaagaaaagcttgatgatcccggttcattcaccctgccatgctctctaggaccattgacatttaataggtgcatttgtgatttgcgagcatctgttagccttatgcctctctctacagctaaaatgctagggatcatggaattcaagttctgcaacttagccttactcttagctgacggttctgttgcacatcctcatggtctaatagaaaatctgcctgtcaagattggaaatgttgagatacctacagactttgtggtattggacatagatgaagaaggcaaggatcccctgatcctaggcagaccattcttagctttagctggagcagtcatagatgtcaggaatggaaaaattaatctgaaccttgaaaaaggcatcaagatgaagtttgacatcagagaagcttcaaagaaatcaacaacaggaggtcagagttttggaattcaagatatggatgttgatgaagaaacagaagctgaaacttcaccaaaagtcaactatacttctcaacttagcaagctgaagagaacttttgaccacaagaagagagcaacagaaaggctatctcagactgaatatcctacagaagataactggtatgagatgagaaaaaaaaataaatggcaaagaagagtcatagaaggattatcttcaagggtgatgaagctgaaagatcaactatggatctttgaaaaaagagttaaaaaattttcaaatggtattgaccttgagaagatggaaaatgcactagctatcaaggaggacgaaaatttcacaacagaacggtttgcaccagaagatcagaaaggagttcacttagaggaaagaagtctagagagcaagttgttgagtgtggaggaaactcctattgtgacttattctccaggagtgcctaaacagcccaccaacccctctgctgaagatgaagacttgacacttgattctgttactgaagaacttctggaactcaggatagaatacaaagctcaaaaggataccattggggagctaacttacaagatggaaggactgaaccatgcaatcttggaacttcaagaaatggttaaaggctaccccagttttgaatttgaggattggtcaaaagagcctggttcagaagaagaagactactctgctgatcagaaagaagcttactttgaagaaaaatcaaatgagtactcatcctaccatatctcaagagaggatgcagagtatgattcaagcaccaaaaattcaaccactgaagatgaggatttctctgttcctctcttcaacctcttttctgactaagctctgtaagagtcaagtttagtgacttaaaacaagctcacttgggagaaagtcccatatctatccatgtaaataactttctatttttcttgttatttttgatgtttttgtttaagtgtttcaggtttgttttagtgaccctaaggtagtcaacggtcaagtaaattcaaaccaagtcaagaaaaatctaaaccgttgatcgagcaaaatgaggaggagtatttttaaccattgatttggatgaccaaatgagaggagaatcaccaccgtttgatcgagtgattttttgcgattcattctggtccgtttgatcgagtgattgaggatggaggatttctcaccgtccgatcaagttaagaaaccaaagagatcctcttcgtagacaccgacgcctcgtgacccgcctccattgaaacgttgttgtccctttgtcttcttgtccccccataatcactttggtccccccattgcaattctcgaactcaacaacctcatatctccacctcccataccaaagcattctcgaatccttacaattccctctttatctccttcacttccctttcttatcaaaaacttttcacaaattcattgtttcctccatcattcaatctcctaatctactgaattttggttttgagtttctcccacctttgttcttgatgatgaataggcgctcgcttttgtcaaggattcagaacaaagctctctccccatcgaagaggtacccaacaccttcttcgcatgcagctgctcgaggaccttctgaatcatcacccttggggtcgagcatgagagaacaagcaagtttcaagctcgatcatagtgaatcgagccaagaggaggaagtgatgcaagaagagaccttcagctctccagctggaaatactcgatcccgaaggtcgagtaagacctctacaagagaattcttaaggaacaaagcagatatcactcaagggaagaagcccgtggggaggaggttggagctggtagatgaagactccaaggaagaaatgggttcaccagaggaagatgatcaaacagagaaaagaggcgatgatgatttggaatcagaaaagtgtgcaactcgaaacgagtactacaagctgctgaagcgcaatgagtttttaggaactcggtactctcatcctgagaccatggagagactcggcatctatgatgatgtagactacatgtttaaacagtgcagcctgaatattcacatgttttcggccaatggaggaagagacttttcagtttctttcatctgtggaatagctcttatatggagagttagaggacgatgaaatcaggccagacgggagtttggggtacttggagttctgtgtttatgacgtagagtatcgacttccaatagagcatctcgagctgatgtatggatttccaagcggaaaagacacgagtcatcgttttgacaagaaagagcttcagtcattctgggccacgcttggatctaagcatggattttcatcctctaggaccaagagcaacgagataaggagtccggtggttagatactttcataggtccttggcaagtgcgctatttgcaagagagcggaatggaacctttgtcaatggagaactagagttgatggagacagcactgcaagagttgcttggtttagcatcggatggtacaattctagctggagatcagacaaacacttcggtctcattctacctaatcgagcacctgctgagttacagaggatgggctaagggacttaagaaactaggaagaatggttgtgggaggagttatgacaccaattctgagagcttgcaatgtacctttacattcaacgccgattcctccgagatggattgatatgcagcaccttatcaatttcaagagtttttggtcgcaccagaagaatggcatatataagtataggttcgatcaccccacaacaggacaatccatttttctcctcccaaaccccgcttccacttcgatcagagatggtggcaacattgagttttgcccaccaatggagaacctctatatttcaggtgatgaagttgtgccggtggaaggagtgaatgatgatgaggccccaatccatcattctgataatgaggcagaacctacacaacaattttactttgaggagtactcagcaccaaggcaaagtaaagactcaaaggagattcacaagcgccttggtttcctccaaagctggtgtaagttccaagacaaggctctcgcggcactcaataagaagtttaacaatctccaactcaagatcagctgttcttcctcaaccacagcaatgctacagaacatgccttttgggagaagcggatccactcgtcacgaacctatgcatttcgatccgccttcgccaccaagacagtcttcatatgagccaagggaacaccatgctgcaccttcaccaccaaggcaatcatccttcgaacctagagaaaaggaaaagaggagcaagttgaaaaagcgaagaagaacaaggaaatcagacgctggagcaagccactctactgcaccacttgaggagccactcggtcaacaacccgagcaaagggttgagcatccagctaatccaagttcagcacaacgcattccttggagttacacaaaggagagtatggacgatttcgtctcctcctacttcacctgataactgacgtaacaccacctctccattgtatataccataacatcattttatttttctttgtgtgctttgtgctttggtcttgaattctctttcagatttttattacacaagggattatgaaatttaagtttgggggagggttcaagacatgtttaacattgtgttctcttttcttatttcaatttttgcatcatctaaggcatagaaaaacccatacaaatttgaaacattttcagaaaatgatttcataagaaaaagagtgtcatgagattgcatatcattttaggattgtatatagagtgtttgcatttaggattgctcatttgcattggggatgatgatgatttcaaaccgataagcatgttttgatccaatgaagtaagttcaatgcccaggttgttagttctctgttgcataaccgattgtatctttgaagtaagaccgcaccctgctatgaatttcactacaacaaatatcaacattattagccagtgaaaagcgctataatatgtcattaatagcgttttcataaaagctatcttatgcccctattattgtagacccccacatacgatagcgtcagaattgtatgctatgttatagttttctacgatagctctaatgaaacgctttattagagaacaccaatatttttgctaaattatttaataatccatattcttctctatgttaggtgtttcaaccatagcattacgaaaacattacattacatttgaagtttttaatagtaggatttgtgtctgcgataatatatgtttttcataagaatgataacctgtaatgattgaactcaccgaaagtttttaacaaaagcatcattcatttgccataaacatccaatacacataagtctaaatccaggatacacaatacaattctaaagccatgttctacttaactacattatccaaaacgaattacaaacacaacaaaagtctaaagagtatagtaaacctcaagacatgataaccttgtcctctggccatgcaatggctgtgccaagtgcatcttccatgatctcgacttcatctgatggcctccacacttttacatcgcttactttcacaatatcgacccacacttaaactgcattatcacccaatggaacaaagtgaaccttctgttttggatcgtttgttgcccaacgtccttccgccacaactcgtttctttccggtaatatccatcaacttgcacttcatattttccttagaaacgccttgattgaaacactgccatgttcataacattaataaaccaaagactgattcaatatgacagaagcaatttcaagatactaaggaaacatttacctgagatttctctagagttttctgacttggagagcttggagcatttgcattctccaaaggagtttcagatcctgaagctgaagacttagaacttgtggatttagaagctgcagattttgcccctgctgaagatttggaagctgatcctgagggctgaagagatgacttctgattaccactagcagatgggagattttcaaataccactttatgcacaggccatgatataaaagtcatcaaacaatcctcaaggtacgtcatttccattgtaggcctccatacaaatgtttctggcatgagcactttatccacaaaaactttaactgcgctcggtccaagaagaagtccattaaccaatgcattttgctcttgtgtctaccatcgaccctcagcaacaatgacttcatctgttgacaaatccaatagcttacatttgttctgagaatttcctctaagtccctgtcaaacacatttagttaaaaaatcaaattaagactctgtctctacttgatcaaacatgaactcatcaaaaagctgactaagaatgtgctgaaatctgcagtttaccaaaggcgcaatgtcctctatttcgagatccttctctacaagaacacatttagatgcaggccatgcaatcatctgtccaacagcttccgtgatagtatacatgttaggtgcaggtcgccatagaaatgcatctggtgtattagcaacttcaaccaacaccttcaagtccacagggcctagacgacagtcattaaccatgtcatcaggatcagaagaaagaattcgcccctcaccaatgatatcctcaggaccagaccaattaaccaacaaacatttagggtgtgttcttctatttacactctacaaaagaagtcaaaactttaataaaaagaagtgattccaaaactgatggaataaaggaagaaggaatcacttatcctggcagcagcagagttttcacccacttcaagttcatgtctctgcttcattctggtaagttcatcttgcagctcattgaccttcttcattaaaagaacttgcttctcttccatgtcagtcatgcacttgctcttgacttggaggcaagctagttctgttttactcatgcctctacccattgctctcagcctacccggattgtctggtcctaaaagttgagagaggtgatcttcttctggatttgctgacgttggtggaccatcatttccaaccagctcagccgcctttctctacataatatgaaattgtgttatctactaatattgataactgaaaccatgatcagtcttgcagtgattacttacaatcttttcagtagcattagtgttcaccagcgtaccatcctttttggtacgagactttacccagacctttagccttgtcacttttgatggatctccactttcaagtttctgtgtcaaaaaaaaaatatcattcaaatatatgagaatgcattcttaccagaagagacaacttacatgtcaatttacttagcatgtcttctgctaatctcaccattcctttacgacttgtagtatgaggtatttgattcctcctcctttctttgtatttctcactcacaacctaccaattatacatgttaataattgacaaataaaagttaaaatggtcataattccaactcattaccttaaaggctgcgctagttttgactttaacaaatttgcgccattttgttggggaaatattcatgggtctcatattcatcctttgctgattattaggagccagattaatatctttgacagtccgggacttgtatgacctccacagactgcccatttgttttagaacagcaaccctttgaaactcttcatcaagctcaaaccttacttgcaatcatttaccatcacacaaagtatggaaataaacctttacacaactaacacacagaaaaagagactgaaaagaagaatttacctgcacagatttccagagaaccgttttcatatcctgactaacatccttccaagtttcaattgtgataggaacatgttcacgtaccaatgtgcctacatatgatgccagtttaactgaacctggaccaacaggatctcccataatagtgtactcaactctttctctaacagttggatccttggcgatgttcttcatctttgttggtccctttgtctcttatgcttagccggaggctcagttccttctgacaattcaatctcacctatcgcctcttcctcattcagcccatccttatcagtcactaaaggattctcctcagcttgttggtctattacaggctcaatttgagactcagtttccttagcaggctcaggttcattatcacactcagtttgcttagcaggctcagttttctcagctgctgtatcttggggctcaatggtgcctatatactctggctcatcatctacaactttcttctttcttttctgtccacctttcttctttgctttacccatttcagttcacctgcatttcacaaaaagaattccatgtcaatcatacttctaaaaacgaaaacgactcaccaaacaagcaagagtaaacatagagcatgcaaggcataaaacaatgactcataaaatgaataagaatctacatttggcacataaatgccttcacaatcagatctagcatattcagcttcatccatttcagcgtccatgtcaatatctgttggtaatggaccaatctctgcgtttccttcctgagcatcttctttactatatcttcttgatgaacctttcattgcaacataccaactagatgaatcatctacccttgaatagaagacttgcttcgcctgagatgctaatataaatggatcctttaaaaagctgacttgactctgattcaagttgaccaacgtgaacccatcctctaccttaaccccattacctctaacagcccattgacaccgaaatataggaacatagaacacattgtagtccagcaatatgatatcagttactgtcccatagtacgataccaagtcaacaacttgtgttgtatctttagcactggatctacacatagctgttgcttcataataaactccactattctgaatttgcctttcaagtgaccgtgtgtgaaaccgttgtccattcacaatataaccagaataggaccttgcactacatcgtggaccatatgcaagccatttaattgtatcttcatgtccatttgaagaaagaggtatctaccaaatgataaacagaaagtcagtcacttatgttctcataaaccataaaattcagatcgtggaagtacttgcctgttcttttatccaagatgcaaaattcttggcatgcatattccataagaatgatgcatcacgtttacatcttggatttgtgtcttggagatattgcaagtgcatgctgttcacagttaaacacaatcagttgaaaactcagcttgttatatttagtttaattcgtaaatgagcattagatgcattcctgaaaaagatagtacttactccacataaggatcaaaggcagccatattttggatgacagcaagatgggctatgttcttatctacttcagtgagcataaatgaagtacctgcggatattggacgcccttctagtatggagttgttctcatactctgtattcctctctggtttctcttcaacacttgtagtctttttcagaaaatcactacagaactgcatgcattcttctgcgagataagactcagcaatacaaccttctggtcttaaggggtttcgtacaaagtctttcagaactttcatatacctacaaagtggcagtgagaaacatttttctatgaaaacatactaaaaatctgaaatattattcacacaaactgtaacaatgtactaaaaaacagaaactttacctctcaaatggatacatccatctaaaatggactggtcctcctagtcgagcctctcttcctaaatgtaaagtcaagtgaaccataatattaaagaaggtgggtgggaaaaaccgttcaaacatacaaacagtttccacaatttcagcttctattactgaaatcacctctatgtcaataactctctaacacaagtgattgaaaaatgagcatcagcgtattattgctgtccgaggaccttttggtaacaaacccattagtgcaacaggaagaagctgctgcatcaagacgtgataatcgtgagatttgagtcccattatcttgcaatcttctactgatacaccccttgatatattagaacaatacccatcaggaccttgaaactctaatagacgcttgcagaatgttttcttctttgatttggacaaagaccaaggtgctgctggaaggtatgttcgttttccttgtgcgttaggatgcaaatccttccttacaccaagatcttgcagatctttcctagcatttagcccatctttggattttccacaatgtaacaaagtagatacaatgcttgcacccacatttcgctctacatgtattacatccaagttatgcctcaccggtaaatcctaaacaatacaaaaacagttcataaggatcacaccataaacgtcacttacatgatcaatagacaaattaacatttacctcccaataagacagcttgaaaaaaatggatctcttcttccatcttgataactcatcttcgtctacttctagttcctcatcttcttcggattcactagattcatcgtcactatcagtgactgattcaatgcaatcattcctttttctcttcctcccagattctttagcattctcgaaatcatttttgaagtttttcagggtttgtgaaacttcacgacctgttagaattcttgcctttctcccatgttctatctttccgtcaaaccaagccttcttgtttctataactatgtgttggtgccaacccttttctatgacacataaacacatgctttctgctatatttcaaccacatactatttgtgccttttccacatagaggacaacccattttacctttaactttgcatccagcaaggtttccataggcgggaaagtcactgatggtccataaaagcattgcctttagagtgaatgtagtcttactgaaggcatcatatgttaactcacccttcttccacagatggttaagatcttcaataaggggttccaagtacacatcaatactatttccaggttgttgtggtccagggataagcaggctaagcattatgttctccttcttcatacataggtcaggcggcaaattgtagtttactaacagaacatgccagcaactatatctagtattcttcatgttgaatggattaaatccatctgttgaaaggccaagccgcaggtttctttctttagcatcaaattcaggatacttgtcattcatcttatcccatgtaaccgaatctatagggtgacgaagttttccatcagtgcttttgttactataatgccaccttaagtccttggccattttctctgatctgaacattctcttaaaccgtggaattatcggaaagtatcgtaataccttctgtgggactcctttcttagcttcaccagtttgcatgttactcttccaccgtgacgcattgcatttaggacaattttctagattcttgtacctctttctaaatagacagcagtcgtttacaaatgcatgaatcttttcatatcccatatcaaagctctttagaaattacttgacttcatacaatgatgtatgaagcacattgtctgcgggcaacatctctggcaatgttccaagaagttcattgaaactcttatgagaccaaccatttttggtcttgatcctaaaaagagtcactatagcagacagcttgctgtggtttaaacagctaggatatagaggtgtttcagcatctgcccactttgccaggaactcatcttctcttatgtcctcaccctctgcaatctcacctaagtcagcatcaaaatcctgagctgcttggtatagctccaaaatttcagcattccaacgactgaagttgctctcacagtcagccactgagtccacgtccccatgatgataccaatcaactctcaacttgtaagcctcatccatcccccatcttacaagatgatctaccacatcgctgcctgactgtcgttccacattacgacagtctttgcagggacatacgatcatgtcaatgtctcctaatgcagcagccacatcggttacaaatttctgagcacctttctcatatccaggatcagctcttcaagtaaacaggaaaaataaaaagcctcttaaagcaaccaaacctaatcagaaaactaacccatattaattatctgctaacctgcatagacgaacccatgccttgtccaacattatatgttctaagcttaataaaaacctttgtaaaagcaattcaaaccataagcaacattaaactatagaagacagtaactcaaatagcatcacagacaaatgcagttggaccaatatacaaacttatctcttatcaagttcatcaaattaagaaataaacaatggcaaacacaatcgacaatatactatctcagattaaatcaaagacacatgttttaggaccaacaaattacactatctcagcaaataaaaccaatcaacaacaatcacaacaacttcagtaaagaacacaatcgacagtatactatcttagattaattcatagacacatgtttaaggaccaacaaattacactatctcagccaataaaaccaatcgaaaacaatcacatcaacttcagtaaagaacaaaacaaaagaatcacagcaacttaagttcatacaactcataagtaaagaacagaacaaaagaatctgtcgtgtgactaacttgcagtcgtgtgaatagaagaaaaaaagtatataaaccccaaaacgataatcagtataagaaagaagaaaagtttcacttcctaattccattcaaatcacattgccctagaaataacaaatcgatgcatataaaccccaaaatcaaatcgtcacaaagaactaagtcaattgagagtaagacatgctttgattttgagctcactggtggctgctacaaggttagagctcattggtggctgcgacaaggttagagctcactggtggctgcaaaatggaagtcgattctatgagattaggtcaaaatgcgagtaagatggaagctgaaatggattaataaggaagaaagactaaccttgaatttgagctcaacagtggctgagctggagaatgtggcggcggagaatctgaatttctggccagcgacaatgttgaatcgattttgggttgctaattggaagtggattcgacagatcttagcttttaggcaaaagtgaataattttggtcttctcgattttgttaggttttcacgaagttgtagagggaagtgaatagttttgcctaagtgttggcgctgaagtgaataattttgcctaagtgttggcggactaaagtattttacattcccgctagaggatttacggtcttagcgtttataaggtgctattaagaagtaaccaaaacttttattcatcttttatagcagttcaggaaaatgagctatcatctactgctatcaatgaggactttttttgtagtgtttgtaacttgactatactactttgatcgtaactcgcttatctgataccattccctatctattagaacctgaactgaatttgaaattatcatgtctatgcattgtttatgatctcatggctaccatatacatacgtggatcatcttattcacttcatcaccctctgttaatccaagtagttgtctctcatttttagagcagtttcccatacccttagcctagccttatttcaagccgaagatcatttgtgtgtgattgtaaggtctttttcgattgagcttggtataacgtgttaggtatgagccgacaagagcagtctttcatgtagacctagcccacactttttgggttagctaggactaggtggagacttgtatttgggattgggattgtgtatggaatgaatgggaatgagagtgagaatgaaaaaaaaaaaaaaaaaaagagaataagagtttagagttctaaaggggatacaaaattgttaagtctagtaaagggtttggaattcaaagaagttaggcattgttattcaaagaaaagggtaaaacgccctatgtgctaagattagaagaaacgccttaagtttgtcaaagtataaaaccaaacccgctagattcttaaatcgtttcaagagaaagccttagaacatgaacgaaaaagagagaaagaatgagaaaaagggtagagttaggacatctatgggaatgggatcaacttctgagctatcatactatatcattgggtagatgggagtctgttcttgtatgtgtcagttggcttttacctttagcattctattgaagctcaatcttttctctgagagtcccctgttactcgaccaaaccattagagggaccatttttgtctcttggcctaagcccgaaaccaagtgagttcataaccattgcattgcttgatccactgttagtgtttaatgaatgttaaagggaattggttgacgtgaatgcttgaatagattaaggcaagttgttaggttgcattgtgacgagtacgactaacgtttttaagtaagggtctatcatcttgcaacctagaattagctacatggacattgagcttacccgttttataggcatgcttcggtttttgaatccccaccttcaaacctctccttcaacttaagattttttgtttgcttgagggcaagcaagagataagtttgggggagttgataacacagtattttactcattttaggtgtatgtttatcatcatttagctttgcatttgctcattgtatcatatcattttgaaccattttaacttgttttgtatacttaggcatctaggatcatattgcattcgcattgcatattttggtgtgttttcaggtgcaaaaagagcttaaaaggactctactcgattcatccactcgatccaagcagctacagaagaggcatcattctactcgacctctttactcgatccaggatactaaaaaggaggctgcagtttactcgaccctcgtactcgatcaaggcaacctcagatgaagcagcagattcatctactcgcccctccacctcgatccattcactcgaccaagggtgaccatctctacaagacttgttgagctatcaaagcgtcttcggatcctcctcattccccactcaaccatacatgtgagcatacggataggagaggatgaagcatctactcgaccaattgatcactcggagaatagacacaaaggcgcagactttgcagcaccctctttactcgatccccaaggtcgagtattcgcccaaaccgtcttaagtctcttgtcttctagtgaatctagggtttcaacattttagtataaatagatcactttgggatttatccaagggatctatgctttatctttcagtttttctttgtgtttatgaatcttgaaaccttaattactcttaatctatttcctttttgcatttgattgtttaagtaaaattgtttaggttgtttagatttacattttggtatgattttagtaatttctgggtttgtgttcttgagaatgttgcttgagtagtgattagggttcttgaggatggattagattagggtaatctctaggttagttaggtagttagtgtttaggtttacacccttctggattcgcttggcccctatgcggttttcgctggctaatatggagattcgatcatagacttccagcgtccaaaagacgttcaaatggatgtctgacctacgaattccagagatttgtagactcgaccaagggattggcttgtctgcctattggctttggtagattgtttcttaaaccctactttgctatgtttcatcaacgagagttgagattaggaagtggtagagttatgggggtctctgtcacgagagtggattgacccggtttttgatactatcgtcatgggtatctacctttcgcctattagccatttgatgaaccctagagttacccttatcaatgaatccatccttagaacttctattagattgatttgtatcccatgttgattgcacttttattcacctattatttgtatcctctgttgattgcattttagttcttaattttgtcacctgtttgttctactcgacccaatgatcgagtagggctcttaagttctcattttaacttgtttgaatcctgccttaggattgttactaggaacccaccatcattataatttgccttgacttagttgtttttgtacacatcttgattgctagcaatatagtggactggattgacaccttctataactgcatcgacatgtttgtgttttagggaaattgaactgaatcacacattcaccataagcagacctgaaaaacttgcttatcagaggcgctctccttcaagaacaaagtctatggcaaatgtgggtacagagttagggaagtcgcgttggtctccacgcagaccctcacactcaggaaaggaagctaaccacaggtctgactctcgggagtctcagagacgtagttgtttattgaaacgttctctagtcccgcctgctaaaaacccaagtccaaaggacaaggatggcgccactagcactcctaggtctcgaagaccagctctacaacatattgtgcagttaccagttcaaacttgggaaggttacaagaagtagtcttctagtatgcacgggagcctagtcatccatctcctccttctagaccctctccgctttctgattctcatcacaccctcgctgttcaggaaagtagagttgtggataatagagtgcatacttccctcagaatgggacctcagttggattctatcacaattacggttcccgaggaaatgtcaaatacaagagcttcagggaaaagaaatactccaaatcaaaaaccaaagccaccacaaaagattggaccaaaacaaaagcctggaccaaaaccaagagtaattcgtagtccctccaaggggtaagcctaagaaagcagaaggcaaccactacttgggcctcttcctccaggaaaaagctccacgttgataatatacctgactttcaggatggcgaggcagctgtggcccttctgcaccgcgtatactgcctataatccctgctattaacagagcctcggtggattttcaaattccaccaaacactcttccttagctattgtagcttggaacttccaagggttgggaagcaccctaacagttcctagattaaaggaaattcgacgcagtctgtttcgtgatatcttttttctcatggagaccaaaaatcaagatgacttcattattaaatcttttgaggggatgggttatcacagcatgtttactatacctcctctagggttaagcgggggtttagctctcttctggaaagatggagactgcccacatcatggtttcagtgaggtacaactctttggtaccttcttcagatgagtcgattggagataccagatggctctagatgcagcgagtaatggtaacttcaacaccgttacccagctgatgctacagctctaatagagaacctcgcttgcagcaaaagtgattataggtttttagtcaattatcctaaaacaccaatcatgtcgttgtggtattttaggttgtcaatccaaatagatgtgatgctaacaatcaagatgtgatcagaagtcactaagtcaagccaagcaataacagggtttggtgtgttctagcagtcctaagtgaacatgcagaaaacagaaaatcaagcagaaacagtaaaacactcgaccaacacagctcattgttgagcactgggtgtggtcgagtgacaggtcgagtaataaatagaaaatataacaggaatactcgactgcacagtgtgttgccagacaactgggtggtcgagtacgaggtcgagtaataggagagaaatgcaaattctaagcaaaaggtaacaagatgaagtaaacgatagtagagtaaagaattaaatcaatcagataaagaattcccgaggatggggtaattgagtagtttcgtttcctcagtttataggtgattgacatgctcaatacaacaagttcattaaccaaatctaagtgccaccgcaacagagaccctcaagttaaactagtcccagactcaatcaccactgacgagagctaagctaacaggcattacgaatcaacaagttaaagccaaaacgaaccctgcaaccaataccttggtatagagccacgaatctctggaattagtggttcaaacatttcatcgaacaccttttgggcgcggaaatgtctgggctcaaattccagttgatcagaaagcaataggcattaagaacaactaattgaagggatctatcaatcaaactcaaccacctagcataccgagaattctaaacttctctaacccatcctaggaaacctattcactactcagacatcattgcaaagaacataaacgttgaatagaatgaaaacatgataacaacagagtaatagcaagatgataacaggatgaacaacagtaaacgaaatcaaaagcgaatgctgaataccgaataaattaagagaaatccggattacaaaaagtcaagaacacagtgtctgcggaataaaacttagataaacgaaaatataaagtacatgctacttatagcgaaatattccaaaaccctaatactcaaaacgacgtagtattacgacggattaagaacggcactcgacccaggtggtcgagtgagtggtcgagtgataagctggagtcttcttttcttccttctgctcgagtgtctggttgagtgcaaaatggagaagactctgaagctggcagtcgagtatgtagtcgagtgatagggatggtggtactcggcttggtggtagagtgatcgagtgaaggtgatgaaggtactcgaccacgtggttgagtagtgtgatcgagtgaaggtgatgtggtggacgtgatgatactcgaccagggggtcgagtaatgtgatcgagtggttgtccaggtggtactcgaccatggggtcgagtggtgacgtgaagtgctgaggtcttctactcgaccacggggtcgagtggtctgttgatgtcgtgaggcatctacttgactagggggtcgagtggtttgacatgatcaggtccgcttcttccaattagctggtcaacagctccaaatcacctgaaatcaacacaaatatgcaacatgcatgcaaaactatcctaaacatgcaaaacacttgtgatatgatgcaatagtgataacaaattgatgctcaaaacatgtaaaatacacacttatcaaacagtaccaagaatgctgacttttagagtaagaagattgatggagccatttcaggcaatcagatagcagaggtgaatgctaaggtggattcagttcataacttgcttacagggaagaagcatgtccactttgcagctgaggaggaaattattgagcctgagcctgagtcaggaagtacatagatggtcagggctacaacaagtttgggcagccacaaggcaacatcactgacaataggtttacagggaaccagggttcctccaactacactccaaagcatgcttatcaggagacctttcctcagaacacctttcagaggacctatggtaattcagcctaccaagcccccctccaccctcattagagataagcatggattctatgcttgagcagattctagatagccaaacaaaactcgttgtggagtttaatggcaagtttgatgttgcctatacagatcttaatgggaagattgacaatctaagctctcacttgaagaagctggaagtacaggtcgctcaaactgcacaatcaatcaagttacaagagggttttcttcctggtaatcctgatgctaacccaaggaagagctgtaatgccatcttgatcatagaaggagatgatgtgtgggaagaattggacactgaagacgagctggacctcacagttgcagagatggtgtcgatcgacaccttccactgtcgatctgacaccctacgggacgctcttctctgagacgagccagtacgaaggtgtcgatcgatacccctctagtgtcgatccacagtggatccgaactgcaccttgtgaggtgcaaatcccaatgcagcccgagtctgtttacactcctcctgtcccttatctgaggaagcgtcgttctaagcaggaagcaagagattcatgctgctaagtgcatagcaatcatggagaagattctcacttctctccctaaggatgcatctgagacatcttctgctccactcaacaggtatgtcaagcaacttgttgataatggtattagctcagatgaagctaaggtgctgacacgggacatcagtgtaatcatgctgcctaaggtcaagaaagagaaggcttatagagaagacattgcagagtacatttgcaccatcactcctgatcagaccactgaaagcttccagatccaggtagctttgttcttgattgcgctatttccaccagtaggttcagcctctctttgtgtgatctcggatcaagtatcaacctcatccctaagtctgttgctgagagactaggcatgactcactacatgccgaacgcatcactctcctcttcacggatcgttcaaacgattccctgaaggaattctcgaaaatgttcttgttaaggttggtaactccataatccctgctgatttcgtagtcctggactatgagaaggaaccctaggatcctcttatcctcggaagagcattcctatctacagctggtgctaggtttgatgtgaagagagggagaatctctctcaaggtgtgtgatttgtagagggagtttagcatggatggttaagagcttactaagactatcaatagcattgcttccagcactaacacacctcctcagattgctcagaatccccagacagagccacacacaacgctcccgtcagctcagctcgccattgagagttgaagagcaacggtgtcgatcgacaccaccactcctgtcgatcgacaccctcgggtttcacagacagctgattctgcacattctcttcagccaacaccacttgaggacctatgtgataccttcgattcattccttagattcttcaaagtttgcttcacaatataacaagcctagaattcctcgaaagcttgtttctcctgttgttcttacaggtgacgagacgagtgccttggaaggcgagctccgaccatatcagtctacacaccgccttggaaggcgaggaggcagcagcaatcctccaccactccacccacatcctgaactctaccaagtcaagctattgactcaaaataagcgcttagtggtaggcaacccactggtttagtttttctttccctttcttttattttcttttatttttgtttcttattatttttcccgccttcagatattaatgccactgaggacagtgtcatttaagtctgggggaggttcttactaatatttttatttatttttgtttcttattatatttcgtttttgagtttattaacttcttaaaaaaaaaaagattaaaaaaaaaaaacgttttctttagtctagttaggaatcatgatctatatgtctcttgattattccctgattgatgagtgctgcaagttcgagtcaatccgactattggaaaatctagatagtaaactaacagacttgaggatatcctagtttccaactcaaccactaaggagctattctcattgctcttccttttacctcttcaaacggttagtattcatagatcttaactccttgttcatacctgatattgagaccaatgtgatagaaaaagaatgtgttcctttccccttataaaaagaaaaatataatgaaagattgagaagatttttagatactgtataggggtaggaatgtttcctatgaccccattattatacattatttggaatgatcaattacaaaggttggaaaaatgccgagagtgtcgatccagtatgcgagttcccctttgtttactctctaaaaagaataagtctggggagagaaagaacaccaaagaaaaaaaaatataaagaatggtcgatttatcatggtatagtacaggaatgagtttagaaggatcttgaatgtttacttgtttgatgagacccagtgatgtaagcctcgttgatatagttgtggaactaaggtatggaatctagaatgttgtgtaagctaaaagagaagtacatgttggttaggatttgattagacttgttaggcatatggacttagtttagatgacatggcaataggctagagaatgttgggagttcctttgttttcaaaacctcttccacgggttcggcttttgggttttgcttgagggcaagcaaaagctaagtctgggggagttgatatatccctattttcactgaatttatctatgttttaggcataggattttgagtctttgtgttatttctcaagtctttttagtgtcttttcaagtattctatgcagtgggaaataatggagatgaggagacattttggagcaaaagctaaggaaaatgaagctaaggacgattttggattcatgaatcaagagaagtatcgatcgacacactcttggtgtcgatcgacaccagtttcggcccagcagagtccaagacgctttcaagtttaaagaacagggaaatatgccccaggagacttccctatttgcattattagtccctggacgttttatagggtttatatacattgttttacaccctagtttcgttatcatcaagtttttatcaagctttttgcaaaaccctgttacatagagacataagcaattcatcgagtgttttcagagattgattcagttcttaatacagtgaaaagattccttctttcccttaatctatttgttgtgtttatgatttcatactcaattatgttgtttgcttcaattaatatgtctgagtaatctgcttgttaggaatagggtttctcattagggattcatatggtttagtagattgccccttctggtaggttatctgtagaattc

SEQ ID NO: 201 - DNA, 113960 bp, Arabidopsis thaliana
gaattctaggggaagtaagctaaagaagttgacaatggaattccataacgagctttgtttggctctccagaatctgctcaagcatcgattccattcttgtctcttctgtgggtggaggggaggcttggtaagctgaattaccataggtcctctgaaagtttctctaaggaaaggtcttctggaaagcaggctttggagtgtagttggaggaaccctggttctctgtaaacctgttgccactgaagttgccctgtggctgcccaaaacttcttgtatccctgaccatctatgtagaagactccttcctctgactcaggctcaggctcaatagtctcatcctcagctgcaaagtggacatgcttcttctctgtaagcaagttatgaaccgaatccagcttagcattcacctctgccatttgattacctgaaatagctccatcaatcttcttcctctcaaaatcagcattcttgttactgttgctgcaagcgaggttctctatcagggttgtagcatcagttgggtaacgtgtgttgaagttaccatttcttgctgcatctagagccatatggtatctccaattgactcctctgaagaaagtacctagaagttgtacgtcactgaaaccgtgatgtgggcagtcccgttggtactcattgaaatgaaccacacagccttttaagatttagctggaccctgtgtgaaggtagacagcttgtttctcaactcatcaaacttaggatcatcgtagaaattgttcaagaaggctatcttgatgcttctccaagtcttgagggaacctgctttaagttgtttcagtcaagaagctgcttccccagcaagtgaataagggaagagcttgcaaagtaggtagtcctctgagactccattagtcttgatgcttagaacaaggtcctcaaagcgctctatatggtccattggctgctcatgagataagccatggaaagggtgctgaccaactaaagtaaagtagcgaggcttcagctcatagacgttcctctggaagggtgggggtacgatcgctgatcaattagcatagaacaggttgggcctgttgaaatccccaagagtacgacgtggtttcgcagttggaggaatagctgcaggaatctggtgttggtgtcgatcgacacctctgttgtgtcgttcgacaccaactacatcgtcattctgctccctatggtgttgatcgacacctcttttgtatcaatcgacagcgagccctactgtgtctctgacagctatttgcgcgttgaggcgcgcctgattctcatcgacgtcctcaagtaggatgagtccatgatcattcatctctgaccagccttattgtaggcttgcccatccttatctctcaaaactccttctacatcagctctgatgactctattagtcattgctaatctctgagtttttcggttggtgcgttcaagttttcccaagtccagtacagacaagttgataagcttcttctgttttgtgctctttgtttgcctaggcatacacctgaaacacaaaaaggaagaaaacaagaaacgcgtgagtaacaaaatagggaagtcttctagggcaaatttcctcttctgtaaactcgaaagcatctaggacttttactgggccgaaactgttgtcgatcgacaccaagagtgtgtcaatcaacactcctccctaattcctggatccaaaatcgtccttagcttccttttccttagctcttgctccaaaatgtctccttatctctattattgtctcagtgcatagaatacttgaaaagacactaaaaagactcgagaaataatataaagactcaagatcctatacctaaaacatagataaaatcagtgaaaactgggatatatcaggaactttagttgttaaagaaacccaaatcccctagaagtatcaaagttgagaaagcttctcctagagttaagagaaaagaaaagaatgatctgaaaaagggtttaaaagattaaagaatgcaaagggaagagttaagttcttatattgggattggagatgagattaccattagagctttatttgttatattctgggtagatgggatcttatctctgtatgcataacttgggacttacctttaacattctattaaagctcaatcatttttgagagatcccctgttactcaagcctactctttaagggatcatctttgtctctcaaccttcaccttagccaaatgagttcattgatgatgcattgaatcataacaaggcatggctaacgtttttgagtaaaatccgatcatatcgcatcttagaactaccaacttagacattgattttatctgctttatctgatgctttggttctgagtccccaccttcaaacctctccttcagctatgtcttcttatttgcttgaaggtaagcaaagactaagtttgggggagttgatatgtctatattttgcaagttttctatgttcattcatcatcgttttgagtctagtttcatatcattcatcactattttatatcattcctcatcattcttgcatattttgcatgattagttgcatgattaggatagctttgcatacatattctatttctgagttgttttcaagtgatttggagctattgacgagcaaattggaagaagagagccggaaccagaagacatactcgaccccttggtcgagtaactccagcagcacactcggccccttggtctagtaacattgaggccgttcttaccaatcactcgaccccctggtcgagtaaccacactccatgctactcgatgacaccactcgaccactgggtcgagtaacacttcgtcacacccctgaccaccactcggacattcactctactcgaccacgagatcgagtatcatcactctaccaccactcgactaggcactcgaccacatcttcaaattctactcaaatccacactcaactagacaagctgagcacaaggaagagaagaggagacgaagaagtgtttggaagcggtccggagcttcatccgatcacgatgcccatctcggcccattatcactctatgggacggtcgattaggtttccggctcatctactatcattttatattgttttgtataaataggtgtctgaggggtttgtcctgagacatctagtcgacattgagtttttgcttcagttttattctgttttactcgggctgcgccgctttgcttctgtaacttgtaattcgaaattttccaagttattcagattccgcatttgatttcatatgtcatcttgtatctctactctttatctctttactgatgcaatatacttgtttacctgcgattatgtctctgagcatgttgtctgagtagtgacatagagttctaaaggatgagatagaatggttgtggaatccgtagtgtgtagaatggttaagttttagacttgattgaatccctttaggactagttgtgtttactgcttatttctttcctgagatattcgatccaaagtattcctacacctagaatgtgttcgatggaatgcttgatccactagttcctgagatattcgtctatatcccaagagattggtcgtttagagcgtttattgattttattagtcggttcatattgcctgcatagttagattctattaatgagaattagtctcggctagctttgcttgaggatttctatcacgggagtgaattgatatgttgttgaacctgttatctagggatagcttgattgtgcttgttaaccatctgaataggttaggataccaccccatttgattgccccatccttaggaatttcttgtctatttgatttctctgttttatcgttatcgcttaatcgttctcattgcttgtttcttagtttttgcaattactcgaccaacttactcgaccacacccagtgtctggcaacagactgtccagtcgagtatagttgtttcattttctgtctgttactcgacctgttactcgaccacatcctgcttctagcatcatccagttgcggtcgagtgattttagtaattccgttagaatttctgttttctgcatgttcgcttaggactgttagaaatctcaaaactgttattgcttggcttgacttagtgacttctaataacatttcatttgtttgcatcacacctgattgaattgacacctaaaatactacaacgacatggttagtgttttacgattaattgagtaaaatcctactatcattaatcttggcaaatgcacatctaaatctgttttctcaaacatatgtttacaaattgatattccatttatattctccatgttttatttactaatatggtttactgttttcgcatggtgtctctgttaagaaagacatggtggcaaagtatgtgaacctggtgaatgttaatgagtggatgtttattgaaacctttgctcgtacccatgcttcaggtcaaagacgtcgcatacattgtagtgtgaataccagttccttgaaggtgaaaaagccgaagttttggtgtgatacttgcaagaatgccgtgacaaatgttgtagccaaagttctgaccaaatgaaaggaagacttaccaatcgattacagaagccaatcgagttggagataagaccaagttgcccttaggttatctcgataactttgctgaagatttgtgtcaacaatttttttcaatggatttgaatctcactttaatcatgtaatcactttacctttatattaatgactatgtaggaaatgcattaaatcaattagttcagaagctaagaaaggaagacttaacaaacgattacggaagccaatcgagctgcagatttgaccgttagaagctgccattctctcgatagctttgcggaagatttgtgtcaacgactttttgaatggattcaaattttgattggagagacaatcgtggtcttggatttaattgcagaataaaagagaggaagatttttttcaaatagatggtaacattttatttgcgtaagaagatacgaaatgaagacttaccaatggattacacaaagccaatggaactgtagatccgaccattagaagctggcctcaggttctgtctataactttcggaaaatttctttccacggttttcttagaatggattcgaatttggattggagagaaccgtggttttcttcgatttaatcgcaggacaaaacgatcgaagctttgtttaaagtagatggtaacattgtttttgttttgccttttccaattttgttttcttcctttcaaggaaacagactttagttttagtgggcttccatgatcttagcaaatacccattgaaaaaaacatttgttgtttctaaattattatagtgggcaaataccctaaaacctaaacaggtttcaagtttattgggctttattcttcattataattatcagcccaccacacaagcatatctaacaatgtcttattgttctaacaatctatgttactatcataacataaacttgattaatatttactacacagcaagcaagtgtaaattaatttcttttaaacatagatatattaacaaagtcttaccaaagagaaaaaatatcaaaaacatatgttattatcttcacaatatacaaacttgaagtcaaaaaatgctaagttacaggctcgtagttacataacaaattagacattaccatctagattataaaacaaaaatgtgttaaataacttaacccgcggtgtaccgcgggtcgtattctagttaagtatatttttggtatcacaaacagtcatactgttcattctactaatgttatttggacataaattgttttgtctgactataattttaaatattcaaatagagagaattagaattaagttgtcagaatttaggtatcctgtctaaatttgtaccgaatctttttcaaaaaagtattgttgaataggtaattatttaaaaaacggttatgggacatgaaattatttaatttttaatctttactagcattagcaaagcacgggtacatgccaaccaaaaaagattgggtcaaagagattaacattgaaataatctattaatttaaatatttaattttgatagcatttattagtttccagtttgatattaaaatttaaatatacaattattttcaaatcttatttaatctgatttatttttacatatatttaatgtgtttaatatgattgaatactttggtgtttattctatatacttattgaccaaaagttgttgtaaaacaaaaacaacaagttaacaataaaaagacactttgggatttattctatttttattcaccaacaatgattgtaaaataaccacatgttaacaattaaaagacattttaatgtttatttcatccttatttcacaacaattgttgtaaagaaaatcacaagtcaataattaaaagacactttgatgtttattccatcgttattgaccaacaatggttataaaagaaataacagatcaacaataaaaagacactttagtgtttattccatccttattgacaaaaagagaggttatcaaagaaataatgggtcaaaaaatatatattccgatgtttattgtattcttattgaccaacaatagttctaaaagaaaccacgagtcaacaattaaaagatacttgggtgtttagtatttattccatctttagtgatcaacaattgttaaaagaaatcacgggttaacgataaaaaagacacattagtgtttattccatccttattaacattgtctttcttataaaatatatcttattcaaacacaaatcaattgatattaagatcataaactaatacatttgatgaaaattataagattcaaaatttctttatatatttgaattgaattattattatctttctataaattagaactagaaattgaccctcggtacaccgcgcattgatatttttgttcgaaagctaaaaattttattttaattaatattatttatatatgaatgacatattaagaggtagagaatatcgcaaaatctaccacattctaacaactagcattcaaaatctaccacaaccagcaaaggttttcggaatctaccacttttcaataacacatgcggaattgtggaccaaaatacccctgattgggacctagtatgtgttagagaaagagacagtttcatctggcgcttccgaagaaggagcaggtcggcaataaatgttgcacgtttacatttgctatctaattgaatttaaataaaaaatgttaataaagtaaggtagggccattaactgctctcttaatatataagataaaagaggtttgtagatttgcaaaaaactagaaatgtagggagaaaacactgatattggacgaaattgaagttgtggttgaagaaggggacattaaaagctgaagaaggtaaattttattgtaacatttttgtcctttgaaaaacggttaaatttgtttgtttgtgataaatgcaatcaacccacattctaaaatggtgtatttaatagaggatggcaggtaccgatggacgaaggagtaatgatattggtcggtggctgggaatgcaaaaaagtggagagtggcgattcaagatgtcggcaaagaaatatgcaaagtgtgtagatgtaagcgaagaagatacgatttctgatgttgaacggaaaattgccacaacgcttggagtagaagggaaaaggacaaaattagagctgagtttttggttcgaaagaggaaataatgtctacatatagcaaaagatgccgcttgtttctgttgacaacagttcattttcaaaattcaaaaagataaggctagaaaaaagaggattgaacatgtatatatctttagaagaagacaatgaagatgtgtcaaagacaaagggacaatgcgagagtcgtggaccagatgtgattgttgttagagtcgtagcaaaggtggggcgggagacatggtgggacaacgcaaaggagatggtgaaagcacaaatataatcccattgaattttgaggaagaggattttttagaagaatctcttaagaggaaagctgctttgatggaaaagggaaagcaaagcggggacgagaagaagaactggttgaagcattggacacggatagtggaggatgggcatctgactgagaagacaaaatgttaagtgagggggaagattcaggagactatgattttgaaaatatgaggaagttgatagatacagagtactcgcctgattgggatccttggaaggattcgaggaaaaattcattgacaattgtagacggtcttgcgggggggggacaaattcatcaaaacgtgttgggggacgatatatgcgagacaaatttaaggggtattgataatagattttttggtatcaattcctaaagtactatcatgtcgttggagtattttaggttgtcatccaatctggtgtgatgcaaacagatcagatatgattggaatgcattaagtcaagtcaagcagagagttgttggtttctaataatcttagtgtgaaataaccgaaatgaaatgaaactgaaatgcgaaatggtaataacaggcagatgaataacaaagcaaatgagataataggcaatcaaatggataagagattcctaaggatgggtaatcgaatagtgtgatctccttaatctatttagacaacaagttcaataacatattaattcactaccgtgatagaaatccttaagcagagctagacacagacctaatcaccattagcgatctctaactaagcaggcaatatcgaatcaacttgttaaagccaatacccgctctaaacggccaattcctttggatagagacgagtatcactaaaattagtagatctgacattccaccaaacaacttttgagcgtgggaatgtctggattcatatcccagttgatcagaaaggaacaagcaataagcgcaactaatccataagggattcaaatattctaaactcaatcatctaaacgactaaggacatcacatctaccctatcccattcttagaaatacaattcactacttagacataatcaaagacaataacaatgaaacgaatgaaaacatgaaaacagaaatgataaaggataagcgataatgaaacgaagactaaaatatcaaatacttgaaaactaatacaaagtcgcagaagaatgttgcggctatgaaaaaacgagtctctagaaaatagattgtgacaagtgatgtctaagatgagaaaatccttagaggctatttataaaagtgagacaaatcaaataaggaaagtagatagataatagtcttcacatcgggaccctgcgattgagcatttgatgggttaaaatgggcctccctgcaatcgagtatgtgttggattgaattgggctccagggactccgccttgcaatcgagtgatccaaagacccttccatcgagtatgtgatcgagtgcccttgggtgatcgagtggtttggtcacctctcttctcttttgtatgctcagcttggctggttgagttcagaatcagtagatgggcttcctggtgatcgagtggtgaaaagtgggtgattccttcggcttcgcgatcgagtgaaactgagctcctggcttctccggggttgtgatcgagtgatttgccctcatatggctctaaggttgcaatcgagtacttaaggtgaaggtgtgattgaggatcctgactttctgctctgtttctcctctgtttaaacaccaaaagcacctaaaaacgacccaatatgcaatgcacatgcaatcctaatgcaaaatcgtcctaagtatgcaaaacatattaaaacggctattaattagatgaaatgcgggtgaaacaatgtgaaagtgatgaagaatgaatgcctaaatcatgtaaactatagacatatcaactccctcaaacttagtctttacttgccctgaagcaaaccagaagacataagtagaaggagaggtttgaagttggggacttataaccaaagcatgtgataaagtaattaagctcaatggccaagttaatagttctaagattcaaggtgaccgacttctacttgaaaactttagccatgctctattataatctgaacctatactcgattgcacaatacgtctagatcaaccaatccctttaacattcattaagttcaaaaaatgaatcaagcagtgcattgttagtgaactcatttggttacggacgggttatgagacaaagatggtcccttgaaagtggttcagaattttaatactttagaaaaatgctaaaggtaagtgccaacctatgcatacaataatagcactctatctacccaatgacacaaaccgtgaatagcaagtagatggtcctatctctaaacccattgatgatcctaagtctacccttttgtactaaaggcatatctcaatttttttcttggatcaatgttgttcttaaggagaggcttttcttatactctatgagtctagtctagtaaattgggttctttcttaaactcttatggctcttataatcttttctgtttttgttgtcatctcttatttttttatagcataatttaacaattctatgcttcccaaacattcactagactacaatatgattttcagcttccttctcctatagactctaaccaattattttctttttcttttcacacttaatctcaatccccaaataagctctcacctagtcctaccaaatccgaaaacgcggattggaactacatgagatactactcttgtcggctcaaacctaacacgttctaccaaactcaatcctgaaataggcctcagatgctctcacatgctctcacaaagtaacatggcttgaaagaagggttggttaagggtgggggaactactccaattacagaagcagctacttggattaacaagagtggtgaataggtgaaagaaaatccaagtatgtattttatccatgagttcaaaacctatgcaaacatgataattataaataagattcaagttcaaattgacaggaaaaggtgtcatgacatgcgatcgagtgcttctatagaacatggtgcggttttacgtcaaaatcattcaaatgcatcaaacaactgataatgggggcattgagtctattaagtaaatcaacatgcttacaaggttatctcgtcattatccccaatgcatatgcaaaaatcctaaatgaaacactctagactcgatcctaaatctaatgcaactatatgaacactcagcatttgtggaattcattttcagaaaatgttcaaaattgttttgtttttttctatgtcttagatgatatgtagactcaaatgatattcacaaaaaacatgtcaaatacgtcttgaacactctcccaaacttaaatacacagtcccttgtgtaatcaaaatttgagaaagaattcaagagaaacaaaagaaacaaaaacaaaagcgatatttacaaagggtttggtgtgttacctcagtagaatttgctggagatgtagtcatccatctccgcttgagtgtattccattggcatgaccggttcttggtgcggttccgccatctcttcgtcattgtgctcgatcgcaaccccagtaagttgtggaccacgacgttcatgtgttcttcggcccgacattatccgtcccttgctcgatcagtcgcttctcctgttaacgggtggtcgaatttgaaggcgtacctctcatcatgcatttggtgctcgattacatgggtaagcttgagatgggcgatatccttccatattggttcggtctgagtcgatctcggagggacttcgcacgataggagaattggtgtaaccactcctccaatgcaaaccgctccttttgctctattcttgcttttggacaatgcccaccctctatagctgtataggtggttgagaaagtacatttacggagttgtgtcacttgtatctcctctcattgtctctccgttcttggtgtatcggaggaagctcttcagcgccaagtccatcgtctccatgtcttttttctttaataacacgactttttagccagttttagctgttgttttcttatgtttcagagagtatttggtgccattctagagccaagaggaggagaaacacatattctaggtgccaagaaggttttaagagtttcggagcaaaaagtatcaaaaggcgatcaattccagtacttcagaagtttagcatccggaaacgagacatttcggtatttatgcaaagctagaagagtcaagattaacgttgaagtcgaattgaagcaatgcataaagccgtgtcgaagatatgacctgaagagtacagacatgtcaagaatcggccgtttggaaataataaatccaaaatgcgtccgaccaaggagacttgaaccaggtcagctcttagaagcttgccgccgaccactaagcccacgcctacgtccttccctctttgtgccactgtcttaggcttctccaatgaagtccacaactcggtgtgatcacatactgacccggcagattgacgttcttacccctagacctaattcttgaccacctagtataaatacttgttctaagccctaaccctaaggcgtgccttcatcacaagcgaaccctagccgcagccgagagctgccaacttgccgctgcacccttgagctcgaagcaccagctcactctttttctctttcgttttgtataagattctttaaggtggagcttcgcctcttgtgttctacattgcatgaagtaatctctaaaccctttttaagtcttattcatctctttattatggattacacaacccaacttttgattaactcccttgtcatgagcgagtagatctctagttaggatgaggtggtttcaaagaggaattcatgggaactttagatcaaatttaggttggcggtttctatggttttgtttgatcgtttacactattctttctagttgatacaattaaaccacttattctcaccaaatcaatactccattcaatcacgaaacggattacacgatagagaatctaatgttcataaaacatgagaaactcagattcaccttgtaagatctcttgatggatcttcatataggatgaatcaaattattctaaacccagaaaacctcaaagaggaagaacaacaaaattcacaaattttaacgattaaaatccaattctgatcttcaacttcttttaaacccaacaattctctaataatttcatcttaaccgttgcttctttctttaatcaccaccgtccacgtgtgtattctcttagcactccttttactatatcaaatcctttcctcccaaaacaaccatgccctcatggttgataagacaagcaatggcgttatccacatatgcattctcccacgtgattaagaccgttgtggcagtggcattatctgcctaaccatttgaaccgaagaagtttgttgatatgtgaaaattgcccgcaagaagaagaagttgccatgaaccattcttaactcccaaaagaaaaaactcagtctcatcaacatttgactatttaaacataaccacaatgtcattgtagcttctgattgacgttcaaatttctgaaacctgaacctccgggatcccaaactcggtttttaacttcccgcctcttaatttcaatttgcagtttatagtcctttgagctggttttgaatttgaacagctagttcttcttactctgcaacctaagaagcagcacatgcataacaacaccatcaaaaacatattgttggtcctagtaagcagccactctaaggctatttattatgaatctctacgtttaataacccgagagagggatatctccggttctcttgctttattaaaccgacttgtgcctactcatgagtcggcaaatgtggcgtatgccatgtttcaaatgtgtgctggaatgggtgatatagctggggctacattcgacatgatattggaaaacttaggtggtcggctttggttcaataattactctcccgatttggaagaagaatgtgaaggtttgattgacacactgttatcatatgaacctcctaatgaaaataccattggcccgaatatgggagttcgcttattctaagaagataagtatgcatgattgtgcttattagcatgaagaggaatattattgcgaagaatgttacatcttcaatgcaacattacgaatatgcgaaatcctttagaacttctagcattgaggataacttttgatgtaacattataatattcaaattcagttattgtataattacgttgcattttggataattatgtaagattttggaagaatatatgattgattaccttgtataataataaagtataattacgctaccaatatatgtataattagtttgaacaatgtctcgatttcttagttgaatactttcggtcatgtaacgttatctctcaacgttatctcttatttttgtagattcttttttcttaaaagcaacaccttggcgttgtggcatagttgtggaagtctagtttgggcgttgcaagcttagtaattattattgtcagtcagtggtagaaagagagatcactttctatatggatactttaatgtagtataatgtataatgttacgaatatattattcagaagaagactgattactattttttctattatttaaaaaatatattatttcttaagatgtgttagtttttcattttatacataagcaaactcactattaaagtgtttatgatttattttacacatttgctttagtcctacttaaaatacgaataaattgctttgcagtataacaaatatagcatctcaaatataataaaatattgcatttagaatatctagatctaaaatattaagcattacaataatcaatttaaataatctaataaactataaaaggtaactcaaatcgacaacatggacatttatcatcatttagatgtgcatttgcttattgtatcatatcattttgcaccattttagcttattttgcatacttaggcatctaggatcatcttgcatacgcattgcatgttttggtgtgtttttaggtgcagaaggagctcaaaaggactctactcgatccatgcagatacagaagaggcatcatttcactcgacctctttactcgatccaggcagctacagaggaggctgcgatttactcgaccctcttactcgatcaaggcagcctcagatgaagaagcagattgatctactcgcccctcctactcgatcctctactcgacccatttactcgaccaatggtgaccaactctacaagacttgttgagctatcaaagcgtcttcggatcctcctcattccccactcaaccagacatctgagcatacggataggagaggaagaagcatctactcgaccaattgatcactcggagtatagacacaaagacgcagactttacaacaccctctttactcgatccccaagatcgagcattctcccaaaccgcctcaagtcttttgtcttctagtgaatctaggatttcaacatttcactataaatagatcactttgggatttgtccaaaggatctagctttaatcctttagtttttgtttgtgtttatgaatcttcaaaacttaattactcttaatctatttcattttggcatttagttgttttagtaaagttgtttagcttgcttagatctacattttggtatgatttcagtaatttctgggtttgtgttcttgagaatgttgcttgagtagtgattagggttcttgaggatgaattagattagggtaatctctaggttagttaggtggttaagattaggttagaacccttctggattcgcatggccgctatgcggttttcgctggctaatgtggagattcgatcatagatgtccagcgtccaaaagacgttcaaatggatgtctgatctacgaattccagagatttatagactcgaccaagacattggcttgtctgcttattggctttggtagattgtttcctaaaccctgctctgctatgtttcatcaacgatagttgagattaggaagtggtagagttatgggggtttatgtcacgactgtggattgacccggtttttaaatctatcgtcaagggtatctacctttcacctattagccatctgatgaaccctagaattgcccttatcaatgaatccatccttagaacttctactagatttatttgtaccccctgttaattgcacttttatttacttgttatttgtatcccctgttgattgcatttaggtttcttaattttgtcacctgttggttctactcgacccaatgatcgagtagggctcttacgttcttatttttctttgtttgaatcctggcctaggattgttactagaaacccaccatcattataatctggcttgacttaatagtttctgtacacgtcttgattgctagcgataacagtggactggattgacaccccatatagctgcatcgacatgttactatttgtaggagaattgaactgaacctcacacccttcagcatataagtaggcctaaaaaacctgtttatcaatttggcgatgttgccaattcattgttgcattgttacattcaagatatcagaaacttttacgatcaagttcttttacatttatcaagttactaactcatattttcgtctacttatttatgtggtataggtactaactactaatctttgtacatgcaaaatcgatccaaaggttctgcacacctactaccattcagagacagaatagatagaatagctcgtgagttacaagaaaccaaagcaaaggcaccctgtgatcagcaaagaccagctgctatggatcaacagaacaaaccacttcatgttcaagacccacctaatgttgatcaaccaagaaacattagtgctggtaatgccccaaggaatcatcaccgaagacaagagatagtgccaccaccagttcagaacaacaactttgagatcaagagtggtgtcatctcaatgatccaaggaaacaagtttcatggtctacctatggaagaccccttggaccatcttgacagctttgataggctctgtggccttactaagatcaatggtgtcactgaagatatgtttaagctcagactatttcccttctctttgggagacaaggcacaccactgggagaagactccgcccccaaactccatcacctcctgggatgattgtaagaaaacttttcttgccaagttcttctctaatgctcgcaccgctagattgaggaacgagatctcaggcttcacaaagaaaaacaatgaaactttctatgaagtttgggagaggtttaaaagctacaccactcagtgcccccatcacggtttcaagaaggcttcattattgagcacactctatagaggagctttaccaaagatcagaatgctactcgacaccgcctccaatggaaacttcctgaacaaggatgtagcagaaggatgggtgttggtcgaaaatctagcacaatctgatgggtgctacaatgaagactatgatcgctcaatgagaggaactggaggtagtgaggacaaacaaagcaaggatatcaaggctctgaatgaaaagttcgacaagctgttgttggctcagtagaagcagatagactacattactgatgaaaagcacttctaaatgcaagaaagggggaatgatcaaactgaagagctgtgctacatccaaaaccaagaagggttcaacaaggggtacaacaactacaagcccaacccaaacctctcctacagaagcaccaatgtagctaacccccaagatccagtgtatccaccacaacaaaatcagtctaagccttttgttcagtccaaccaaggttatctccctaaccaacagtttaatggaggatatcaacatcagattccaccacaagggttcactcaacaaccacaacaagcccagtagctcaagatcctgactcaaaacgaatgcttcaacaaatcattcagggtcaaactactggagctctagttctggaaaaacgattggctgagattaatagtaaagttgcatgttcctataatgagttaagaagcaaatatgaggatctcacatctaaaatgacatccatggaacgtctacctgtttccaatacctcctcaacgtatacagggccacatccaggaaaaaccattcaaaattccaaggaatatgcacacgcagtcacactctgtagtggaaggaaattgctcaacacccaaccaacagaaaagatcactgaagatagtgaagttcaagaaggggaggaccagcataaaaacgaagttcaaactgatgaaccaattaagcttgatcagccttcatactcactcgaccctctactcgatcgaacaaagccaacttttgaggaaagtaaagccgcggctgcagaaaaaataaagaatggtctccgccacccttcaaactgactatgctttttcaaaaaagattcaagaaggaattaatagaaaaatacaaaaccctttttgataagcagctaaaggagattgagctaagaatgtcgttaatggatgctttcatgctcattccacactcccacaaggacctcaatgatctgattatggaaagaaccaaggaagtgcagggaatggtggtaataggccatgaatgcaacgctttcatccagaaaaatataataccaaggaagttgggagatccgggatccttcaccctaccttgttcagtaggaccgtcatctttcagtaaatgtctatgtgatttgggtgcctcaatcagcctcatgcccctatctgtagccagaagattgggttttagtaaatacaaaccctgcggtatccaactgatattagctgacagattagtcagaatacctcatggagttctcgaagacctgcctgttaaagtcggatcaatagacatccctactgatttcgtaatactggagatggatgaggagccaaaagacccattgatcttaggaaaaccattcctagctactgcaggagctattatcgacgtgaagaagggaaaaatcgacctaaacctggggaaggagatgaaaatgaccttcgacattaacaaagctatgaagaaaccaacaatcaatggacaagtcttttggatcgaagaaatggatggattggctgacgaattactggaagaacttgcagaaggagatcacctagcaagtgccttaaccaacgaaggagaagaagattacctacacttagaaactcaagggtacaaagagtatctagacgcccacataccaatggaaggaccaggagagtttgaggaattgattgttccctcagaagaagcagtatcaggatgcaccatgagcctaatcgctgaaaaaacgaactctactgagatgctagaccatggaggagagaatataagttcagatgactggtcagaactcaaagctccaaaggttgaccttaagcctcttccaaaaggtctgaggtacgcgtttctcggtccaaatgatacttatcccgtcatttttaatgatggattaagtgatgaacaagtgaaccagttgttgaatgagcttagaaagtataggaaggcaattgggtattcattagctgatattaaaggaatttcacctagtttatgtactcataggatctatcttgaaaatgaatcatatactagtattgaaccacataggagattaaatccaaatttgaaagatgtggttaaaaagaaaattcttaaattgcttgatgctgatataatctatccaatttcggacagtacattggtctctcctgtgcactgtgtacccaaggaggaatgactatagttaaaaaatgatttagatgagctcattcccactagaactataacaggacatagaatgtgcattgattacaggaaactaaatgctgcaactagaaaagaccattttcccttgccattcattgatcaaatgctagaaaggctagctaaccatgtttattactgttttcttgatggctatagtggtttctttcaaattgcaattcaccctaatgatcaagaaaaaaccactttcacctgcccctatggaacctttgcttataagagaatgtcatttggtttatgtaatgctcctgggactatccagagaagcatgacttcgatattcccagattttattgaggagataatggaggtattcatggacgatttttcagtgtatggatcctctttctcctcatgtttgctaaatttgtgcagggttcaaggtgtgaggaaaccaatttggtactcaactgggagaagtgtcacttcatggttcataaaggaattatgctagggcatacgatttctggtaaaggaatcgaagtcgacaaggcaaaaatcgatgtcatgattcagctgcaaccccctaagacagttagggatatcaggagcttcctaggccatgcagggttttactggagattcataaaagatttttcaaagattgctcgacccctcactagattgctgtgcaaggaaactgagttcaactttgatgaagattgtcttaaagctttccatttgataaaggaagcattggtgtctacacctatcgttcaagcactcaactgggaccacccatttgagatcatgtgtgatgcatccgattatgcagttggggctgtcgtaggccaaaatattaatggcaaacttcacgtcatctactacgctagaagaataatggacgaagctcaaacaagatatgcaaccatagaaaaggagtttttagctgtggttttcgcctttgagaaatttagaagctatttggttggctccaaagtgaaggtctacacagaccatgcagcgctaaggcacatctatgccaagaaggaaaccaagccaaggcttctgaggtggatactattgcttcaagagtttgacatggaaatcattgacaagaaaggtgttgaaaatggagttgcagatcatctctccaggatgagaattgaagattcagtcctgatagatgacactatgctcgaagaacagcttatgttctatgaccttgttaacaaaaacttcgacacaaaggacatgctggaagaagcatatgcagttgaagaagaaaagttgccctggtatgcagatttagtcaattatttggtaagtggtatgatcccccagagtttggatgcatatacaaaaaaaaaattctttagagacatccaccattactactgggatgagccgtacttgtataaaaaggagagtgatgggctattcaggaggtgtgtctctgaaggagaagttcaaggtatactgggacattgccatggatccacctatggtgggcatttcgcaaccttcaagactgcccagaaaattttgcaagtaggtctgtggtggcccacaatgtttaaggatactcaggaattcatagcgaaatgcgatccatgccaaagagttgggaacatatccaaaaggaatgagatgccacagaatccaattcttgaggtagaagtttttgatgtgtggggaatagacttaatgggtccgttcaaccctccgtcatatggaaatgcttatatcatagtagcagtgggttacgtctccaagtgggtagaagcaatagcagcacaaaccaacgatcacaaagtagttctgaaaatgtttaagtccattattttccccagatatggtattccgaaggtagtgataagtgatggaggctcatatttcataaacaaagtctttgaaggtctattgagaaaatatggagttaagcataaggttgccactccccatcaccctcagaccagtggctaagtaaaactatcaaacagacagatcaaagctatactcacaaaagttgttgatgtctcaagaagggattggtcaactaaacttgatgagactttatgggcctataaaaccgcatacaaaacgcctattgggagaaccccattccagatgctatatgggaaatcttgtcatctaccagttgaagtggaatataaagccgtttggacaaccaaacttgaatttggaaatcaagggagctcaagagaaaagatcagtcgacctgcatgaactggaagagattaggctggaagcatatgagagtttgaaaatctacaaagaaagaataaaagcctttcatgacaaaaagatctcaccaaaagatttcaacattggagaccaagttctgctgttcaactccagactcaagttgtttccaagaaagctaaaatccaagtggtctgggcctttcaccatgaaagaggtattgccatatggggcaattactcttactagggattggagttcttaatttactgtgaataggcagagggtcaagcgttatatgacagattgccctattccagaagaaactacagttgacctctaggaacccatcaatgcctaaaatagtaagaagtctagcttaagactttaaactagctcacttgggaggaaatcccatgcctatctctgtacatatttaattttgatattttgatatgctttttagtgtttttggaagtcaagaaataaatcaggatttgtagagctgtgaactctgtgatcaagaaatatctgcaacagaagcaattctactctataaattggtcgagtaaaattgcatcaccattttactctatcaattggtcgagtaaagtgactaaacgaccaagaatggtgatcgagtggcccacttgtctctccatcattctattactcggtggaaaaagcctttacccatcatgctcaatcactatttggtcaacactcttatcccaacaaaaaaagcataggagaccattctcctccactcatccaaatcgaaaccaaagataagatatcactctctctcattttcttctttgtccgccaaggtcctagctcgtgataggagaagagcggaaattgcaagaggtaagagagctatggcagaagagaaaagcctcgtggatgaagaccttggtggagatgaagactatttccctgaaataactccaagaaccactaaatccttgatgaagaagactaagctatcaccggatggatactatgagcttttggcggctcacgaattccatggcactcgatacccccactccgaaaccatgaacgagcttggcataacagaggatgttgagtacctctttgaaaagagtggtcttttgggtctcatgaccaaccctcactcagcctacaaaacagaggcgcttcagtttcttgcttcgctggaagtagagttgtttcagggtctatctagccatgaagcaagagaagaagggcttgggtatatcacattcgcagtctatgaaaaagactatgttttcgctatcaaaactcttgaggatatgttcggattctctagagggactatgttaaacccaaggtcaagaaagaggaccttttggatctttgggtaacaataggtgatgacgcacaattctcgtccgcaaaggccaagagcaacacaatccgaaacccctgcattcggtacttccagaaagcaatggctaacgtcctctacgcaagggagaagaccggaccgactaacaatggcgagatagagctgctagatattgccctaaaggatatcttagtctacactaagaacaaagtgcctatgaagggtgacacaaacgatgcttcaccatcaatgcgtttattgaatcatctttgtggtttcaggaaatgagcactagcgaataagtacaagagaaccatttctataggagggacgataacacctatactaatggcttgtggagtgccacttcagtcgactccctttgcccctagatggatcgacattcctcacctgagatgggctttgtttactgagcatgagagtcatgaggggatgcagtctaactgttgcgcataagaatagtggttcgatgagtgcttggaataagtttcaagacaagatgttggaaaaatgtggcaaggccataaccgcaattaaggctgtactgagctgttcatcctcaggcgccaccatggtgagagaaaaccgccctgaagaagtggtttcaagaaggcacataatttcaccatcaaggcaatctgcctatgagcaacgagaggtaagtcgcccccaagctcctgcaagacattcatctcatgagcaccgcgagcagaaaagaaggagaaaaacaagaatggttcagccaaggagcaaggaccttcttatgtccaatagaagatcactcgaccaagatactcgacgtgatatcgagcagagtgtcgagcaggatccgtgggttcagaaagagtagagtgtcaaggaaaatcagtgggatcaagatgggcagtactcgggaatgaattgggatgcttatcacggcatcaacgagcaggaacctacctctgacaactgaggtaacaccacctcaaccattgtatataccatagcatctttttatttttatttgtgtattttgtgctttggtcttgaattctctttcagatttttattacacaagggactgggttcaagacatgtttaacattgtgttctcttttcttatttcaaattttgcatcatctaaggcatagaaaaaaccataaaaatttgaaaaaatttcagaaaatgatttcatcaaaaacagagtgtcatgtagattgcatttcattttaggattgtatatagtgtgcttgcatttaggattgctcatttgcataggggataattatgatatcaaaccgataagcatgtttcgattcaatgaagtaagttcaatgccgaggttgttagttctctgttgcataaccgattgtatctctgaagtaaggctgcaccatgctttgaatttgtaacttgactatactactttgattcgaaactcgcttatctgatgccattccctatgtattagaacctgaactgaatttgcaattatcatgtctatgcattgtttgtgaactcatggctaccatatacatacttggattatcttattcacttcaccaccctctgttaatccaagtagctgtctctcatttttagagcagtttcttatacccttagtcaagccttattttaagcgaaagatcatttgtgtgtgattgtgaggtctttttcgatcgagcttggtataacgtgttaggtatgagccaacaagagtagtctttcatgtagacctagcccacgctttttgggttagctaggactaggtggagacttgtatttgggagtgggaatgtgtatggaatgaatgtgaatgagaatgagaatgaaaagaaatgaaagagagtaagagtttagagttctaagggggatacaaaagtgttaagtgtagtaaagggtttggaattcaaagaagttaggcattgtgattcaaagaaaaggggaaaacgccctatgtgataagattagaaggaaagccttaagtttgtcaaagtataaaatcaaacccgctagacttttaaaccgtttcaaagagaaccccttagaacttgaaccaaaaagagagaaagaatgagaaaaagggtagagttaggaaatctatgggactgagatcatcttctgagctatcatacaatatcattgggtagatgggagtctgttcttgtatgtgtccattggcttttacctttagcattctactgaagctcaatcttttctctgagagtcccctgttactcgaccaaaccattaaagagatttgtctcttagcctaagcccgaaaccaagtgagttcataaccattgcattgcttgatccactgttcgtgcttaatgaatgttaaagggaattggttgatgagaatgcttgaatagattaaggcaagttgttaggttgcattgtgacgagtatgactaaagtttttaagtaagggtctatcatcttgcaacctagaattagctacctggacattgagcttacccgttttatatgcatgcttcgggttttgaatccccaccttcaaacctctccttcatcttaagattttttgtttgcttgagggcaagcaagagataagtttgggggagttgataacactataatttactcattttaggtgtatgtttatcatcatttagatgtgcatttgctcattgtatcatatcattttgcaccattttagcttattttgcatacttaggcatgtaggatcatcttgcatacgcattgcatgttttggtgtgttttcaggtgcagaaggagctaaaaaggactctacttggtccattcactcgatccaggcagctacagaagaggcatcatttcactcgacctccttactcgatccaggcagctacagaggaggctgcggtttactcgaccctcttactcgatcaaggcagccttagatgaagcagcagattgatctactcgcccctcctactcgatcctctactagacccatttactcgaccaagggtgactaactctacaagacttgttgagctatcaaagcgtcttcggatcctcctcattccccactcaaccagacatctgagcgtacggataggagaggaagaagcatctactcgaccaattgatcactcggagcatagacacaaagcgcagactttacagcaccctctttactcgatccccaagatcgagtattcgcccaaaccgcctcaagtctcttgtcttctagtgaatctagggtttcaacatttcactataaatagatcactttgggatttatccaaaggatatagcttttatccttttagtttttctttgtgtttatgaatcttcaaaacttaattactcttaatctattttgtttttgcatttagttgttttagtaaagttgtttagcttgtttagatctacattttggtatgatttcagtaatttctgggtttgtgttcttgagaatgttgcttgagtagtgattagggttcttgaggatggattagattagggtaatctctaggttagttaggtggttaagattaggttagaacccttctggattcgcttggcccctatgcggttttcgctggctaatgtagagattcgatcatagacgtccagcgtccaaaagacgttcaaatggatgtttgatctacgaattccagagatttgtagactcgaccaagacattggcttgtctgcttattggctttggtagattgtttcttaaaccctgctctgctatgcttcatcaacgatagttgagattagaaagtggtagagttatgggggtctctgtcacgacagtcgattgacacggtttttgaatctatcgtcaagggtatccacctttcacctattagccatctgatgaaccctagagttgcccttatcaatgaatccatccttagaacttctactagatttatttgtaccccttgttgattgctcttttatttacgtgttatttgtatcccctattagtatcccctattagtatcccctgttgattgcatttaggttctgcctgttggttctactcgacccaatgatcgagtagggcttttaagttttcatttttacttgtttgaatcctgacctaggattgttactagaaacccaccatcattataatccgacttgacttagttgtttgtgtacatgtcttgattgctagcgataacagtgcactggattgacaccccctatagctgcatcgacatgttagtgtttgtaggagaattgaactgaacctcacactcttcagcatataagtaagcctgaaaaacctgtttatcactctcaaaccatctttcaaggcattctgcatcaaacacatgaccgcatggcaattccaaaagaatttgttcattaacaaactcttcttgacaaataacacacactgtgttgttttcttctatgttactttagtttgtcgtgaagataatccgttgcaaaaaattaattgcatcttgagtagcaggccttggtatgagattccatgaatcaaaagaattttgaatttgcttgttgctcccaaatgtcatcgttgaatgtgatgtccctttgaaattgtactgtgaatgtaagtgttaaaattcttgaaggtgagtagttgggtgaagaagtaatttcatgtgcaataagaataagattccttaaaatagtatttgcttctacaaattagaagccttcatcggtcatcgagttcaaaaaatcttctttgtcgatggataaatcttccgaaacgaaaccattggcaatgaaataaaatgacttgaattctgctagtgctcctatagtagagtataattttgcgattacaataattgaactggcacatgattctcctaaaggttcgtcaacactgatggcatatgaaatagtggtgccgtcaaccattttgcaaaatatctttgatattcacactctgtaaatttttttttaaaattatttattagtgaaaacaaaagtattttactgaatatacataaaatagataataattacctatctattaatgcactttatatgatttctatatgcaactcaggattcaaagtttcatacattccatacggtacggtacaaaagaacgtttgtgttatgagatattacaaaaacaagtgatggaaataaaaacaattctcaatggctaacgatgatgctacatgattcgactttcctttattaaacttgtattttatgattatttagcttgtatagataaatacattgatctccattatgacatcttatgttattatataaaaaggacaaggacacctctttaaaaggattatttttattgattttgaccaattctatttgtttaaactaaatgaaactaaaaaacaaaacgtgaaaagagaatttgatattcaactctagtatttctttaaacccaaataatgattacttagtgtagtaaggaaaagaaacagtaaagatatctaacctttgaagataagaacctttgtgattaatttcagacttgattgcttttctcttatatcaagcttggcatttggcacacaaattatcactctcctgtaagctaaacactccttccaccgatgttgcaataaactatcaaaaattaactttgtttttggtttcttctcaatagatgaagaaattatataggaactaagagttgtgagtgttaacaataaatatttgtgttgtttattaataataaaatattaaatttggataaaaatcgtagaggttttaagtgaacaaacatatcttttcaaaactttgtaagcattagtcatgttttttagttttatttaaatttaattattttcattaaattaataaaagtaaaaataaattaatttttacctgtttgtgaattttgtaaattaatatatgtaattagtgggctattacacatcatattagttatataagaatttgtattttatttcttaactgtaatatatcatgttattaaaatgagttttttttcttttaatcgtaaatatggttaaaggatgttctaactgtatataaattttgaacatcaggttaaatttatttattttaccaaaatcatctactttaattttcacagaaatttgatttgattattttttatttttttatttttggtaagtttggaattagaataaaatattatttttatgttgatagtcttaaaataataatattattgatcattgcatatggagtgtggtgattattcaaattgaaacattccgatgaagctaatcttgagtatgtgtctattatcggataatgtaaccaaaccatatggatggtaatagtttttgcttgcgaaaatccagcattcatgagttgttttattagaacttaactatttatttatatcaaacaatcaacaattatacacctttggaggaacaaagcattcattataaaatcctaaatcaacacaaacatcttaagcaatattacacttagtaataattatatcaagattaaaaacaaatcaagttttttgaatcttctggagtcaaaattgcagttaggttgagatggtttgataagtagatcttcatggtgatagtggatgcagccccccatgcattgctgtttctttttggttaactgaatcagagctatgtgattcacaacaatacttcttatttatcggatacaggcacatctgattatctttgaagtgaaggggattttgaaacattagatcccttttttctctctttcttttgttgaaacctgaagtttctccgatgataccataatcatacatttcgtctatcaattcatcctctataataatgcctttcgcactttccatcctcacgaaatgattctccttctcaaggccttccctataattaaaacctgctgacatatccgaataaacacaatcaaaccggtcttcgttgttgtcagcaatcctagatgtcatcccttcagtttcaacgttatgccagttcttaattcctggatcatatactacaacaccctctttgtccttgttaggattcatcttctcaacattagtagaaacaaaatccttttcttgtttcatataattaacgatcaagttaaaaaaatccccgtccttaaattttcctttcgctaattttgcctgcaaatatcgccatgtttcagcattcatatctctatcttcaaacaacaaaggactcacttcacccacaacaacgggattgtttgatggccctgcagcaaacgtaaaattgtttgcattgtgctcattattttctctaaaaccaaacatgtattgtgggtcattatcactatcgttcacttgaggagaagctttatcattcccatcatcataacccaaagggcaatcttttttctttatgagtcagcataccacaattaacacagaattattttaatcttttatagcgtaaactcagcactaactgttcatcattaccgaagtggaatctgtgctgaaaacgtaaaggattatcaacattccaatttactttcaccctgacaaaattcacacggtttgctgcttcatcaaaatcaacagctgccacatcccaatgtttatctccaatgtacttgatcattgggcgtgttagatattgaatgggaattcctcgaatttgaatccaaaaagcaattatcttcagcgctttgttgacatatttggagtccatctttgaacaagcaacatccaatcagtgaaagaccacagtcatctcttaaggacatgactcatcgtttcttcactctgaaatagaaattgaaacttctctgaatcaacaattcggccaaccatgttgtctcctacatcccatataattggcaattgctcgattaaatcatgtagattctattttttggatttagtacgacaccaacaatcgagaaacggtttgcatgcttggaagcacgctgaataagggaaagcagttaggacgtcactcataccaagaatgatgtcctgcatcatttttcagatatcaacttttggtttagataggaaatgggggaagaagagaagaaatgtcagcgagagagcttgatgatattgagaaaccctatcctttttttattcttttttttcttgcatagagaataatgttcttcccctttttcctctttattttatttttaacacatttctgacattccttctctcttgtatgtaggttaacaagatttctcctttgttccctcgggttagtgacaagatttctcctttctcccccgtgtcgtagataagctcatattttatcttatgaaatgaaatgcttcttttcttctcctttctgcatttcatcccttcctaaatgttctacacactgggtctgtcacacactttattgactttgcatctctaaaccatgaagtgaaaattgttttgctagcaggttgtttaaataggaaatgttaagtcaggtcggttgatatgttaatataaaactaggatatgacccgcggtattgtaacgcccgtgaaccggaaaatcggttagggtttgtttttaaattatccggtttaattggttggattaattagaaaccctaaagtgtgcctataaaagaaggaaactcgaaattagtgctttagttagccacttttcgttttataaaagagaaaaagagagaaaaggagaaggagcagaaatcgttagggtttgggagaaatcagtttcgtcatatcaaatcgtggtaaaaggtaacgatatttggtagagttattcccaagtcctttatcgttattctccagtttacagaattgaatttggattaaaattggttgagttatttgcagtttcgtgagacacgttttctcagacgcgaattaggaccagcaaagattgaaactgagatcgtggtctcgtctgttttccgatcggcacgagattttgtgggcagctttgtgacgtctgcagataggatttcaccggagagattgaatagttaacggttagcttgtattttagggtttcgtctttgagacggtttgtttctggtttttcctgtccagtttgcttcaaggttgcttttggttgtggatttgttgcaggccgtttctggactgtttcagacgcaaggagagtctctcctgggtttaattactattagaatcaatttgttaaggtgagtgcgtgactatgagcttatctgagcgattgggttgtgtgatgatatgtaggtgtggtgaatgtgttttgggtgaattgttcaatgactggtttgtttgtattgtattcgtgattatacctttttatttgcttgtgtgtatagctcgtagatgggaggatcgcctcactaagtatttatgataatacttacgcatctcattgtgttgttgatgcaggtaaagataaagtgtgattgtggaatcatggcaaggaagagaggatgatctaggaactcgtttgttttatgtttggtgtttttgtttattggaacccggttaggattgtcagttattcttggttttgttgatcgaattatttatttattcataaaatagtatttctgacttgcggtttaattattatgttattggttggtttaattagatatttatgggaatatttaattatatatatttttcttaaaaatgggtcgggttgtttcaatttggtatcagagcgattacggttctaggatgtgtagaaaaattaattgatgaattattttcctgttgattgatgtgggatgagctagggtgttagcatattgaggattgattatggagtgtttagtcaattgtgtgttgttggagtcctagcatcatcttctccgagccttaaatgagattccacggtaagttgtttgtgatatattcgtttgttttagtttcttagccatttgttcttgagtagcctagatggttagaggagctggagttcgtggtcgtggtcgtggtcgtggtcgtggtcgcggtaggcgacgagtcctcgagggtaccggcgagaataatggccacagtgccacagttgagcagagtgtgggttcgcaacctgagtttgtggagcccggggttaggaacggtcttggtgccgatatagctggtgcagccggagtgggggctggtggagctggtgtcggtaccggtgtgcatgccgttggtgctgagggtccaggagtgatgggtgccgcagccggaggagcccaggttccagaggttggtttggcgggcctgttgaggcagttgttggagcggttaccaggtgtggtaccagtggaggctccagttgcgccacgagtggcagaggtgcagcagcgggctgcggttgctgaggaggttccatcttatttgaggatgatggagcagttgcagaggattggcaccgggtatttttctggtggtactagtcctgaggaggccgacagttggaggtcgcgggttgagcggaacttcggttcgagcagatgcccggcggagtatcgggtagatctagcagtgcattttctagagggggatgcacatttgtggtggcggagtgtgactgccaggaggaggcaggcggtaagtcttgggcagatttcgtggctgagtttaatgccaagtactttccgtaggaggcgctcgaccgtatggaggcgcgttttcttgagctgacacagggtgagcggtcggttcgggagtatgaccgggagtttaaccgactcttggtgtatgcgggtcggggcatggaggatgaccaggcccagatgaggaggttcttgaggggatttcgacaagatttgagggtgcggtgtagagtatcgcagtacgccacgaaggcggcactagtggagacggctgctgaggtagaggaggaccttcagaggcaggaggtgggagtgagcccagcggtacaaccgaagaagactcagtagcaggtggcacctagcaagggcagctagcctgcgcaggggcagaagaggaagtgggatcatccttccagagctggacagggtggtcgtgcaggatgtttttcttgtgggagccttgaccacaaggtggcggattgcacgcagcgagctgagacgagggagtgctaccactgcagggagaggggacatctcaggccgaattgtcctaagttgcagcggatggcagtggcagtggtacaaccggcattgcagcatggagcgcaggtgcagcaggtgcagcagggagtgcagcagttggcacatattacactacgcgtgagataggcggtaccagcaacatagcgattactggtatgatttctgagactcagactttgtgaattatttctgttgttttggatatcattgttttgtgatgaatgttagggttcttagcacatgaggtttgtgtagggaccttattagtgggcggtgtagaggccaatgtgttgtttgactctggagcatcgcattgcttcattaccccggagagtgcctcgcgcggcaacatctgtggggatcctggtgagcagcttggagccgtcaaggttgctggagggcagtttctagcggttctggggagagcgaagggtgtggatattcagattgcaggggagtcaatgccagcagatttgattatcagccctgtagagttgtatgatgttattctgggaatggattggttggatcattatagagtacatcttgactgccaccgtgggagagtttcttttgagcggccagagggaaggttggtttatcagggagtgagacctacctcagggagtctcgtcatctcagcagtgcaggcagagaaaatgatcgagactggatgcgaggcttacctggtgacgatatctatgccggagtctgtggggcaggtagcagtgagcgacattcgggttattcaggagttcgaggatgtgtttcaatcgttgcagggattaccaccatcacggtctgatcctttcacgattgagttggaaccagggacagcgccgttgtctaaggcaccctacaggatggctccagcagagatggcagagctatagaagcagctagaggatttgttgggtaagggattcattcgtcctagtacttcaccttggggagcgccggtgttatttgtgaagaagaaggacgggagtttccgcttatgtattgactaccggaggttgaaccggatcactgtgaagaacaagtaccctttgccagggatcaatgagttgttggaccagttgaggggtgctacttgtttctccaaaatcgatttgacgtcgggttatcaccagatcccgatagcggaggcagatgttcgcaagactgctttcaggatgagatatggacattttgagttcgtggtgatgcctttcgggttgactaatgcacctgcagcgttcatgaggttgatgaacagcgtgttccaggagtttttggatgagtttgtgatcatctttattgatgacattctggtgtattctaagagtcctgaggagcatgaggtacatctgaggagagtgatggagaagctacgggagcagaagttgttcgctaagttgagtaagtgtagtttctggcagagagagatgggtttttgggtcacattgtttctgtagagggagtttcagtggatccagagaagattgaggctatcagagattggcctagaccgacgaatgccactgagatcaggagttttcttgggttggcagggtattacaggaggttcgtcaaggggtttgcgagtatggcacaaccgatgagtaagctgacagggaaggatgttccttttgtgtggtcaccggagtgcgaggagggtttcgtgagcctgaaggagatgttgacgagtacaccagtgttagcattgccagtgcatggagagccttacatggtgtatactgatgcctcgggagttggtttgggttgtgttctaatgcagcgtgggaaggttattgcctatgcatcacggcagttgaggaagcatgagggcaactatcctactcacgatttggagatggctgcagtaatctttgccttgaaaatttggaggtcttatctttatggcgggaaagtgcaggtgctcacggatcataagagtttgaagtatatcttcactcagccagagctgaacctgaggcagaggcgatggatggagttggtggctgattatgatctggagatagcttaccatcctggtaaggctaatgcggttgcaaacgcgttgagccgtaagcgcgtgggcgcggctctagggcagagtgttgaggccttggtgagtgagattggtgctttgcgatgtgtgctgtggcacgagagccattgggattggaagctgtggatcgagcagatcttctgactagagttcggttggctcaggagaaggatgaggggttgattgcggcttctaaggtagagggctctgagtatcagtttgcagctaatgggactatccttgtgcatgggcgagtttgtgtgcgtaaggatgaggagttgcgacgggagatcatgagtgaggcacatgcgagcatgttttccattcatccaggagcgactaagatgtaccgagacctcaagcggtactatcagtgggtcgggatgaagagggatgtagctaattaggttgcagagtgcgatgtttgccagttagttaaggctgagcatcaggtgccaggtggcatgttgcagagtttactcattcctgagtggaagtgggattttatcacgatggattttgtggttgggttgcctgtgtcgcgaaccaaagatgctatttgggtgatcgtgaaccgtctgactaagtcagcacattttctggccatcagaaaaaccgatggagcgacggtgttggctaagaaatatgtgagcgagattgtgaagttgcatggagtacctgtgagtattgtgtcagacagggattccaagtttacttctgcattttggagagcctttcagacagagatgggtactaaggtgcagatgagcacggcttatcatccatagacagatgggcaatctgagaggactattcagacgcttgaggatttgttgcggatgtgtgtcttggaatggggaggtcattgggcggatcacttgagtctggtagagtttgcttataacaatagctatcaggcgagtattgggatggctccttttgaagcgttgtacgggaggccatgcaggacacagttatgctggacccgagtgggggagaggagcatatatggtgcagattatgttcaggagaccacggagaggatccgggttcttaagctgaacatgaaggaagctcaggatcgacagcggagttatgctgacaagaggaggagagagcttgagtttgaggttggggacagagtgtatcttaagatggccatgttgcgaagtccgaacaggtctatctcaaagactaagttgagtccgaggtacatgggtccgttcaggattgttaagagggtgggaccagtggcatacaggttagagttgcctgatgttatgcgtgcgtttcacaaggtctttcatgtgtcgatgttgaggaagtgtcttcacaaggatgatgaggtgttggctaagattccagaggatcttcagcccaacatgactttggaggcgagaccagtgagggttctcgagaggaggatcaaggaacttcggcggaagaagattcctttgatcaaagtcctgtgggactgcgatggtgtgatagaggagacttgggagccagaggcgaggatgaaggcaaggttcaagaagtggttcgagaagcaagttgctgcatgagtttgcctttccttggtttccagtttcagtgttgttgagtttttgagcttttgagttgttgttcttatttctctttcatttgtattttcgtttggagttgtaacgatcatgacagttgatgattaataagatgagtattttttttcttggatttgacttgagttgtcttatttaagaatgtgttgtgcggtttccaaaaatgggaagtttcctagaaaggacttgtctatttttggaaagtttgagtaaacaacctaagagaaaggtgtgtttacgagatggccgggagttggtcataaggatgttctcgaggggatatgatggatggtgaggcatagaggtgtcttacgcgaatccatgagagagtctggagatatgctcggaagcgtttagtattgttgctcgagggacatgagggtcccaacgactcgtgaggagcgggtatgctcctgaggtaccggtaactggagggacatggtgtctttagaggacgaggggtacggtggcttcgggtgacgatccgagagcacgctttagggtgacgacccgggagtgagttttgtggtattattttctccaagtgtcgtaattcgatgactttgtggctgagagtgagccgacacaactcagggtttgagtttgagtggggaagataatatgtgtgatacccgagataccgtaggccgaggcctgagagtgacggtttatgctcgaagattgcggtctaagagtggagagtgagttgtgagcaacaatgactagtaaatcgtgagtatatcgactggatagagagacctagagggggtctggttggagggagtgcggactgtagtgatggttgcacggagttcctcagagtggaagggtgaagctagattcgaggacgaatctatgttagtgggggagaattgtaacgcccgtgaacaggaaaatcggttagggtttgtttttaaatcatccggtttaattggttgggttaattggaaaccctaaagtgtgcctataaaagaaggaaactcgaacttagggttttagttagccacttttcgttttataaaggagaaaaagagagaaaaggagaaggagcagaatcgttagggtttgggagtaatcagtttcgtcatatcaaatcgtggtaaaaggtaacgaaatttggtagagttattcccaagtcctttatcgttattctccagtttacagaattgaatttggattaaaattggttgagttattcgcagtttcctgagacacgttttctcagacgcgaattaggaccagcgaagattgaaactgagatcgtggtctcgtctgttttccgatcggcacgagattttgtgggcagctttgtgacgtctgcagctaggatttcaccggagcgattgaatagttaacggttagctctgctaatataactttatcaatgtgctctgctttggtcaacttacactttgaattcagccaaattagtctatgagcatgaggcagtcatcttttttgaaactttatagtatacatagctgcaattataatgaaaacataataattattatagttatcaaaaataatattagaaataatataagagtaaatgaaacgcattaaaaacttcttacatgtacttgtcttccctaatagttttttttttagttaaatcaagcatcagataatcaagtttcattttgaaaatcttgcatataatctcgggtctatcatcagcactcaagttttgctcaccacaaaacctaatcagctctggccactttgaattgcacgtgaatatgataaaataatctggaaacccaaaatgtttacacaatgccatcccatccaaatacatgttcctcatatatgtaggaccacctgtaaaagtagctggcaaataacatgctaatccttgatctttcaaatcactatttccttcctctgaagccttttgcaaagaattgtaattatctgccctcaaactactatggttaagtttgatgtaactaaaccggttagattctattgctgtataagaatccaccaagaattactgccatagccttctcgacctaagtaaaatatgcttctcatattttctttcgtgaattttgaaggcaaatcattgccttatagatatgcacttgttcttcgtttttttaccagaccctgtttgatgtttctcaatgtctgtactgaatccatcttcaccataagggaacaaaagagaatattgtaaaggaagataacatggaagaatttcactaattctttgtagtttccctgatttctctagcactattatatctctgcttggcatatctatagtgaaatctcctggaatcaacatggctacctctgatgcctttggtacattatacacactgccatccttttcccgtttactaactattctcatatgcaaagtcactagcaatccgtaagtgtcatacataagggttgatactatttagcaatttgatcacaacatcaataatttcctttctcaactctttctttttatacttgtcagcattaacaccattactattaagaatcaaataagtcaaatttagaacagtaacaaatattaaaacaacataaatgttatatacaaaaatattagtaacactataaagaatggactcacctgaaggcttccgatctgttatcaacttcattctctttgactacaatatataactatataactgcatgaactttggaggtatatcattgtctggtttcaaactccctatcctatggtaattctctccgcgaatctggaacatttgaggaccaccactggctctaacactattttttgtatcaccaccaagtgatgtaaaagaaaatatcatattgtaagccctgatattttctctgaaatgtctactgatttcatcgtcattggttagcaatgtataaagtaattctggtgaatttttaagaaaaggtaacttcacttgaccttgcaaacaacatgatgtaaacttgggcttcttattcttgactgtctttttaatacgctcaccatgccacattatatctctacaatattcacatgagtaaataggatcaccatgatcaatgtatactgcatttaaaatcataaaatgttaaatatagaggatacacagagtactaatatataatcatacatgttttgttttttcttgaatgcatattaaattgacgctcaaaactgtttattataggatcaccattgattgaacatttaaaaaagtttattataattcatttacaaagtttattgaatataacacaccgtaagaatgtttctctatattttcattagaggtacgacatctcaggccaaaagtggcaagcaaactcttcttaagatcatccaaaaacttataattttgtttttaaccagttcagtaaccttgacaccttttgtttgtagttggtatatgaatcataatcaacttcatcttgaaaaccattttcaagatcatcatatatatcatactctgaacctaaaaataagaaaagttcattatacatcccatactatagtttattttaacagtgaagaataaggaaatcattatagttatgcttaatatttaccatctgtttttccattactgtcacattctcctaaattcatttgatttcctgattgcagaaattcaagaagaatgggatcatcggttcagtctcctcgtccacaatgtgtgacatcatttatctaaagtggaatgtcattggtaaattttctaaacaatcttttatctttagacgggtttgatgtctcacctccaaattagttgttgtgaatgaagaacttaggttggaatttggtctatgatttcctgaatataacaaaacgttagatagtattaactaacatcagactcaccaagttgtaaaccatgacttaccaaacggatactgagaatcatttgcatgtgaaggtagataatcatcatatgttaattgccttcgatatgattgaataggacttcaaaaatcgattcctgctggcattgttaatatttataaataaatcttgttaaatgtagttatgttatataggacaacctacaaagcttaaatatatattatagattaatcattaaacttaacttgtttttgatgttaaacatgactcctaagtgccaggcgtttggctaatgcttggtgtatgaactctttgatttgtaatatcacttagaaccctcttaaaaacagaactaactggcagtgatttcttcacacttggtcgattgaatgatgggggtgtattttcagaagtttcttcatgtctaaaccacttatcaattgggttttgaataacattagacaaatctgaagattgagtttcaagatttttttttctttttgacatggagaacaaagaacagataccagtgaaaacgtgatagctaaacactcgaaaccttatgagaaatgacttttctataatatgttaacctagttatgtgttattttctttgttctccagccagaaaagattgacagaatatttgctgttatgttatttaactaaactgattaagatatcaactatttatatggaaacagtttataaactttgttattttgttttcttaaagaaaattttatgtaaatttgctaatctatgaagatccttttttcctttttaacagaggtcgagcactaaaggaaatattagttcttgggagagtctttcttggtatgaattctctcaagtgtataagctatgactacttatttgaaggtaaattcttgtttttttaataagaactaagttattaacgtttcgcttgaaacttttgattttcacatagattaagattcataaaataaaacattcttaatcaattacaaaatagattagaatctatactattaagagagatagaaagaaacagaaagaacagagtttaacttaaaaaaataaaaaccaaacacacacttcagaatagctctagttctcctcaacgatctccatcattacatcgtcctaatcatcttcattcatgtattcgcggctgcatttcaaaatcatcttgggaattagttacgttaacaattaaagtttcaaaaaagccaaaatatagttacttacaggtaatttggaatatcagtttcatcgaatttaggatcgatgtatagctttgagaagccaaactcactgtggacaacattcttacctgtaaaatttaaaaaacatgttaacattataatgaagacataatctttagtattatttaaaagtcaaattcaaagtaatgaccatgataatttgtgattctccagttttggagaacatcgacaattggttcataattgtaagtaatcaaactgattctatttgaccagtggttcacaaaaccactcacacatctgtccaacagcaatacaccttatcttttttcccctagaaagaaaactcaatatcatcactaaccacatcattaatgattatcttctaagagtagaaatagactaaaatattgttccttaagaaaagacttatatattgtccgcaatcgtgaatttcacatatcttgcttgataatctgtcactctttgacgacagacaaatgggaatctcctaatgttagaaacccttgtaataatacccattgcatctgaaacaacaaatataatgtaagttaagagagtaaacatgacataaatttgaaaataagttataaaaaacagagtaccatatgatatcaaatagaaaataagagattacaagatagaaattccatatcttgcggtgcatcatttttaacatcaatcggagccacaaactcaaaaaatctacttgttgaaagatatatttttaaatatatctttttaagtgtaatcgccaagtttgttatttatacgaacttaatatattagagagtatattctaagaatatttttgttaagatatcatatattgttatggaaagagtatatacatattgatactatataggtaatttgaattttgtcttgtattggaggtttcaatgtattgtaatttttttttatgtaatagaacttgaattaaatttactaatttcttaacatatttttctctttttacagaagaagagctaaagagtggaactcttcatttccttctaaggttagatactaataactcttagattgtataagaaaatgctctgtaaatatgaactaagttataaccaaaataaaataaccggaaatttaatattttgacataaatttgaaactcaaactcttatgagtaacttgcaacatcaaataggagaactggaaactgaaaccataaaaaaaaaaaaaataacacaatgtatgataattcaaataaacattccaacaatagttcatcatataaaatcaaaatcaacttagaaataataagtttgatttttaataacgatgtaaattgcttctacaaatcattggaaagacgaatctgactcttggattagttctcaacaacatattcaatcttcccttcaacagacccatcatcttcacatgcaaaccaattgttgtaacaaaaaaaaaaaacatgtcattttgatttgaatagttagtatctaattaacaaaaccaatttatctaatgtctttcacatacatgtattgtgtaacatcaaaatctggaaaagattcctcaatgaagatctttgaacactcatgctcactgattaaggccttagatcctagaacatttataaaatattatggtgcttagttataggtcacaaggtttaacatcataaaggaatatgactaacatattcacgaattttctataacctttaaaattagaggctctcgagaaccggaggactgttgtgattggctcgtagttataagttaccaaaccaataagtcgataaaactttgttatgatcctatcactacaaccaaccaaaatacgaatttaccatactacaaatatgtgtatgttcctaacgaatttcaatatcaatatacatattacttgttaacttacagattatctctgatggtaaatgtcacatatttggcctcatagtctgtttccccttcacgatagccaatagcatctaacaataacaacaaagcaaacagatacttataaatcttagtactaaggaaatacaattgcaagaaagcataaactatatacaattaccagttacataatcctcagattcagattcgacttcattagcatggatgaattggagagaactttcatcagatctatcacttacaagccacatttttgtgtgccacagaaactcgttttcataattaaatgatgagtacttaggtattaaagttgctctcttcaattggaagtcagcaatgcaatatcactttccttcaaataggctaggcttgtaattgttcaaataatccccccaaggtactctagcgtcaattctggttccctgaataaaaagacaaacatataaaattctttgaactataataaaaaccaaaaaccaaaataggaaaccaaaaagattgtttacgcacaaacctgcacatcacagaggatcatggtagtaggagttccaaagatcatagacttattgtcccagatgcttaagattttcacgtataggacatgattgttcttgtgtaaacttaagtcacggatatagtttgtgtcagccaatggaagtttgaatgatttgatacaaattttagagagaggatagattgactgaagttaacctaatctttgtcttatatatatattgaatggagatgaaagttgaaatgattcagtgaatctaaaggtttccatataatataaccgttcaaatcctttagtcaatatataagtatttgctaaccgattctgtagccaatacaaaaaaaaatagaaaacaaatttgctaatgattgttgatatgttaagtagataatgatgataaagtatttggattcaatagacatataaataatgattgcttatgttttagatccgaaaggaattcttcagtatttaatctaaacaatttagtaaaaatactaacatcgttgtcttactataatttcaggaatttgaagtcggagaagatagcacactgaattaaggtaataggattcttcttttactctagtcattttagttatcatgggtggtaatccatttcatgctagaagttggtaaagataagcaaacataagcacaatactataaagtagtcacagaaaatccaacttataacagaagaaaataaacatagttcataaagcatagcacaattgttttctcataattcaaattgtaaatcgataacttagaaattggactccacactctccatgaaaatgtcatcatcttcataatctgatcctgcaaagttacgcctacaaaacagataccaaaaacaaacaaagttaatatctatatattctacatatggaataaacgatgcttaagaataaggatgtagattacagatagttgttcttgtcgattcctcggaaatttggatcaatgtgaacttttgaacaaccataaacacttatcaggcagggatttcctgttatacaatcacactattcagtaaattctaaatcttaaatggattgaacaaaatctgaataagaagtaataagaaaataaccttcaaactctgaaattttccaaaaacgcagaataatcatcacaggctccatcctaaaattaacatcacttattttcttataccattttcttttaaactcatcacaagaccttcctacagcgacacacttcatgtactgggacctaaaatatgaagtgaactaaataaataaaccaaaagatcacaggttcatactgaatgtattatagtttgaaaacttacacagtatctttaattgtaaaagttaggtatctggattcatagtcactttcccactccctcttcacccaaggtattttcccaattggtgagactgattcaatgactcccatagcatatgaaattgtataataaccaagtgttaagaatactttgttttgagtggttagccgatcaaagtacaaaacaaaaactaaaatactcaccaacaacaaatttcttttcaacaggagctgcatttttgatctgatagaaatcaaaacactcagtgaaatgacatcttacctcaggagcaacatgttccattgtagtctttcgtaaaaactaaatttggaacacatgagaagagaatctttcaagtgggttagctacaaccacttcaaagtttgagagtagataccattttccttctcttagtgtggaaatcatttcttctttgtatgcatgtagaggagacaatgcatcgattcgatgtccctgagatcatatataaaatctcatcaaatctgttatggatgtttatattcaagagatccggtaaataacaacaattatagaaataaaaactttcaatataagtttcataccttctcatcaactaaaatcatagtaggttcttccccgaagtaattaggaggccaattccacaacctcagtagcttaacaaagacaaaccattatgtttttttaggacgcaaatcagagaagttcttgaagtttgtcattgaagaaaaactctttttcttctctactattttttcttatgtggaagatgaatgagataagaagagaatctattaatctttccaataaacgtaacttcttattttttggaaataattatatcagaaatgaatttcaaatttttgccaatgaatgattacttttttgaatttagacagcttcttttgagggtttccagatccaatgatttggtttatttttgaaaattcagatttaacaattatatttctgatatatcacatcttacgtttcaaaaattatttaatataccatgcaagtatatttactctaaaattccaaagatcttttgatgttttcatctgtttcagtataatttagagaccgattctttgcttttcaataagaaaataaagttaggataaagagtataaatatatagtagaacaaagaaagtgaaaaccagaaataaaatctctcaaaaaaatagcaatacatgtaaatgtataaagcagcataaaaattgaaaatggttttaatacttattgaaaaagataaacaaagtcagaaggttcagacttttttttaaatccaaaaccataaaaaaaaaactgtgaaaacatataactaatttatttcttgtatctttttgtcttcactttggttgatcctttagcttttgaggtttggggctcaatctctttaactactctttttataagtacacttctagcatcatttgaaataactttaacctcatcagcattttctattatcacattggttccaatctcatcatctccattttctgagctaaccctagagcataacttcttagtagtactcgattgatcagccatattagacaacgctgtcgaaccacgcttagatgaaggagtagactgttcattgttcgtagcatctgaacagttctcgctgctattagttaacatcaattgaccctatacaataaaaattgagaaatattatttgatctatgagtacaaaacacttaataagcataacaacttgtatttaggtgaatatgatcatacctgttcctcagatggattatactgagtgtcttcaagcaaacctgattcttctttggctatgtctgttccaaaatgcatctttgtaaatatctttaccaccataaatattggctttctcaacactgaccagaaagtaaaatgtctttccacacaaatttgtgatgacatcaggtatgatcgtaggatcctcaatctatagactgtcttacattagtacttttcattctaccatagacatatagctaatacttgaatgacaacatatatttaatacctcttcatattgtccatccactaactctttagaagtttttccaataagtttggttgcattattttcaaacaccatgagtttaatttcagctgtctggtcatttacacaaatatgaagcttgtacgtggaataaaatgtattgtacatatcaaattaatatacacttataaacctttatattttctatatactaatagaaacaattttttttatcttgtacaagataaaagagtaacagaaaacattcttacatttcctccacatttgtgatgctctcctgacatttgtcatttgtcacaccagaacttaggtttcataggtatcctgaccatcttaccagtgctggttgattttttaaccagctcagttttctgttacatttaggacatccaaaatagaaccatccccaatcggtatcaaaggcaaaaatggaaccaagtattctccattgcccaacctaattttcaatacaatcacaattataggtacttaaactaaacacagtaatttatgaattagtggaaatatacttacgtctctcccttgaagtaaagcaacaattgttttggaaggataattaaaaaaattatctgatttaaccttaatgatgtcacggttcacataattatcttggatagtgagagcaagaccatcacttgggagtctgcaaataagcatttgtcaggttaacatgtttgtgaattaaaacagaacaaagaaggtcataatatattttgcacttacgatttcacgaagagttcaacctcaggaacatgaactggattgattatgacttccgaaacatcaaaagcacttgtaatactagtcgcacatagttaactgaattagacaatatatgttaactaagacatgcacatatacatccaatatgattactttagccatagttaagggaagagtgaatacctttaaaattattgattttagcactaaatactttacactttttaaagcaataaatactttctcagcaaacacaccccacaaagtacaagacaaacgctcattgcttcaatatagtaacaaacgatttcaatattacttatttgaaaatatagttattatgaatcaaaaattatataaaaacaaatgagaagacttgcacgagatctcttttgaaactctagttttttgttcggtttgtttttagccataatctcatccactttccccacactgaccacttgacctaatatgtctgccattgtaaagaatactctgttaatattaaaatccattacactttgttgtttgagttaagagaatgatagggaatttagaaatacataccaattagaacattctcatcataactctcggtcttaaccccaaacattatattaaacataattgttttctaaaatataatgttttgtgttattacagagttgttttatgttgtgacagataaatttatattaccataaatctgtcgtttgatgaaaggtttaataaagaataaaataaattgttggaatgaccttaaaaatattttatgttacgacagatttgtaattttaaatccttatggtgaccgatttatagtaatcaatttttcttgctctgcttttcaaatatttgcaatgagcacctctgtacataggataaatagataaggagagagtagatctccttgtcttaaacccctctttggaattattagtcctctaggttgtccattaaggaggaccctatactggacagttgtgatacaccacattatccacgatattcacttttcacagaaacccattttctttaataattcctcgataaaattccattcaaccctatcataagccttactcatatcaattttgatcgccatgaattttcttttacatgacggattagttcttaatccatgaaacatctcctgggcaataagaatattgtctgaaattaaacgtccttcaacaaaagcagattgtgtttccgaaataagacttggaagaatcttcttaagtctttgacaaaggatttttgaaatatttttgtacctgacattacaaagactaatgggtcttaattccgtcattcgattcggtcgtttcgtttttgggatcaagcatatattagtcgtatttaaccgtttatcaaaaactccatcttgtaaaaaagagttaaccagaaaaagcatatccatttttatggtagcccatgctttttgaaagaataacgttgtgataccatcaggccctggtgctttttccgggtgcaccaaaaacaaagccgctctcacctcatcttctgtagcaggtgccgttaggaagtcatttatttgatccgttattaaagttttaacctatgataaagattccgcaatatcctggggattcgacgtattaaacaaagtctcaaaataagacatcgctatatgttggatatctttatcctctgtagaccattttccattttcatcatgaagtcccgtgatctgattcctagcccgtctctgttttgttagagcatggaaatattttgagttattatccccaaccttcatccataaactcctacttttctagtaccaatattgttcttcatctatataggcctctttcaaccgtattgttaaatccgttatctcctcacttgttctcgaatcatctttctgtgccgcatctaactcagatttcaattcctcgattgtttttctcccgtaaggaggtaagtctttccgccatttggaaatagcccgtctacaactaattattttttcaataatattaccctctcctgaaccattatcaaggttccaaccattggaaatagcctctagtaaaccttctttaccaatccatctcttatcaaaccgaaagttgtgcttcccacgtggtatcttatccacaatagtagctatcactgatgtatgatctgaagctaacatcggtaaatattcaatgaacaagttgcagaataattcatgccaatcttcattagctaaagctctatccaaccgacaccttattggttttttatccctccatccccgccaagataaccaatccccgagatgaggaaattccaagagtccacaatcttctatcattaacttaaaaggtataaaagaagatgcatgtcttaatttaccacctcttttttcattgttttcttttaattcaataaaatcgcctatcaaaaaccaaggagtataccgcgatacaccaatccgcgttaaccgctcccaaacttgttctctgtttttttgaaccggatctccataaacaaagataagattaatggttttacctttgtaaatagcttcaatatcaattaaccgattgttttgaaaaataattgaaacattaaaatcattattataataaagagctaaaccaccattacaaccgataggatcaaccgttttcaaatttttataaccaaaatgaccaacaaatttttccatatataaagaagattgtttagtttccataagaaataaaaaattgggccgatgttgtttccacaaatcccgaagataaccgattgttgccttatttccgagcccttgacagttccaggttaaaactttcatttaccaccgtttggttttggtggtttgttcccacccatacctcccttgaccgtgccatggtgtgttgggacatttccttcatttacttgctctccactcgtgataccaaacgttttccgaggtgatgaaaaaagaagagcataacgcttttttgagctaatccccagaagtagcgcagttcctttccctttgcgagccgcctctgtatctccaatcttacccgtatcagtttcctgcatcgccatttgctctgcaccaacaccttcttgaagccttgtcgcatccattaatttttttgcaaacttttccacctcatcaaccggatcctcaggctgcagaggagaagagaccattgagtcatcttcgtccacctctttagttgacatgaacacttgttctccccgttcaagctcattagaaagcaccttgtccaaattttcctcacccgacacattactcaatggaatagaactctccatgttgtttactaccattgtagcttctgtaatttccccctcttcatggagaacttcctttgcagtttctacctcaattgacggcccatccgcatcaacacccatttgtgccaccattgactgatccgccgttgtaaatagcgcttttctaacctgttttggttgtgagacctccgtagacttgacttgtgtccctcctgattccttaacaaacaactcctcaaccacttgttgtttcctcttgcctccataaccacccacctttgagaaacgagagtcattgacttgggtataactagcaaattttcttggctgggaagaggatgcgccgttgtggttccgatcatccttacgggcctctgaaacagacttacactggaacccatttgcattctttccttcaaatgttgaaacctgcctagtgaccgcgcctctataactctgcagatggttcccgtctttcttctcttcaactagaacatggtgctcactgcccaaagccacattgaaaccacaatgttttcatcatgacatagactatgacacagcttataaaagccataaagcctttcatactgcaaaaaacattgtcgtctcttcaccattgctatattcgatctccgtttcgaagctcagtggtttgaaaccatcaaccgtgacccgaactcttccagcatcaacatcaaccgcttggactgatcccaaagctgctcctatctcccggaaggtttgatcagcccagaactcaattgggaccccaaggacccgaatccagaaagttaaatccgaggaataattcggattcaacgaaggtgaccatcgcaccaaagagaccatcgcacctgccaccttgccttcaatttgccaaatacgccgaagcatatacaacagcgtcttcatatcttgcacccgtggattcatacaacgcccaataagggtcttagaataccccgcaatcagatctgagttgtcaaaatgcgacaactttatcctcttttttggtaccattgaaacagccttttgttcaccaacatttttacccacccaagaactctgagacgttgtcaaaacccagcagcagagagaaaactcacaccaatgagaaaaacttgaaatgacaaaatccctgaagcgagaagataagagaaaagtctgtgagaagttgtgtttttgtaagcattccaagcttctccttttatacaaaacctcgacccagcaaatctcacacctcattaataccaaaaatcgtgtaatctccactagacttgatgcccacaccaaatcgtgaagataaagagactgatcttttgctgtaattaccggagaacataaggaaaccatatcaacctgaatggtgaagcatatcgcaatcataatctggaaaatccccctttgattccaaaaaaaacatcttcctaaattttgacacaagaaaacaatattgcgaaaactatcttgaagataagatttattttgaacccagaatcccaataaatcgccagatcgacatatcggtgaatcaccaatcacatcagaccaaatctaatctccgtaaaaccatttgagagaaaatctcatcttcctgtggacagactccatacaatgagagcgtaaagattcccatctcgttgaaatcctcataacttaccacaatcgaaaatccatccattagccttattccacccaaacgatagatctgggttcctttccataaaactgaccatagatccattccttcaatcctcaataaactgaaattcttctcacgtgataaccaccacaacaagaagataaacagctcaaatcctctctccccaataagggcccaccatagcaaaccatgaacaataccaaaatcaaccgatacagaccaacacatgggttgggttcaaaaccctagaaacgtctttagaatcgccgtcgagaggataatttttttttgtgttaggacagaattgttttatgttgtgacagataaatttatattaccataaatctgtcgtttgatgacaggtttaataaagaataaaataaattgttggaatgaccttaaaaatattttatgttatgccagatttgtaatttgaaatccttgtggtgaccgatttatagttttctttttccatgatttttttaattgaataatactaactattgtaacagtttttttatttagaaaataatattatgacagatttgattttttttttgtcaattgtttttagaaattcttttaaataccactaaaatgagtttttacaaaaaacaaatactataatgaattttatttttcaaaaataccacaaatctaaaactaaatttaatattcaaaactaatttctacatcttaaacactaaaccgtacacctaaaaactataccgtaaatatacattgtcaacccaaatatataaaaaattctataacttcaaaaatcaattatggttttgttttgcatatttttttgctataatattatttaaagtggtggcagttttttttcttgtaataacagatttattagagcagttgcgatatttaccactaaaacattaaatgtcaacatctagggttaattggtctttttacacaaattttgtgttagtctagttatccatcactaatgagagtcattttagttattattccccagttttgagtcaatctgggtaattttcagtatatttaatcaatagcattctctcatacattttcatcacatataattacatctaatgtttctcctgatgcatctttggtttgcctccacagatgaaggatcttgactcggacacgccaattcgttttgaaacgcttgacatcactaagctacgttaaacctaaaggtaaactcattgattatgtgataggctgcgaagaaaaataatactgacggaattcatgttattgcttaagtatttatacggttaaaacttggttctgaaatcctaaatcactaccggatttttttgatatatgaaatcataactaaatatactatctcaatagaatataagaatcatacctaattggttgtgacttgcagaatatcttcaagaactaagaatatcttggaaaggaggcaaaatattgagcaagaaatgttaacccgtgcggtaatgtttaacgcaatgggccaactgttctccttgacgccaaatgagaaatagaatagaggcccagtaaacgttaataagaggatccacgcgtcatttaaacgggtcggatagttaggcggctcgggtcggctgcgtagagcgcatataatgacgtttttaccctgatttttttttgtttgcttttttcatgtaacgtgtttttggaaaatggcttaaatggcttggaatatttctatccctcattctctcttaatagtatagattacgaagagcgtcttcatgtaatttgtactctcttattgtgagttctaatgataatgattgaaggcttatgtaatattttacaagagtcaataatcttatattccatatatcaagtattaatgaagacccttggattaattggccttgaccaataagaattatacctaaaatctacagagactatgtatgcatataacttactgaatgttttaacctattataaccttttgttttatctcttttaaagaaaaactcatttatgcctgataaaaataatgcatcagtattattactacgaacacattcctccaacaagttagaatacttagatagaagaattttactatatggaggcttgcagatactgcttaaattaagttcttctaaaacaaaagaatttttttgaccaatctacaactcaaaagttctttaattgaatgattgccaaccttgtgtaaaacttcaattatcatatcagctggaagatccattgtttttgaagttaataaaatgagtttgatttttttcttcattaatttataaacctgaagatgtatgccgaaatggtggaaagagtagatacgatgtttcaatcgtgtctgtcgagtaaaaatttgtgattgttcaaacgagaatatacattgaatatgtatatatttatatatacttaccacctatcgaataatatatacttacagaggaaattaaagagatttaaaaattgtgtaagaagatgacaacaaataaaaggttaagaaacagacaagtttgttgaatgtcatatctttatttattttcaactatattttaataacagttttaacaatacatatatttatatgataagcttgaacatctgcaaaattttattcaacaaactttagggaaatggttgtatatatgattaatgtgaagtaatgcaatttatttgcgttcattaagttgcgttaagatcttgaatttgacaataaattatgacaatataaagatatatatgaccatgtgatcaagaattctacaacaacaccctccttatactgatatcttttcatctgtatgatattcagttttatatcttttcatctatttggtcttattttttcgggttgtaatagattagtccattttactgaggtacaatatatatttaaaaataaaaaagaattactgagatagaacacaattgtatgtttattcctagaatagcatacatcttttttttattactcacatgtttttagtacttgtgtaattacagttaacacccttgattagttttaattacatattattttttaatttgtttgtaactaaaaattaaataaaaaaacactgattatacatgtcatcaatccatatcattaacataatccacatcattactcatctgaaaccgcataacgtttcggtttcccttcttttggcattttactattcatcaacggaaaaaaaaactgtcgctttctttctctctcaaaggaacgaactctttaccctaattccttcgccgttttctcttctctcgtctgttccggccgaaattcttacgccggagtcgcatttctggtatcgtgaagtcacatccctgtcgcagtcgcatttgaactgaacttctctaagttccgataagtatgtttcaaaactttatttcgaatttttcgacaagaatccgacatctaagtcaatcgcaaatgatgccagtcactgaaatcgttttccgatgcttaacaatggtttttaacgatgcttaaagatagtttttatcgccgccgtagattgacatatggtggccgatttgttagatctatttgatttgatggctgagttaacgtctgttttgccgactgatttatgatttatcaattcatctgtgtcaatgtttgttatatgttgtgattgagttatggtttaaccttacatcggtggctgagtttctgttacgatatggctgagtttttttatgttattgctgagtttctgtttgctatggctgagttttgtttatgttttgactgagattttgttatgttatggtttgactgagtttctgttacgatatggctgagttagatttatgttatggctgagttatgttatatgtggctgagattggtttatgttatgactgagttatgttatctatggttaagttaggtttatgttttgcctaagttatggtatttgtggctgagtttgttttatgttatggctgagttactgtatgcttacggttgatttatagtttatcagatgtctgaagaccaagcaagggattaccctccaagactttaccgagaggggcattctaatctggaggctaaagccattaataacaacataaagctgggaaatttccctggaattagagaataaataggacaaaatatatgggatgaactgaaagagacaccgcttggagtaattgctaagcttgttgatagtcattttgtatggtctggtaagactgtacattatctactatgcaaacagttgagaatactgaagaagaagctttggtgtctcgtggatggtcaactcatccggtttggattgaacgaatattgccatatcacggatttaaacacagatccactgcctacagaaaagtttgagcctgaagcggactacaaagcgttcttccgagaattgggtgtgccaaccggtgaaggtcctaagttagaagaacttaggcaaggcttagtaatgtgcaaagcatggcctcctgaaaatcgtagatgatttgggttattgattcttctagccattagactttatggcttgcatcctaactctaggataccatttgagagtgccaaaagagttgttgatgacgaagccatgaagacttatccgcactacaagaaaaaagggataataccacaataatatagttgcagtaattcatcaaaccgttgcagatcgtgagattacaacaaaattgagacacattttgcatttttgcattttggacattgcaaatttatagttattacacatatgttacaaaatttacaatgaactagctttttgctatatatgtcgtataaatgcaacatttttgttgtagttattttgtcgtacaattgtcacgtacgtttgcaacttaaattgttacaacctattgccacataaaatgtatagcaaatatcattgcaaatttacaatgtataagaaaatattgttgcaaatttgcagtaattatttttccacataaggttgttgcatatattttataacgataatcaaaacaaaaattgtagtaagtatgattactacaaattatctttgtcgtattattacgagaaatgtatagtcgcagttccattgtatatttgtaagattgcagttattttggtacattaatttttatcattgtattttacttttttgtttgttttgtttgacaaaatagttagtaaattacaattgtttaaataataatttttaagataaaaaatagattttgataagaaaacagtaaaagaaaaaacatattttattaaataatttaatattgaactattccagcaatgcagaaataaaaaaaatagttgaaaataaccaaaaagcataactaaaacaactaattgaatgcttagttgttgacaccattagaggatagatgagggaacattagctcgagcattttctccaacccttcaagcttggtgagcctctctttgattttaagattttcttgataaatctcttccaattgttgtttcaaagtctgctcattttccacgtgattttccaagatagctgaaactccacatttgagtgagaattcactaagaagagctcctagaccgaacacacgaccgtttgttgcctccacaatctgtagtatatagtaaaaatgtttgtaagccaacttataatatttgaaaatcagtctaaggtttaaggaaattattatgttacctttaaatacatttcattttttttacaagagttagctcctcatttagtggttttcatcttcaaggagatcagctacattcttctcaaatccctcactaatctgctttgccctctcatcaacaaatgatccatctatgtatgatgcattttccgtcttttctttctacaaaatataaacaaaacaataatagccagaatttattttattttttttttcttaagaaaaactagtttcacttactaaaagatcaccaactttggcatatgaacgtgaacgcgctcgatgcttatgaggtcccaaaccatttcggccagacatccggctcttagaagcttttttgcttctctccttagctttttctgttccccaatacttaacgaaaaattggtattgatcattaaggatctaatatggctgtttgcccctttcacgaacccggctaatcaaatcgattagcttagttgcagcacattttgtgaaacatgttttttacctctaattcaattgttggatgccaatcgaatttcctctacaagatatatcaaaatattaatataattttatgtatatagaaaataaagaggctctataatattgttacttatgctaactaaatgtatataaaacaaaaaaaataccaaataccattatcttaaatgtgttaaaccatctctctttcacaagtatcagtgttgttgaataattttgatatgcaccaagaaactcatatcgaattattgttcttatctgttcttatctcactggtgattacagaatcacgtttgaacctgcaaataaaattaaaataattacccaaatgatggtaaataaattttttaaaatatttatatttcttcttaccacaacgttccattgagtcttgatagattaagaatacctacaacacccagagcgactccttgaacttgaccttcattttccattggattcatttaaatgttttttttaattaaaaataacaaagtcggtactaaaaaccaaacgtatacgacttaacaataaaaactatattccaaattagatcctataacaaaattggttagtaaaaaactgtgtttaccttcagatatacagtagaacctctataaattaatactcgataaactaataaagtaataacttttttgaaaatcttaggtaaaatatagccccatcaatattataaattaataattctataatatatatatatttaagaaaatttagtgaaatatgactttattgttgtttgcttattcatgaacttgcattctttttggagctcacctataatcttccttactacattaaaaacttcttatttttacatatagaaaactttcaaaaatctgaaatcgcatctaatcgcatccaaaaacttatgaagtgaaattttgaaatcatagaattataacaaaacttcttatttttacatatagaaaactttcaaaaatctgaaaaccaaaaattctctttataaattaataaattattaatttatcgataaattaatacctctctaaattaataaaatatcctggtcctaacattattaatttatagaggttttactgcagtatgttgcttgctaacgtgttgtatgatagaagctcatccttaaactatatatataagttggaaaaataaaatcgtctatttgatattacaaaatattagtagatttggccaaatcttgatagtattatcgaaaacaatataacaagccggaagagagaggcgggaacattaatttctttttcccacatgaacactgttttcttgtagtgtccatggggtcgggtagcatttgaagcccttgtcgtttctataaagttgttaaagcctattggcaagacgtacaccattagtgcaggacggatttaacgtggaggaggagttccacaaagtggaggagcaggtaagtgaggcttacaaggagaagaatgaattcaaggtgattagtattgattgggataaactggggtatggatcgaccgagagttcaagttttgaatcagatgaagaatgaagatggcgattgatgtgattgtatcgtcataacaaaattacatctccatgttatttgtattttattttatgttattgaaattatttgtattttattttatgttattgaattgcaatactcctatgttatcaaagttaaatcttcaattttttttttctattcgcatgtgtgatttatatataatctgtctctctttcagattatagtagattaacttgatgtttggttgaattattcgtgtgtgatggctgagttattctaacgttaaggcggacttatcgtagattaaattgatgtttctttgagttattcgtgtgtgatggctgagttattctaacgttaaggcggacttatcgtagattaactaacgttaaggcaattttagcattgcaatcacactcgatcggaacacccttatcgcgcctcctgttttcgtcgtacctcattcttatccttatttccatacgatcgagctcctacattaacacaaacatgatatacaccacattagatggctaacgatttgtactattcagatggtcgagataaatacctcatttccttctgaaaccgttttctcatcaacactagagtcgccgtggaaaagagatctctacgctatcatcttatcgtcaattagtaggacactgaagcactaaatctatatagtcgtatattggtgaataaatttagaggtggctgagttattaaagctttgcggctgggttacaaacatattaatattctttattatatcattatcgagactacaaaaagtgttttatagggaaccgccaataatgattgggtccatattctcccgaacacgccaacagttagtattcaaaataattcaaacgagttcgaattgattcgaataactaaaccctcaaatattcaaattttcagtttgacggtggaataccaatacgtcacggctgagttatgacagaagattttgtggtttgaccgagttatgagaaaccaaatgttattatgagatttcaaagtagccatcaaattgttggctctattagtgtcaagatctataatatcaaaacataaaataaagacacaatgcactaagtgtcgattgacaaactatgttgaccaaacttctaagaatgatgttgatgggtatgatgttggataaagtatgatattggaaaaagtatatagaatatgagctagtttcatgattccactattgggaaattcattatgatatgttgattacttgattgtaccaaccgatggcttaaggaaaccactttaggggttggccgagttataacatagttatggctgagttttttctgcgtcacaattgagttatgtcagaagattttgatgttcgaccgagttatgagaaaaccaaatgcgatttataggcccatttgtatacaagaactattgttggttctattgatatcccttacgaatatagaatagaatattgcatttgtgtaggctgagtttatcgagaaacaattattatatcattatcgagattacaaaaactgtttttatggggaaccgccaataatgattgggtgcatattcacacgaacacgccaacagttaatatttaaaataattcaaacgagttcgaattgattcgaataactaaaccctcaaatattcaaatgttcagtttggcggtggaataccaatacgtcacagctgagttatgacagaagattttgtggtttgatcgagttatgagaaaccaaatgttattatgagatttcaaactagccaaaaaattgttggctctattagtgtcaagatctataatatcaaaacataaaataaagacacaatgcactaagtgtcgattgaccaactatgttgatcaaacttctaagaatgatgttgttgggtatgatgttggataaagtgtgatgttggataaagtatatagaatatgagctagtttcatgattccactagtttgaaattgattatgatatgtcaattacttgattgtaccaactgatggcttaaggaaagcacttttagggtttggccgagttataacagttatgtggcttagttatgcttacgtcacgactgagttatgtcaaaatacagagaaaaagtgtctctgttattgaccagatacgacgtcggttgtgaaagagtctttgttattgaccggatacgacatcgttgtgacataaaccaaatgaacacgtgcccacttataaatccccaaaatcaaaccctaagttagaaaattccaatttctgatttcagatctggagctgcattccttcttacttttcttctccgaattccccagctataactaaaaaatgagtagcaattccgagaactcgattgcgagtacgcaatccttgagccgttgggaacgtgggttatcatcaaagtgtcattgcggactagacgtggtcatctatacattgaagtcatcaaagaaccctagatgaccatacttctgttgtcctacgcttaaagatgtaagtataattgattttggattttattggtttcgttgttaattggtttgtgattgaaaatgcaggaccatttgtttaaatgggtcgaagatggtacatacgaagtggttgtagacagttggcctaaattgtccaccaggacaatgagataaacgcagccaagtgagatttgcagtcgagctagaagcgttacaggtgatggtgaaagaactgaaggaagaagtagtgaggagcgaaagggaaaaccagaaatgaaaattgatggtcaaattttgatgtcttggctttattatcattgtcattgtacttggtatcctaatgttcccaaaaaccaacgaacagaggcttcttcttggctactagtttgtttgatatttggatggtgtgtttgcttttggattccattatgtgtttgatgtttggatgatgtgttttgcttctagggttaattcgttttttgtttgtttaagtagtagcttgtaatgaaatggtactttgtgttcggccaagtaaatcgaatgttatggctgagttaatataatgttattgctgagttaagctaatattaaagctgagttaatccaacgctatgattgaattatattggtaatgttgtatctgagttaatccaacgctatgactgagttattataatattgtgtctgagttaatctattaatatgactgagttattataatgttgtgtctaagttaatcaattgatatggctgagttatgtttgagttacgcctgtatcatgataacatttaataagtgacggcaagcgataacaactgattactgagaaggcgaccgtagataataggagatataaaaccattacaaaaaaaaggagtaaaaaacattacgactgagttcataggaatgagataaagggaagacaagtaagagatacaaaagcattcaagacgtgaaaccgacatcatctggaccaaattcagtaaacatgtccaccaaatcattccaaacagttgtcgtcatccaccacggcttatctaaaccacacgcccatcctcgtttcagcgcccgcatattgtcccaatacaacgtaacagtggttctgtcaacccatgtacccaagctagggtttagaactaggagattcgcccaatcaggagtggtaagtacggcttcgacatctttgataaactgtccgtcaatgtgaggaacaaccatgtcgttcggaagagaggatgagacctgtaaatgatgagatgaagtaacatatagtaaaaaaaaaacaagtaaaggaatacaaaaggttccgtgtcttaccgtttggcgggaaaggtttctatgttacatttgagtttggcggcaaaatatattgttacggctgagttacactcaagacatgtaacaatgttacgactgagttgtcaagaattataaaataagacaggtaaaggaatacgaaaggttacgtgtcttaccgtttggcaggaaagttttctaggttacggctgtgtttggtggcaaattgtactgttacggctgagttaacccacattacggctgagttgtcaataaagcttgaagttccatttgatttactgactaaccgattaacggttatatccggcccaattaacaacgattcaatacgcctataaaaacggctgctcccataaactcccgaaggctaaactctcacaaacagaagatcacaatcaaaatatttatttacttttcaaagacgcggaatttcaccatggcgtattttgacggcatttgcgacttgtctcctttcataactggatggacgatttgtgttatggttcttagaacgtacaaaaggttttatagagataacgcatttgaactacgggttgtctttgtcgatgagtgggtaatggaattttcactcttcttacaagtcatacttaaccttattcgtatcttatttcctatatagctcaccctccaaatgttgttttcatagggaattcaaattgaagctataatcgaaagatatttttctcaatgttacttcgataagctcaaagagaatcaatggaaagaaatcgcaacttttcgtgtcattccaaacagtggaatagtccgagcaataacccactactacatgattgagttcatggaagcaacatcggtcataagttccgacccaaggggaactgcttttttaacagattcacacctactgactacattattgaagacaccgttcataccaatactttggtcggtaagtaatacgtttctaatgcatatttcatactttcacctttgacatgcctgtttttaacttttatttcatactcccagatttggttggtgcactcgtcgatatcggatgtatgagaaatacctcacacaatggtgtcgagattgacggattcagacttcccttcaagattatggacaaatagtaccatttctttcgatcaattccttttaaatttctttcttttcatcatgtatttttcctgagaggggtataattgtaacattgttttatctgtttcagcaaagagagattgaaatgtgaggctgttggctaaatggtggttgactttgatagcaggtttcgatcttttcgcaatgacaatattgttattgcactcacttggtagaggatcgttaggtatcatactggccccaaacacgtgaagattttaaattatccgaccatatcacttgtgactgtcgaacccaatatcgaagaagtgcaagagataaaaatgatcgtcgactaatgcaagatggaaggaatcgggtcatgctgcttcaagttaaatattgtttacttttaatttcctcctatgtatctttcaaacaaatatttatgggaatttcatattgcctttgccttcaaaatgttcattttcgagctatattataactcagccgtataatagaataacccagccgctaagtaacataattcagatagccgtaaacccacataactcagtcgtaaagtaacataatttagatataactcagccgttgaagtacccacataactcagtcgtaaagtaacataatttagatataactcaaaagtaaaaccacataactcagtcagtcgtaaaaccacataactcagccataacatgtaaaatgaccaaaccttttgacttccctatttaagtaattcagttgtaacatgtaaaataaccgaacctttcgacttccctatttaaataattcagccgtaacatataaaatgaccgaaccttttcacttccctatttaaataactcagccgtaacatgtaaaatgaccaaacattttgacttccatatttaaataactcgccgcaacatgtaaaatgaccgaatatttcgacttccatatttaaataactcatccgcaacatgtaaaatgacaagacattattgcaaataactcagccaggacgttaaagaaattgcaaatattacggtgcttagagtctaccatgtcatgaaatacatataacggttaccaaacaagggaaagaagacacatacaattcgtgcaaacaatactatgcacgacaagttttaacattgtgcccaacttctttacatcgagaacatgtgtgttccttcctagggcgtttattctcaacggcgacttctattgctgatttcatccttagtttcttgggcctgcctagctggttcacaacaatcggaggtaagcacgattggtcaattacaatttgaggaacatggacttcggtatctgaaggcatgattgcaccagcgtacgcattgaccaaataattgcccttatagtaagaactgcacagggatatacaagacacacacatatgctctgcagctgcgattgcatggatgcatggtactttctctttctcgaaaagacggcatgtgcatttttttgcatccacatttacaacatgcaaagatgttccataagttacttttacgcggaaagcatcaatcgtttgtacagccataagtcttgacgcggtgacacgggcctattagagagaagaaaaaaagaaaaaaagccaaatacgttatggctgagttattctcattatgtctggtttatcattatttgaggactgagttatgcactaataacagctgagttacctgtaccagtttctcaacaccacgtgtgagctgagtatgttgcgtgctcgcatcatctctccgttcagcaaaccatcttgtcatcatctgtcttatcgcttctaatattcgaactatgggaagttttctggcttttgacaatgctctgttcattgattccgctatattcgtagtcattaaactgtatctatcaccgggaaaatgaacacgcgcacacatttgaacaccctctctttggaggtatgcatgtaattgaggatcacgctcttgaatctcgttgaacgcgtcatcaaaatcagtccgcctataacaccttgccgcttttttcaccagagggaacatatgttttcctttgaattttaccaaaatgttcttatacaaatggtaagtgcaaattccacgagcagccaattcctttccctattgacttatgtctgtccgagattatcgccaggtccgttgcttcaggaataacaactttgagatgcgtaaaaaaccaacgccaagattcatcattttcagtgtcaactacaccgaaagctaacggaaaaatctgaaaattaccatcctgagctagggctgtcaagagtgtccctttgtaactaccatggagaaacgtaccgtcgacgacaacaactctgcgcatgtaatgaaacccagcgatactggcaccaaaaaaaatgaacatatagttgaatcttccactctaatcaatttgaagacgcgcgactgtacccggatttgcccgtcttatcatgtataggtaagaaggcagtttttcaaaactactatcttgtatgacttccaataacccaactgttgacacgaacatattaattgataagtcagccataatatatttacaacttaggcaaattataacacaacttagccacaaagtgatgttacgtcagcctttaaagggtcataactcaaccgaaatgtaattatatgtcaaccaaaatatatccataaatcaaccgtaatatatctataagtcagccaaacagtaataagtaagtcaaccgaaacattgtaattacctttactcgaaaatgcttattgatgattattccgactgtttttggtttaacatccggaccaacgtcaccaagatagtccctgtaaagaactcccagaacatcaggtgttgcttgttggtatcgattagaacgttccgtcagagaacatgtgtgttccgaatcgtatatacgaacataaaaataaggatcatccccttgtctagatacacgaactctccaacaacatccgtcaacccaacactcgtaatatactgtagtcgtattagacgttggtacatcaaaatcaaatccatcccttatcgccagaagtttgagtcgatactccaactcgaatttgctacggtattgttggcctaccgcgagtgttagcgtagacagctccaaccttaaattagtcgagctcccagcagatccgatcatttcaatggtctgagttctcttcttagaaggaagtttcggtgaatctttgtctttattctaaggctcgccgtataaagcaaagttatcatcatcagatgaggcaccgtcggagtcgtcgaaaacatcaaaccggctagaaaattcatcatcttcttcttcgtcacctgcttcattgtcagatgctttatcgtcacctgcttcatcgtcacctgattcatcgtcccttgcttcatcgtcttgataatcgtaacagaaaccttcaaaccccccaccccggaacttcgaatctagattctactcttgagatagattcaataggccgtttcatccttcctcttgatccgtccttccgactaatatcacttgactctttcgctgtaatctcaacacagagacgtagcttattgaattttatcaaatctagataacattgcaactctagatcattagagatataatttggtggagtatcgaacggcatattttcatagtcttgttggagaacatgtaactcagccttaactgatgggtcgactgattcaatccgtaatcatcgaccaccagcttcaaaagcctgtcgtgcgttgtttccgcttctagctgcacagctctacaccctctttcgtcggggttagatacgaatcactgtttcttaacccaaatatcggaaacaactatgaccaaaacgggatcaaccatatcgagagaaatatgaaagaaattgaagatgaatgagaagatgaatgaagaaaacaatgattagatagaagttccggtgatgttgtaacgctcaggcgttaaacacagactgggaagacgagttaacgaagcaagggacgtttcgtatttccgttgatgatgctgacatggaatgatgacatggaatattacagccgacgtcgttttgaagtgatgaggtggcaagtaagccaccaaacgaacatttgataactcagccatcaagcaaatctataagtcagtcgcaacatgaatactattacagttattaaaaaggaagaaaacaaagttaagtcagccgtgtaatgtcgtaactcaactaactcagccgtatcgtttaaaatctcggccctaactgcatgctattatagtaattaatcttttgcacataagtcagtcataacaaggccgagttatttggaaattcagctctttacggctgatttgtaacactcgataataactcagccgcaacatcatcccataactaagccgtcccgaaatataactcagccgtcacgaggatataagtcagccgttttctcataaatcagccatcacgttgtctgggttatgctataaatacttataactgggacaacattccttaactcagccatatcgttgtctgggttattgtataactcaggcaacattttacaaatcagcagtaatgtgtggctgagttatactcatacttcgccgttttgtcatgactcatatattttggttatgactcatatatttttgtcgtatgtcagccgcaacataccgtaactcagccgtaactgccgctgtatcgcgttacggctgagttcatttaatccacgtcagcaatttctgacgtggcaatgacattccttgtaattacgtttttttccggtaatgtttagtaggaacacgctggatatacaaaaaaagacgacaatatgacagtaataaaaaaagttccatctggttccgttaatatatgatttttcttgaatttgtcaaaaaaactgttgtacctagcttaaataagaagttaattggccggtggtcgtgagagagatttagatctctccggttgattgtttattacattttctgttttctcaccagtcctttgattcgtaaatattagatttttgatgaagtgatttatgagagagattgttaaagtatagagaatatcagtttttaaaaaaacctttttcgaaagttctttctggttaattaaaatgaggtctcctttcctggcgatatgttcttacatcatgagcaagtatgtgtcttattgttgcacacatatattcatatcgcaaatttaatcaagatctgatttttaaaactatatttatttgttatagactgatcacatttaaccataaagaaaaagttgacaaagattaaagtgaattcaaagtgccctgaataactgatatgactgtcattaactaaattgttttatgagaattgtgataatttattgggacgttatcaaagaaaaaatagtggtggtattcactgttcggtttgttttagccaaattacaacgattctaaaactgtaggttctatttaattcttcacaattgttgtcgcctatgtgatgagggacggaagctatgtagagaaggaggctctgttttggtttagcaaaacagagtacttaaaagatgaagatgggagtgaatgaacgaatgaatatgaaaggggatagggttgaattcggttctaggaatcacatatcatctcaggatgaaaagagaatttgctccataccatcttaggaatccgtctgaaactaccccatattcgtgctacatttgcttgtgtttttatcttcgtgctacattttattagattttcatttctggatcaaaaagtttcgtaatattctaatgacatggattatattttctgggttaaatcatactttaagtcttgaaattagaaactaaataaattaatagtttattcgcttataataaatacgttaattacattggtaattcatacctacatattggacatatatgactagtctgtagccattttacaatacatgtgtaatcaaacctatgaccacaacttaatttgactacttttgttccgaaataaaaatgtgacaaacaaataacgcattgcgcgttcttacaattgttagtattacactaacattttgtataaatatgatcaaagacttgattgcaccattacttgcaggtatgaaattgatttttacttcttccaaggatcttcgaattgcttcattaagatgaatatcttactcatcaacgataaagttgcttgaagttcgttgactgatttcttcatacgtttgagattgaaagacaaatattaagtggaggagatatcctgaagaataatccgttgtagtaaaaactcatctagcagtatcaatgctcttgtttatccatgcctcagattcatgtatattgactccagctgaaattaacgaattgaataatttgttttttgcctcggattcgtcgtttgagacatattctgcaatcgtaaaacacaatgaaaagtttatagaatctctggcttcttggattatttctggatccactttgatcataccctcccatccattacctgggttttcctcaattttaaaaccgtaggtgggaacaattactgccggcattgaaaatttaaataatattattggttagataatgatttgtcattaaaagcaccaaaattaaaagtaaaaaaaacatggatatcagtatttcctggaattatagccataaaacaacactttccttctcgtgaacaactggaacaccaagcgttacaaattgaaaacatttcgttttcattattactttttttggatatattttctttttttttttgtggaacttttggatatattttcttataaaacaacggaatgggttgtagtttatagagtttgtttgcaaactaatatgtttttggaaaataattagaaaattagtacggttactatttaaatttggatatgtagtacagttcattactgtataattttttgtgaagccctttttgcaactctgactcacaaatagttacgtgtaatgccactgaaaccgtaatcaaggtttcttctcctgactgttcatatttaacttctctcagacaactgttttatagtttatttctcagttgggtccggaatttcagagaaatgacgaagaagaaagcagttaaatcgaagattccaatcagtccagtccaaataaaacaagaaaataaatgacgaaacacaaaaagggaaacaaacaaaggtaatcccgactcgaaaaagttctgctttccttaaactcaatacaatcaaaattgagattagggttcctatctatttctttgattccgtcgaactagatacaaattaaggttaaatatctaacattctgttacttttgtagcaagtgaatcgaaaattacatcttctccggcgaagcctccgggaaaatcgatgaccaaaaatatgaataaagaccagtcgcggcgcgatatcaaaagggagtataaacgaggcaacataaacgactctagcaaaggtaaaacgattatgctttattcattttgttgctggagtcagaaagtttttggattttgagagaatctgtaatgaataatatgagatgacggagactcaggataaaacgaaaggcggagaaaatgaggctccaaaccctagactcccttgccgtctgatgcatcctgacgaattccgagataaggttcgcctcaacatatactcgaagccggaatatcagggaacactggtggaactattggagggctcctaggcctgggatgtgctgcttggttcccagttcaagaaataggttaaactgcatgttgcaaggtgttctcattctgcaaaatttattcatggaatgcttgctagacaacttttgacacaatgaaagcatgaattgtggactgtatatggggggtttccaccctgattctctctgcaagaattccaaatcagaaccggcttgaattgtgataagcttccaacagagtctgaggtagaagctcaccaagaccctgcatgtctatctgtttggaatcgcctatttggggagaagtgtatagtgacagtcatggatgttattgacatgctaaggggagatgtcaatgctaagcctcgaaagcgattctcaacatggaagaagttgagtctcgcattaatagtcctggttgatgggtttgttgtttgcagcaacagaaaacaacatcggataagtagctcatttcttgagatgcttcatgatttggaattctttatgagctacccatggggcgagctgcttttgaatcaacaatagaacggtttggcccttctattggggaaaatgaccctattgctgaactcaagagccggctgataagtgtgaattttgcatgttttgagaatccatttgtcatcactttagcatcatatcatcactgttttataccatttctcatcatttgtcatcactttgcatttttaggatagttttgcatgcatgttgcatatttgtgttgttttcaggtgattcggagctgttgacgagctaattggaagaagcggacctgatcatgcaaaaccactcgacctcaggtcgagtagaagcttcacaacctcagcagaccactcgaccccctggtcgagtagaagacactcgacctcgcggtcgagtgtcttcattcccatcacctgaccatcactcgatcacatcactcgaccccgaggtcgagtatcttcacctccattaccagaccactactcgatctcaccactctaccttgaagtcgagtatcaccatcaccaccactcgactacatacttgattgcgagcttcagagtcttcttcattccgcactcaaccagacactcgagtagaaggaagaaaagaagactccagctattcactcgacctctcactcgaccacatgggtcgagtacacttcttaatccatcccaatacttcgtcgttttaagtattagggtttcggaatatttggctataagtagcatgtacttcacattttcgcaaacaagtttttatctagttttattccgcagacactgtgttctagacctttgtaatccggatttctctttatctattcagtattcagtatttgttcttgattttcgtttactattgttcattctgttatcatcctgctgttacaccgtcgttatcatgttttcatcttgttcttcgtttatgctttctgctatgatgtctgagtagtggataggcttctgaggatgggttagagtagtgtagaatgttcagtatgctaggtgattgagtattgattgatagatcccttctggattagttgttcttaatgcctattgctttctgatcaactggaatttgagcccagacatcttcgcgcccaaaaggtgttcgatgaaatgtccgaaccactaattccagagattcgtggccctgtatcaaggtattggttgcagggagtattttggctttaacttgttgattcgtaatgtctgttaggttagctctcgtcaatggtgattgagtatgggactaggataacttgagggtctctattgcggtggcacttagatttggttaatgaacttgttgtctagggataatttattgagcatgtcaatcacctgtaaactgaggaaacgaaactactcaattaccccatcctcgggaattctttatctgattgaattctttgtttactctactgttgtttactgcatcttgtcatctgttgcttaatttctgcaattctttcttgttactcgacctcatactcgaccacccagttgtctggcaacagattgtacagtcgagtatctgtgttatactttctgtctgttactcgacctgtcactcgacctcacccagtgctctgcaaagagatgtgttggtcgagtattttactgtttctgttttattttctgttttctgcatgttcacttagaactgctaaaacacaccaaaacctgttattgcttggcttgactttgtgacttctgatgacatcttgattgttagcatcacacccatttggattgacaaccttcagtactacaacgacatgatagtgctttaggattaattgattctaaaaacttattctcaatttggcgccgttgccaattgggtgtttgtttgttacatttgagatttcagacttgcttagatcaagttctttttcaattttcatttcagatactgactgtgtgtttttcttgttgtcttctcgattgaggtgcatctctgctatattcaaactcgatcaacaagcaaccagtacctccttttcaacgataacatcgaccgcctagctcgtgaacttagagaaaggagaaacacaatcaaccttatacctcagcaatcactcaaaatggatgacaaacaaaatcaacagaatgggcctgcaaacattggtgctggagatgcaccacggggccacagtcagaggaaaggaattgcacctcctgctatccagaacaacaacttcgagattaagagtggtctcatcttgatgattcaggggaataaattccatggtctgccaatggaggatccactcgaccacttggatgaatttgataggctctacaacctaacaaaaatcaatggtgtcagtgaagacggattcaagctctgtttgtttccattctccttgggcgataaagcacacatctgggaaaagaatctgccccatgactcaatcaccacctgggatgattgcaagaaggctcatttctgagtggcttttcacagaagactggtgaaagcttctgtgaagcatgggagcgtttcaagggttacaccaaccaatgccctcatcatggcttcaagaaagcttctctgcttagcactttatacagaggagttctaccacggatcagaatgcttctggataccgccagcaatgagaattttcagaacaaagatgttgaagaagggtgggaattggttgaaaaccttgctcaatcagatggtaattacaacgaggattgcgacagaactatcagaggcacaactgactctgatgacaaacacaggaaagagatcaaagcgctgaatgacaagctggacatgattcttcttagccagcagaagcatgtgcacttccttgttgatgacgagcagtatcaagtccaagatgtggaggttaactagttagaagaagttagctacatcaacaatcaaggtggctacaaagggtacaacaactttaagatgaacaaccccaacctctcttaccgcagcaccaacgttgttaatcctcaggatcaagtgtttcctccacaacaacaacaaggtcagaacaaaacttttgttccctacaatcaaagttatgttcccaaggagcaatttcaagggaactaccagcagcaaccaccacctgggtttgcacctcagcaaaaccaaggtcctgttgtacctgatgctgaaataaaacagatcgtacaacagctgctacagggacaagcatctagctccatggaaattgctaagaagttatccgaattacaccagaagatggacaacagctacaatgacctgaatgccaaagtggaggcgttgaattccaaagtcagatacttagaagcataatccgcatctacctctgctcccaaagttacgggacttccagggaagtcaattagaatcccaaggagtatgctaatgttcatgctatcaacataaggagtggaagtgagttatccactagagagagacccaagtcagtcactaaagacagtgcataccaagatggggaggatttcagtctcaataaagatcaagttgactagtcactcgagcagccactcaactagtcacttgagcagccactcgagcagccactcgacctctcactcgagcagccactcgaccagtcactcgagctcccacttgaccactttactcgaccgaccttcccagcaacatcacaaactgctctgaaaccagttgctgtcaaaaacaaataaaaagttttcattctttatccttacaagcccccacttccatttcctggtcgacacaagaaagaattagaagataagtacagagctatgtttgccaagaacataaaacaagttgaaggcaggatacctcttgttaatgctctcacgcgtatcccggattcccaaaaattcctgaaagacttgatcatggagagaattcaagaagttcagtaaacaacaattatgagccatgagtgcaatgccatcatacatgagaaagatgaaccagagaagctaggagaccctggttcattcactctaccattctccctaggttcattgacattcaataaatgcctttgtgacctaggagcatcagcaagtctaatgccactctcagtagctaagaggttgggttttaacaaatataaatattgcaatatctccttgattttggctgatgggtctgttagacaaccgcatgggttattagaagatttgcctatcaagattggaaatgtggaggtgcctacagacttcatagtgttgaacatggatgttgaaccaaaagatcccttgatcttaggaaggccctttttggctacatctggagcaatcatagatgttaagcaaggaaagattgatcttaatatggggaaggattttaaaatgaagtttgacatcaatgatgctatgaagaagccgacaatagaaggacagaccttcttagttgaggaaaaggatctgctagttgatgaacttctagtggaacttaaagaagcaaataactcaaaaactgttttgaccaagagtggtaaacctggatatcttcctagtgaaactttgagttctgagaagtcattagactcacacaaggcaacagttggctcaaaggttgggtcaaaggtttacaagggcttgatggggtctgacacaaaggttatgaaagctaatgaagtaagttcaacacatgctcgaccaactgattccaccaacaactcgaagaagcctccaacttgccctgaaagctcatgctcgaccaaacaactcatggcaagcacccagacgtcagatgattggttagaactcaaggagagatctaaatggcaggacaaagccatacaagagctaacacatattgtgaaaaagctgaaggatcaaaacaaggagctcaatggaaaagccaaccaagtaccactcaatatcaaggacgcccttgacgatggagccactattcttgtcagcaaagaaggatgtgaattcacatcggaatggtgtagaggagaagactatcttgataaaaaaagaagcttactatgaggacatggcctctgagtacccaattgcagacctgtcaagaaaccctaatgagtatgatgatcactctactcaagaaggagaggagaccacatttcctctctgcaacccaccctgagcctaatgagtatgagaagtcaagcttagagacttaaaacaagctcacttgggaggaaatcccatgtctatctttgtacatatctttatttttccttgttgattttgatgcatttggttagtgtcttcaggagataagtataaagagccgagtgaaatggattctgactctgcgagtaaagcagtatactcgaccacaaagcaatgaataatactcgaccatgttttagcttatccacgccaggagatcactcgaccgcggtgctggccgcataagaagaagggaggtctagtatactcagggcgttgctggccgcaatagagctgatgaggtcgagtacccacctactggagctgataccgaacagggcggctcgtctatggcctgggatcaatcacaggcagccattgacgaccaactacgttcattcttcgactgaggtaagcgcctcacttcaccattgtattatatcatctgttgtgatttgtttcttcattttgtttctgtgattggatttgtcctgagtactctcttccaagtttattcgcacagtggactgtgtgatttaagtttgggggagggctcaggaagtgtgtgttgcattgtgtatatttttgagtctgcagtcatctaaggcatagaaaaaccaaaaccttttgacaatttttagaaaatgatttcacaaaaaaagagtgttcatgtagttgcattacatttaagatcgagtctaaagtgtttcatttaggattgttgcatatgcataggggataatgatgagatagccttgtaagcattttggttcacctgataaactcagtgccctcgttgctagttgtctgttgcgtagtcaatgaatttgaaataaaactgaaccatgcctagattgctctactcgaccacactgtcatgatctgataccattcccaatcaatttgaacctgaatctgatctttaattatcatgtctgcatcaaatttgaactcatggataccctaaaatacttggattttcttattcattttgatcactcttgttaatccaagtagcttactctccttattagagcagttaacccaaacccaaacccaaacctagactttctttcaagccctatatcacttgtgagtgtttgtgaggtcttattccgattaagcttggtagaaactgttaggttcgtaacgacagagatagtgtctcatgtagttctagttcgcattctttggactagataggactaggtgggcgcttatactttgggttgggatgtgtttaaaagaaaaaaaggggttgattcattgataagaaaaggtaaaagactctaggtgaagtaagctaaacaagcagaaaaattctagtaaaggttttgagatttgtaaagaaaagaaagagttcttgttagctattgaagatgggcaaaagcccttggttttagaatgttaaaaacatgaatcttagttgttaaagaaatctaaatccgctagatgtatcaaagtgttgagaaagcttctcctagagttaagagaaaagaaaagaatgattagaaaaaggctttaaaagattcatgaatgcaaagggtagagttaagttcttgtattgggattggagttgggattaccattagagcttcatttgatatattctgggtagatgggatcttatctctatatgcatagcttgggacttacctttagcattctaataaagcttaatcattttttgagagatccccttttactgaagcatattctataagggatcatctttgtctcttgaccttttaccttagccaaatgagttcattgatgatgcattgcttgattcacgttccagaactaatgaatgttaaagggattggtagatttgaaaacatgtgtaggtcgagtatatgagtcggattgattgataatgaggcatggctaacgtttttaagtagaatttgatcatattgcagcttagaactttcaacttggacattgatttcatctggtttatctggtgctttggctctgagtccccgctttcaaacctcacctccagcttgttcttgattgtttgcttgagggcaagcaaagactaagtttgggggagttgataagtgtgtattttgcatgttttgagcatccatttgtcatcactttagcatcatatcatcactgttttataccatttctcatcatttgtcatcactttccatgtttaggatagttttgcatgcatgttgcatatttgtgttgttttcaggtgattcggagctgttgacgagctaattggaagaagcggacttgatcatgcaaaaccactcgaccccctggtcgagtagaagcttcacaacctcagcagaccactcgaccccctggtcgactagaggacatcaccacttcacctcaccactcgaccgcgaggtcgagtgtcttcatccccatcacatgaccatcactcgatcacatcactcgaccccaaggtcgagtgtcttcacctccattaccagaccactactcgatctcaccactctaccttgaagtcgaatatcaccataaccaccactcgactacatactcgattgcgagcttcagagtcttcttcattccgcactcaaccagacactcgagcacaaggaagaaaagaagactccagctattcactcaaccacatgggtcaggtacagttcttaatccgtcctaatactttgtcgttttaagtattagggtttcagaatatttggctataagtaggatgtacttcacattttcgcaaacaagtttttatctagtttatttccgcagacactatgttctagacctttgtaatccggatttctctttatctatccagtattcagtatttgttcttgattttcgtttattgttgttcattccgttatcatcctgctgttacactgtcgttatcatgttttcatcttgttcaacgtttatactttctgctatgatgtctgagtagtgaataggtttctgaggatgggttagagtagtgtagaattctcagtatgctaggtgattgagtattgattgatagatcccttctagattagttgtttttaatgcctattgctttctgatcaactggaatttgagcccagacatctccgcgcccaaaaggtgttcgatgaaatgtccgaaccactaattccagagattcgtggccttgtatcaaggtattggttgcagggagcattttggctttaacttgttgattcgtaatgtctgttaggttagctctcgtcaatggtgattgagtatgggactaggataacttgagggtctctgttgcggtggcacttagatttggttaatgaacttgttgtctagggataatttattgagcatgtcaatcacctgtaaaatgaggaaacgaaactactcaattaccctatcctcgggaattctttatctgattgaattctttgtttactctactgttgtttactgcatcttgtcatctgttgcttaatttctgcaattctttcttgttactcgacctcatactcgaccacccagttgtctggcaacagattgtacagtcgagtatctgtgttatactttctgtctgttactcgacctgtcactcgacctcacccagtgctctacaaagagctatgttggtcgagtgttttactgtttctgtttgattttctgttttctgcatgttcacttaggactgctagaacacacaaaaccctgttattgcttggcttgacttagtgacttctgatcacatcttgattgttagcatcacacccatttggattgacaaccttctgtactacaacaacatgatagtgctttaggattaattgattctaaaaacctattatcatcgactatcacaaagaagcagttgctgctacgggtttcctcttgcactccaactccaagtcctcaactccattcatgccctttgaagtaggattaaagagccagctgatttaagaaatttcatccaaaggcctgctgttgatcttggtcgcacgattcttctccagaaatcagatgttattcacgctgagtgcgctacaaatgtaagtaaaattcaaaaaaaccgtttatatgtttgacatatcgttaagttttagagtgttggatacattctacaaatttggattaatatgttttttgaattgtactgttaacagtggacaaatcacttggataagaacagagggattatatgcagcatccttcaaaacgtcatctctatacaccaaatctcttccccttcggccaaccttcaatataggaccaagcagccaccactgatcatcggcgacaagcttaacaattttcgccaagagatcattagggatctctgacatttcaattcccattttgatatttttaaactgagaataaacgaagataagttgtttggttcttgggtattatagagaaattcaactttcttgtatatataagccgtaataatatagtagctggggaagttacagttgaggataatttaatcctcacaccaaacatatttatgtcatcttagttttttttttaaaattacccaattaatattaatattaaccactccaataaaaaactcgatgtacacatctgtaaagcgccatctgtacagcgaaagaagagaatgctatgttgttatccgtacaacattataaagtactatacagctatatcttcaattgagtaaaaaactactttttgagagatacattcatcagtagtacttggcactttcaaaagtagtttaggtaataattaatactagccaatcaatgttaaatattaacctctccaacagaaaactcgatgcacacacagcgtcatctgtacagtaaaagggcagataactgtacatcgccatttgtacagtgatgtagtaaagctatttaattcatttgtacaacgaagtatagaatgctctgttttaaaccgcacagtaatataaacaaccgtactgttgtatcttcaaattgagtaaaaagctactttttcggaagtaaaaacaacaagttttcaataaattacatcaaaattcaaagttggatcatacattaaaagagatatacattcatcagtagtacttaccacttcaaaagaagtttagctaataatttgaacaatcaaaagaaaatagacattcttatgaaaataggtccaaccatatgttatatgaatgtctaccaactaacaaaaccaaaaaggtaccggaccaaaatactcctccatatataaccaaaaaactttccaaatcattgtaagattccatagcgtcaaccaagggggttcttgcacataacacgattctgacctacacctccacatctcccacacttattaggcgttttagacttgttatttccctacataagacaaaaattatggttacctaggtatctagaaatatgtggatgtacaaaaaaataatttacctcgtatttcccaactgagtgtatccgcggcttcgcgggtctcccgggaggtttttttgttatcggaggcattcaacagagaatccttatttcctcagggacattaactcggatggatcgtgttggagctggattcccctccaggaatccacctgcgaaaatactaagcaagcccacaaaagcccaccaagcccaccaagtagaggacctacgcagctgacaagcccacatatgcgaatggacacttgggccagataagcccagtcacctgatgaagggagataagcgaataatgacctaggaactgatgaggagatattcgcggagcggatctggtaactcggaactgacctgccaaatatccaggaggatctccgcagatcccggacggagctaccacgtgcgtagacctatatataagggagcgaggacgacttggaagacacattcaattcagcttacattaacatacatacttttacacttgtaatctcctttcacattgtaaaagctttgtcataatcaatacaaaaagtccattcgttcttagcaatataactctcaaggtttcagtgaagatctagccctcctttctcataatcttaaatacaaatctctagtgtggatttcagaacccacagatcgcgtacagggaggattggttcttggaccgttggtgaccatattcctagcctatgcatctctccaactaaagatttgaattccaaacctcaattatgagctgcagccattgtatgcgtacatgggattcggattttctgaaactccaagcaagtgcaagtgttttgttccaaagagacgtggaactgtactccatcctttgcaactacttcgaaatactagctccaaacagccaaaacagacattcccaaaccacctttgaaccgcttcataagttccctttcaaccgcaatcggactttccccaactaatatagatatttttagcctccgggattcaaaccacctagcaagcattttccttataaattccagcaatgccacaactggacttcccttagctggtagtagagcattgttcaaagaatcaacaatgttactagacatcaaattatatctctcccctgtaaaataaaccctactccaattcgcaagtcccatctcttctatgtatttccaacagcccatactccttttctttatcctttcacatatatcatcaaaatctttgatacgaaatgagttacctgcttgccacattaaagctggaaggccactcttctttctatatcttcctttaacattccttcttatgtggaccaaacaagctccatggtgtgcttgattgaacataatactcacggctttgaatattgattgattccgaactgagacaaacgtcaagtctggtccatctttgattatttctgtaagcttattcatgaaccatgtccatgattcgtctgtctcgctgtccactacagcaaaagctattgggaaaatttgaaagtttgcatcctgacaactagcggtaagaagacagccaagaaacttaccaaacaagtgggtaccatctactacaacgactctccacaaatattttaacccttttacactatcccccaatgctaggaaaacatatttaaaccgctcatcaccaatatcatcaatctctgtttccaaatgataaattgtgccaggatttgcaagttgtaagacgtgaagatataccggcaacaaggagaaagagctctcattcgtgccctgagcagtctcaacagccagttctttagctttccaacatttccactacgtcgtccgtacattgtgctccctcaacagagaatcgggtaagtctctcgctcttggcccacagaacgccttcacatacttagcccttaagagtgcagctacaaccttagaagtagcatgttttccaaagcggctcctagtctcaaccttacacatatgatccagctttgccttcctaacctcatattcttcattgtccacaacttggtgtgctctgactctccaatcacaacattttttatcataacattcagcaaccaagtaatgtttctcatacctagtaaatttgaagcagaaaacactgcttatggcataaatggacagagcaatcctaaaatcttccctcgatgcaaaggtccttccgacaaacatattgtcatcctctttgctcaagtcaacatgaaccgctatggcatccatatcatcatctccaaacattggctcaatgtcgtcgaacccataaacttgatcaacgcttatacctttctgaaatgttgcttctaactctgtcattgtaccaacatgactttctttttgcataactttttttctagggggctgctcaacaaaatcatcatccccacttatgccccaatcaccaaatgtttcacaaatatatgtactctgaacaatagcaaactgagggttgggaggatagacagtgctattcacttgaacagaagataacaaaccagcaaagtaccctccttccactgccgcaacgggtttaacaccagactgtacaatacctggagatgatgattctctagcttccaaacacttagcaatggttgtgccagtctttatagctttaaaagtagtgccgaccataactgaatcgccttctctaaaacacgcaaataaattcacagatttatcaccaagacttaaggattttaaagcatctaaagtgccaatcagacccaatcatcgttagacccggctgatcacaagctaaaagagctattttgtcctcgaatatgtagctaagctcgacagatatcgacaaattctccattccaaatagttgtcgcactttaagctccaaatcccttaaactttttaaccccatcaacctcatcgccctgccgtgccgagaagaatccattttgaactcccattcacctgtgctatacaaaatccatcgaccggcttgatcaacaataatatcatccactgcacatgaaattcaattataatcagtctctacgaaagaaaacattaaaacattaggaataactaaactaaaaaaaatttgttctgaattccaccttccatggtagattctctgagttgaaggtcctcaggaataaagatacacaaccaaaactgacaatcatattcttcttttttgctttaaaacacttaattctcgaaaaagagctaaaattcccccctaaaaaattagctaatctcgagaaaaacctaaagagaatctgaatattatatgattttattcaccaaccagtaaactaatttcgttgatttgaaacactcataaatgtcatcgtttctctcagctcccactccgacattgattttgacgacgacgaaggcaatttagtttcaacgcttccaatgattcaaattatagaaaatttgttttaaggcccatttacgatttcgttgagcccataccgatccgagatttattaactttgactctgacttactaaaacaaaaacctgaactcggctagagggtttcgtttcatctacaaaacaaaagaagtcctttaccgtaatttccacaaaagctaatatgcaccactttatatatattacgaagctcatgtatttgacggaacggtggtcccggagaaatcacctattatgaatagcaaccgtactgctttcataattatgttcaaaaaacgtatcattttccaaaatatctctagtttacatagactgtcacagcgacgttcgtcaaacgtttgaatagacgtaaatgatttttaaaggttgttaaaaaaaaatagtcgcatctttacgtattaggcttaagaccgtgttgttgtcacattatccctaaaacaaatatgagatgcaggctcggcccaaatagggtgtgtttgccatttcattttccattaatttattttacagaaatagctaattttatttaataaatttttaaaaagacccaagaatatcatagtcaagtgtccatttttttttcttattaacaaattacgaaacctattttgtaacccatattaatattgagaagggctcaaataagaaggggccttattgctatagggactgtttcatagactttcaatattcgccagatgcaacaaaaatgttaaagtggttaattaattcattgttaaagggacccatatgatttggcttagacaaataaaacactaaattgacagaactaattctaaactaaactatatactaaatattcaatcatacccgtaagcaaaataaaattggggtataggagacagttttatagataaatagagaaattaacatttttaaacttctctgttgtattcagaaccatatacccttattacatctactttcaatctaataatctttagtttatatatgttcccgtcatctaacagatttcggcatgaggagaaactaattaactatttctttcttatatcatcgaagctatcttttacgagtttgtctattcttttcgtatgaaaagatttttctctttcttgggtttgttcctccgtaataatataacaaaatgaaaactaaaaaaaattacaaacttatagatttttatatacttctttgtacacaatactacaaactatactcttttcttcattgtttttatgaccttgataaatttttaatccttctaaagaagtgactctagacaatgcaacatacatttgtccatgactaaacactggtctaggaagaaacaaacctactctgttaagactttcaccttgacttttattaattgccattgcaaagcaagttctcattggaaactgttttcttcgaataacaactggtatatttccatcattttgagatagtacaattctaggaagaagtactatatcaccagcattagctccagtaattatcttagcctcaattactctatgacccatacgaagaactatcaaacaagtaccgttacataacccatctcgttgacaaagattccggataagcaaaattggtgtattgactttaagatataatttatgatgtggaaatcctgataaatttttagtgtttaaatactcgacaggatactgtaaaccaaaatctgtttcttcatattcattattagtcactgaatctgctcttgatacacctttatgttacttggaagccaattgatatagctcaaattgccttaagcttactccctcaaataagagatcgtcgttagcacttaagggtcgaattctactaagctctcgatgttcacacaatagacttatgatgtattcaaataagctagaaaaagtatataaatgtaaaacacaataaagcaagtaaactgtagatacaagtgattaaagcgttgggtctagggaattgtctcgggagatacataaattgtagatctagctaatattagggttgttatcgcaccgttctcaaactcaaactatgactttagagtaaccagtggtgttcgcaaaactctctatacttagagctaagataaccgaaaaagccgagaaaccatatactaaagcatgcattattatcaagtttgattagttcacctagtatctaaaccaaagcccttctatgagcaaacctgttctttcttaaatgcctaggctcatcaatgattgttcaaataacaagtagctatggtgggcatacctattatctaatatcaagttctaggtgatcaatctaaaactagcagtaagaataatcaagatgaagaaccctaaaaatgaccctaaggggttttcgatatactaatccatctaaatccctatggagactccctaaacccaacaaggttattactcagacatgataacaaaaacacaaatcataatctgaatagtttgcattgatgaattagaaatagagtaaaaggagttcagaatcctctctgtagggattggattcttctctccacaagtgtctctcaataataaaacaaaacttaacaaaacttaggtatcaccaatgaccaaataattaggtataagtgaatagaaatgtccagggactattttgcaaataagggaaacttcacgacttctcaaagacttggtaaaaagcggaaattccttcagccgaaataagggtgtcgattgacataggtgtggtgtcgattcataccatcgtgtgaaaaacgtctttgataaatttcattgctgaaaagctcccaagatcccttattatgctccatagatcacaaatgtgtaatttgatatgtctataatttgcatgttttacacatccttttatcatcattttgagtctagtttcatccatctttcatagcattcataatcagttttgtacattttgcatttttagtcgagtctaggactagtcttgcatagattctgcattctggagttatttcaggtactttggagctattggtgctcagaaagaggaaagacataacagaaagtcacatttccactaacatactcgatcaccagtagtagagagggaagcagtcagctcagcagtccatccagacacttctactcgatcgcagaggagaccaggcagtccattctgccagatatactcgatcgtagaggtgaggaggcagtccattctgcagttctactcgataacagagctgaaggagtccatcctggcagttttactcgatcgcagaggagaagaaccagtccatcctgacagctgccaatatactcgatcatagaggccaagaagcagcccagaccattctgtcaaccaacctactcaaccaccacctcgaccctctgatcagtccgcactcaacctgacaacctgagcaactaaaagagaagagaagataaggcccattgaaagcccattcgaagtccattcgaagcccacttcgaagcccattaggaagcctgctttgagccgacactcttgatcacatcgtccatgggccgttaagtgggctcaaagcccgcttccttatccttatcgttttaagtataaataagtctctaagggttttgccctgggatagggagacatacacctactttttacagagatttctgcaacttattcagcagccgcttttcattcctataacttcgtacttcgatttttcttctaagttattcagattttgctttcatttacttgttcatttctgtttcatttcctttgatctttagaagtatgcaatcttcaatcgcttatatgttgttgtctttgagcatgttgtttgagtagtgattaggatttctgaggatgggatatagtagttgtggaacccctggtcgaatatgttggttaagtgtatatttattgaatcccttctggattagttgtgtttactgcttattactttctgatcaactggaatccaatcctagacgtttcagcgctcaaaaggcgtttaatggaacgttagatctactaattccagtgataaccgtctctatcccaagagattggccgttttgaccgtttattgactttatcagtccattcttattgtctgcattgttagattccattaatggaaattagtgtgggctagctttgcttgaggatttctatcgagggagtaaattaatcttttgttgaacccattgtctagggaaagctttattgagatttgataaccaactgaattgattagggagtccacactattcgattaccccatcattaggaatttctcatccaattgatttctctgtttatttacctacgtcattcacttgctattaaattttagtattttccagttttcaaccattctactcgatcacaccttgctactaacagtgagactgtgtgatagagtaaactgctccatttctgaattttcactctgtgtcatcccgttgtactcgatcatagggtcccttctggcagtcgaccctacgatcgagtatatcagtcatttctgtgactttttaatgttttctgcatcaaacactaggactttagaaaaccaaccaaatattgcttggctctacttagcaacttctgatcatatctcatctgtttgcatcacacccatttggattgacacctaaaatactacaacgacaggatagtgttttaggattaattgatcttaaaaacctattatcataattgcacctgaaacgactcaaaacatacaaaaaggactagatcgactctaaaaacattctaaaattatggtagaaatcagtaaaagccgggacatatcaccaatctaacattactttgttaatttcatccacaatttcatttcttggagtaataatagctctatcccttagataatttggattagcatagtttttttcaaatgatgtgtagacatgttctgcaatggctgagatactattatgtttaacgtttagcaacaaattctcatccacaatgatttgatcaacttctgaaaattcatttaagaacgattttccttttagcaataccgtttccaacatccaaaatccactttgcaaaatctttttctgtttttcctaaacacatattttctgaaagcgtaaaaacttgacagtaattccaaagataagaacggttgattgatgctgaaacacaatcttgcctgcttccttgacttgtaataggtagtgtttgacaaaaatcacctcccaacaaaacagttttgccaccaaaaggcttcatattagaatttgggtcactactaaacattatatctctcaaagatctgtcgagagattcaaaagtatacttatgtgtcataggagcttcatcccaaattataagttcagtatcaattagcaacctagataatatagtattagctttaatatcacacactgaatcatctcttggatttaaaggtattttaaatcttgaatgagctgttcttcctcctggcaaaagtagagcatctatacctgaagatgctattggaagaactatacgttcttcagtacggagacggttaatgatagaggtgtatacaaatgttttacctgttccaccacgaccatataaaaaaacaatccgccttgtttgttttgaactgaacgaattaaagcatcataaatatcatgttgttgttcgtttaaagttgcaaactgagtgaagtggtcattcttaagtttttcaatattatagctcttttcttctcttatctttgagttagataacctggttataaaactattatctaactttggcattccaggataatcaatcagtgactgttcataccgcctaagaagcaactcaatctccattaaggtgtaactttgcatttcctcttcactcaaattcattcttctaaaattaaataactttctttgctcgaacaccatgtcttcacttagatctatccaatatgaattccacaatttcaaaggatttataacttcacaatgaactaataacgtcacaaataaattacgcaactgatttgctgtagcccaaagagaggcttctttcattgtctcatgccactcttcatctccttctaatagactcattgcaacacatgcatctttaaaagaactatgagttataccatttacggtaagaatatcttcataacttgtgggtccttttatataattgattatcattcgaagataatacaactcgcccgcagtaggatgaatattatatattctaccaattgagtaccaatttttattttattctaacttcgtgaacttttgttccatacatattttgttggaaattgaacgtatgacagattacgagcttctggatcatttgattcatctcaaaccaacctgtaaacatgttgttttgattcttcatgttagtggctattatttccaagtgatcattgtctctaaatatgcattgacgttgattttgcaaatgaatacttagtctttgaactggttgactttggtgatctatctcaaattggcataagcgccatgccgcctcacaagcaaatacatatctacaatcaagatagttatctctctcgtttactgtatctgcatcgtttccttcatttacatctttattgatagttttccttttctctttaataccactgtcgctttatcaactcctttagtgatttatttaagtaaatattgtatagcactagtcttgttgcaaaattcaacgttgatgtgagccttttttttttttcgttagctctaagttgtaaggtaccacatatcgattatctaaccttatatctccattcagtatacaccttgaattcttgttactcctttgatatattatatatatatatccgtctttatctacagaagaagagcaacaaaattgacgggcagatgttttactgcactctccatttttcatacaagaatttgttggtcgatctactccacaaggtccatgtatcatatgttgctctatcaattgatatccttctggatcagtatttacgtttggtaattcagcagatacaaatttgtcaatgtcttcggatgatgggtttttataatcagtgtttaaccaaataagtatatgtgcatgcggaagttcacgtttttttaaatttgatagtgtaaacaactataccaaaaaaagaatacaacaacttagttataaaaaacaaaatatattagaaaaagagattgtgaaaatatgtacctccattagttggtccaagaaaacgtttcttctcaatatcattgattagttgttttagtttcatatgaaaaacacgtgattcaatatctggtctagcagtcccagataaatcaccagtcaactctaagaactcactaatccctacccatattggttttgcagtcattgttatgaataaatatggatttccaaaatatcgacaaagagccatagcgtcttgatacttttcagccatgtatcttggactacctgtatgggacgatggcaatacaatacattttccaatacttcttggagcattatcacctctggacacagcatctctaacattattatatatatcagctcgaattgttttctgatttgttcttatccattgtaaacggtatgactttaacgttgtataagcatcaacaataaattgatgaaacaatctcccacttttaacaatgatcgaatcttgacatttccgtgtatgaataagttacctgtagtactctctcattgatacatattctctttgtcctttttcgaaagaggtataacgaatcccttctttattttttatttgtgaacaaggaataccttcataataaccaatctcaccatatagaaataataatggatattgtaaagtcatataaagtggatgagtactccaaattcgttgtaaatttccagcatggtgttgtaaaataacatctctttctcctattgtagaactgaaaccaccaacaactaatacattaattttattcgttgaaggcaattcatactgttttttatttttatcatacctgttggagctggatttccctccaggaatccacctgcgaaaataccaagtcagcccacaaatgcccatcaagcccaccaagtagaggacctacgcagctgatgagcccacatacgctaatgggtatttgggcccgataagcccggtcacctgatgaagggagataagcgaataacaacctaggaactgatgaggagatattcgcggagcggacctgatattcggaactaacctgccgaatatccaggaggacctccgcagatcccggacggagctaccacgtgcgtagacctatataagggagcaaggacgacttggaagacacattcaattcagcttacattcacacacatacttttacacttgtaatctcctttcacattgtaaaagctttgtcattatcaatacaaaaagtccattcgttcttagcaatataactctcataatctcaattacaaatctctagtgtggatttcagaacccacatttggcgccgtctgtggggacggaaatagatcattccaacaccgaaactaacacatcaattgtgaccaatgatcatggatcccaattcatccaatttatcgggatctggcttaccagttcagatcccaaacgatgacgttacggaccggcacctcccaacggatctccctctcggaaccagggttgatgctgtccataacgctgatgcggaggacatctcccaaaactcgaattcttctgaatctgaccaaatcactccccctccgcaaacaaggggcagagaacaaaacgtcacgatacagcctccaaatggagataacccggccaacccgtctaatcaggtccctccgcgacctgccagagaattggccaagctccgcgcaatgatcatgaacatgatcaacttaaccaaaaaccaagaaattgtgcatcgcaacctcgccgtaattgtgggtcagcagagacgggactccactcgcttggcacatgaggtagagcgcgatactgcgggtaaggaaatttccccccgcgaaactaggattcctgcccaggtccccattgatctgacaggtaccgtctgtctagacttcatctcgatcctactccaaggacttgtctagacttcatctcgatagacgtctcacctcctaacaaccggtaggtcacctttttgcaggcacctacaaacactctcgtcgaaaacccggcaacaggaaacgagatgagcacaacacttgccttcccaaggctaccggtcccaccttcactatcacttggctatttgcctcctaggtacacgtggacgagaaaccaaacaaccgcgtccagctcccgcgttcccgggaactcaacgcaacaacgaacctctatcgctaatccgccatccattccccagataccaggaagcgacctccttaacagttcaaccgatccccaagcactggtcgatccgcgtaacgtcgtagatatggaaacattccgcaattacgcagcgcaaacaaatgcgaacatggctcaaatgcattggcaaatgcatctaccagtgagcgatgctcccgacatggatcgcgtgatcgaagaaaccacgagcaccccgttcacggataggatcgctcattttcgcctctaagacgtcgggagactccgtttcccggagtacgacggaacgagcaacccaaagactcacctgagatccttccgtttcgctataactcgagcgtacctgacagacgaagaaaacgaagcaggtcattgccgtttcttcgtagaaaacctcgtaggtcacgccctcgaatggtttgctagcctcgaacggaactccattgataccttcgaccagctcgcttccgctttcttaaaacaatattcggtacttatcgaacacaggacgtctgaagccgacctctggagtctcactcaacttcagaacaaatccctgcgatcttacgtcgcaaaattcaaagcaatcaaatcgaagattgcaaacttaaacgaggaggtagccatagcagcccttcgtaacggtctgtggttttcctctaggtttcgtgaggaactcattgttaggcaaccagtctctttagctgatgcccttcacaaagctctcaacttcgccaaagccgaagaggagctcgctgtgctacccttaagattcaaagaatctaaaacgcaaaacgctccccttgcaattaaaaaacccttcaaaaaggaaaaccaaacgcaagggcagcataccttattcgcaatagagtagctaaggacgagagtccagaacttgacctcggaaaatattacaagtaccacaaaaaagaggacattccactgaggagtgtcgcactgtcaaaaaattaatcgcagctgggggcaaaactaaaaaaggttcaaaccctaaagttgaaatccctcctcccgacgaacaggaggaggagcaaactcccaaacaaaagaaacgggaacgaacgccggagggaggtgactctcccccacccactaggagagaacgcatagacctagtctttgtagaactcgatctaggtggcaggacaggaaggtcagtcaccacacctccccccgccccccataagaaaaacatgaggtttccattacgcctctcgaaattctgcagaagcgagaccgagcacctctccccgaaacgcatcgatttcatcatgggaggatctcagctctgcaacgactcaatcaattcgatcaaaactcatcagaggaaggcagattcctacacaaaaggcaagagcccgatgatgggacctgaccaccagatcatattctgggaaagcgaaaccaccgacctcgataaacctcacgatgacgctctcgttattcgaatcgatgtaggcaactacgaactctcccgtataatgatcgacacgagaagctcagttgacatactctttgacgacgcctacaaaaaaatggggcacctcgattccgaactgcaaggcagaaaaacgcctcttaccgggttcgctggagatacaaccacttctctaggaaccatccagctcccaaccgtcgcacgaggagtgaggcgactccagagtttcctcgtagtcgacaagaaagctcctttcaacgcaatactgggaagaccatggctacacgccatgaaagccgtcccatcaacctaccaccaatgcattaaattcccctcggacaaggggctagcagttgtatacggcagccaacgcatctcccgaaaatgctatatgggcagctacaagcttatcaaaaaagctgaccccgtagtactaatgatagaagacaaactcacggaaatgaaaacagtcagatcctctgatccttctcaacacggacctcgaaaatcattgataacacaggtctgcatagacgaatcagatcccacacgatgcgttgggataggtcaggacctcgaccaagcgatacgagaggatctcataacctttctcaaagaaaacaaagacagcttcgcctggtcaagtgcgaacctccgaggaataagcctcgaggtaacctcacacgaactcaacgtcgatccaacctaccgacctataaagctgaaacgtcgcaagctaggtcccgaaagggctaaagctgtgcacgatgaggtcgatcggttgctcaagatcggatcgataagagaagtaaaataccctgactggctcgccaacccggtcgtcgttaaaaagaaaaacgagaagtggagagtatgcatcgactttacggacctgaataaggcatgtcctaaagacagtttcccactcccacatattgaccaactggtcgaagccaccgcgggacacgaactattgtctttcatggacgcattctccgggtacaaccaaatacttatgcgcccagatgaccaagaaaaaacagcttttattactaaccgaggcacctactgttataaagtaatgccctttggtttaaaaaacgttggagctacttaccaaagattggtgaacagaatgtttgccgacatcctaggtaaaatgatggaggtctatatcgacgacatgctgatcaagtcagctcgcgaaaaaaccacgtcccgcaattaagagaatccttcaaaatcctaaacaaattcgagagtaagataaatcccgagaaatgctctttcggagttccctcaggaaaattcctcgcatacctcgcatacctgtacacggtagtctcccgaaccgcgataagcggcgtcctggtgagagaagatcacgaaggacagaaaccgatctaatacgttagtaaaacgttgatagacgctgaaacctgttatccagcaatggaaaaactggcactggccactgagaccatattttaaatcacatcccatcgtagtgatgacgtctcaaccaatcagaaccattctgcacagtccaactcaatcaggtcgacttgcaaaatgggccatagaactaagtgagtacgatatagaatatcgcaccagaaccagcttgaaagcataggtcctagccgattttgtaatcgagctcccgttagcggacctggatggaaccaactccaataagaaatggctcctccacgtcgatggctcctacaaccgacagggatccggagtaggaatacaactcacctcccccaccggggaagttatcgaacaatcgttccgactcggattcaacgcattaaaaaaacgagtctgagtacgaagccctcattgctggcattaagctagctcaaggaatggggatccgcgatatacacgcccatagcgactcccaactcgtcaccagccacttcaacggggaatatgaagctaaagacgagcgcatggaagcgtacctcgaactagtcaaaaccttgacccaacagtttgaatcgttcaaattgaccaggatccccagaggagaaaacacctctacagacgcctttgcagctctcgcctccacgttagatcctttcgttaaaagaattataccggtcgaaggaatagaacacccaagcatcgacctaacggtcaaacacgctgggatcgaaacctcgacaacttgcaactttacgcgagtaactcgaagcaccaccaccgcggctagagccctcgcagcagctgcggaggcaggtgcagcggaggaagagcctgagctcggaacccccgaacaacctgcctcatacgaacctgaaccgtacaacgactggagaatcccaatcatcgattacatcgaacgagggatcacacctcccgacaagtgggagaccagaaaactcaaaacccagagcgcaaggtactgcatcatggaagggagacttatgaaacgcaacgtcgcaggtccctatatggtgtgtacctacgggcaacaaataaaagacctcatgaaaaacatgcacgaggggcaatgtggtagccactatagtggacgtaccctcgccctcataatcaaaaagcaaggctacttctaactaacaatgctagccaattgcatagctcattcactcaggtgcgataaatgccaacgacatgcacctactcttcatcaacctcccgaagaaatgttctcgatatcttctctttacccatttatgaagtggtccatggatgtcgtaggtcccatggaagcctccggtgggaagaagagactaaaaaacctgctggtcatcaccgactattctaccaaatggattgaggctaaagccttccaacaggtaaccgagaaacaagtcgaggacttcctatgggaaaatatcgtatgccgacatggcataccttatgagatcgtcaccgataacgggactaacctcacctcgggaaaaatcaaagcattttgcgacaagtggttgatccgtcttaccacatccaccccccgttacccactaggtaacgaacaggcagaagccgccaacaaaactatacttagcaacatcaagaaaagacttaattccaaaaaatcaatgtggtccgacgtgctccacggagttctctgggcctaccgaactacacctcgtaaatcaacgcaagaaacactgttctctctcgcctatggtttataagcagtaatccctatcgaaaccatagtaccaagcgtgagaaggaccgccagtcttgctaactcggacctgaacacgcaaatgttacaggacaacatggacttcatcgatgaacgcagagatcaggcaatgatccgagttcaaaactatcaacaagctgcagcccgctactataactctaatatcaaaattcggacattcgaagtgggagagctcgtattacgaaaagtgttcagcaacacgagagagctaaacgctggaaaactgggaactaactgggaaggtccctatcgaatcaccgaggtggtacgtgacgacctctataaactcgtaaaagttatcaacggagtacctgagttacggccttggaatgccatgcatctcaagaaataccacgaataggtactcaaaaacaatcgaactacgataaggcttgatcccttggcagggtacgtaggcagctccccccaagagcgcagccaccacttcaatcgaattacaaaagggcttaatcccctaaccaggtatgcaggcagttccctctgcaaatgcaattaccatctcaacccttctatttgaaagacgaaacttcaacaagggaaacagacatcacatcttccatcaacgaagatcagcttctcacctgacagttcaacagttcaatcacccctcggtatcgagcaggtccctactcgatgatcaaacgcctgatcgtcgcttgctttacctctttttgtacttaacaatttcgagataagaataaaagaaaatttttgatactcattatcatttttcgcaaaaacaatcacttacaatcacttccctcctctggtccaagcgatgaatcaggttcctcgccgtcttcttgtcggcttgcaaacccccgatctccatccccatgagcccgatcttcttggcataacctttctcgaggtcttttgaagtgggcagctccattttcagcctctcgatccccgcctgaaatcacaatcaggtcagaatcatcgaatcatcgatgaattatatacaaacaagtcaaaaccaaggtatacctggaacgagacctcgcgttcctgaccagccttcacactcgacgtcagctcccggatgagggtctttctttcttcgagctcactcgccaaggggacctggcttagacgctgctcatacagagcgaccagcttgtttgtggcagctatcgcctgccaaaggcaaaacagaaagttacgactagcataagaatgaaattagaacgaggcatttatcgattattacctggccctccttcaccatcatgtcagcataagccgccgcctcggccatgttcttcactgcaggaacctggcagttcctctttttgatgtggcgaagcaggttcgccaacccagcctcgtcctcaacgatcgggtgatcacggtcgtgaatgtaagaccagtggaaaggcctgcttcccgcggatcttccaccagagttggacgtctgcctcacttcctgagactggtttgaagacctgtccccacctctggagcctcggcctccgccatgggacctgcccgaggatcgcctatcctcggacgcagctgcctccggaatagcaaccgcaggttctatcctctcctctctgggagaggcgaccccctggtcactcacgaccaactcagccgccggatgcacctctggctaggtccgagctctcttcggagaggacggtgcaccgttagaacgaacaactccagatggcccagacacctaagcgacctgattgttatttgactgacttgctgcagcagaggtcccggtattgatctcaagaagcgagggatgagacgctgaggcagatgcgccggagacagctagagtgtttcgagccgcggtcaccgcggccgatagatcactagcccaagcaggagtcccggcgttggctcgttgaacacgaagacttggacacctcattcttctaatgaggggagttctgaagtggagctggagtcaggaggaactgaatagacaaagcacgacatgtgttagctagcagctcgaattgcgcggctgtctcgataactcgtacattaaaaataaaataacagaactcgtacctataggcagataagcctcggagatcggttcaattcgcgggacctcttcgatcggatctagctgtgctgatggaaagacgattgcgggaactgatggagctacgagaactgctggagctacggaaagagcagctacgatgagatctctcgtaaaagttgcccagtcagtctgaccatgtcggagaagggttaacagctcgagttctgtctctaagagagtaacttccatggtccttgctgcaaaccatcaaagaaaaaaaaaaacattagtttcagtactaacgttctgcaaaagcagtcacgaattcgacacaaacaacaaaaaaattaagaggctaaggtctccatctgacccaggttggtagaccaggtccacgttatcctcgagggatcaaaactgccgattgaatgacgatctactctgaagaaaaagtacttagatcgtcaattggtgtctcaacaagccttcaaactgcctaggaccagagatccgagacgagcactgatgtagtatgtcccctggtcgctcctagcattggtcttcacctggtagagctaaagcaggtcgtggcagctgaattctctgtttacttcccgagcccaggtgattaacgccagtacatgaaggacaaagttcgggcacatctggagaaaggcgaggccgagatagtagagcatctcgaggatacacgccagaatcgggaaaaataaggcacatttctcaaagaaattggcataagcgtagcaccaccctatcggcacgttctcaggatgcagcggcggctttgggagtatcattgttacccccaccggaacctggcatctcctccggaggttgaccaggtcgctgttcgtcatcggcgtgcctcctccttgcttggcagcctttttcttctttggcttgtcgactctggttgacggcggacgaattggacccattctgcctaaaattatgacgcgtctttgcactcgcggcggcgacgccgccgacctcgtctcggacgaactctcatcgtcgctgtaactgtggttgcttttattcttggaatcttcgaagtcgctcatctttgggtttcgacagagaaggacgagagagatgaaagaaaacagcaaagagggcagatcgagaaagaggggagtagcagagaaacgaaggagataccaaaagaaaaaagacgagatttttttatctttacaaaacaaaacacggtaaataataaaggaggagagaagttaccttgagagtcgtgtgagttgacgtgacgtcaagtggagaggtgggaagttatttaaagccatcatcaccacaattttcgagattgcagagatctcttctctgcgcctgatctggactgtcagatgcggtacgctgaagagacgctccatctcagttgtccacatcagcagcgacttatctcgcgtatctcctcgaaatctttcagttaaggaatctgaaatcaaatcgtttgttttgttgagtttatcctcaaaaccaactgatcttatcacatctatcatctcatcaagaatatttttgcaatctcacctgacatatatgtccgctcatcgagttcgcctactcactcaatgggctggggggcaaatgttggagctggatttccctccaggaatccatctgcgaaaataccaagccagcccacaaaagcccaccaaacccaccaagtaggggacttacgcagctgatgagcccacatacgcgaatgggtatttgggccagataagcccggtcacctgatgaagggagataagcgaataacaacctaggaactgatgatgagatattcgcggagcggacctgatatctcggaactgccctgccgaatatccaggaggatctccgcagatcccggacagagctaccacgtgcgtagacctatataagggagcaaggacgacttggaagacacattcaattcagcttacattcacacacatacttttacacttgtaatctcctttcacattgtaaaagctttccatttgagaaatgccatgacaaaggccatcaattccctttcataagctggtttgagctgctcgcgtggtgtaaggccatggctaaagtacgccaaagggcgctagctttgcataagaactgctcccactccaactccagaagtatccgtttcgactacaaattgtttggtaaaatcaggtaaaaccaaaataggtgcagatgacatggctttcttcaaattgtcaaacgcttcttgagctgccggagaccaaataaattgatccttgcgaagtaaatctgttaagggctttgccactatcccgtaaccctgaacaaactttcggtaatagcccgttaagcccagaaaacctctcaactgttttatggtgtgtggagtaggccaaagccgcattgcttcagtttttgctgcatcagttgcaacacaattagcagacacaatgtggcccaaatattccacactagacactcccaaagaacacttcttcatgttagcaaacaactggtgctcctccaacaactgcaataccaattttaaatgctccacatgtgcctcaacactatcactaaacaccagaatatcgtcaaagaaaacaagcacaaacttgcgcaagtatggtttgaatatcttattcatgaggccttggaatgtagctggtgcattggtcaaaccaaaaggcatgaccaagaattcataatgaccctccaatgttcgaaaagctgttttttcaatatctgctagcttcattctaatctggtgatatccagagcgtaagtcgagtttcgagtatataacagaaccatgtaactcatccaatagctgattaataaccggaataaggaacttatccggaattgtgaccttgttcaatgctcgatagtcaacacagaagcgacaggaatcatctttcttcttgacaagaagcaccgggcttgaaaatggactgttagtagggcgaattatacccgaactcaacatctctgcaaccattttctccataacctccttccgtgcgtgtgggtacctataaggtttcacaaagatggaggtaacaccaggctgcaaggtaatcgcatgctcttgacaccgtataggtggtaagccagaaggcattgcaaaaacctgtggaaacttgtttaacaactcagtcacagcaggaggaactagagatagagtagctggagggtcacttcccttcagcgcagctaacaatatcctaggacacccaattgagggagctgccacaagagacttcaaggataaaggagactcatgaagggaaaggtcacccttcaaatgtactaacctccctttatacataaacgtccattcctgtaacttccaatccaccaaacatttacccaaggtttccaaccattgtactccgaggattacatcaatacttcccaactccagtgcgacaaagtcaccctgaaatgcaaggtgagacaacccaaaatggacatctctacaagtgccaataccttgtactaggactccattacccaatagcacatccaaacccaactcgctctgcgttttgatgtttaacttggttgttgtagtaggagtaatgaaattgtgagaagcaccgcaatcaatcataaaaatcaccttagttttgccaatccatcccaccaatttagttgttcttggagaatgtaatccaacaaaagagttgaatgataaagttcgcaattcaagttttgtggcaagagtcaacaccagctcctcctctaagcattccaccatattctcttccaaaacttccaactcataaccattcaccactgtcaatacccgcaactccttcataggacattcatggcccctgaaatacttccctttgcatttgaaacaaattcccatactacgcatcgcatccaactctacatcattatgtcgtatacgaggacgagcaaatgacttcggacttgtctctgctggcttactagacgcagaaccagtaggactccacggcggacgagtctgagtcgcagtgaatacaggtcgtattggttgagtaactggttgactaggttctttaaccacttccccacgttctctcaccatcctacaaaacgaactagactctatctttaacattgtagcaatatgatttggtaatcctttaggttctttcatcttgatcacttccttcatatcatgcttcaaccaattgtaaaatattttttccaaatgagaatcatccaaacctgctacctgagatgacaaatcctgaaacttagtgacataagctgccactgtcccgtgttgacggatcgcaaacaaacgattaccaggttcatcatcaatagttccaccaaaatgaatcaacaatcggtctttaaactcttcccaagactgaaactcctgacgtgaaacctcccaattaaaccatttcaacacatcaccctccaaactcaatgacaccaaatccaacctcgcagcatcgctaaaacgacccacgcgaaaaaaactctccacctgcaaaatccaagcataaggatgtggtcttgtaaacaccggcatcttaatcttctccaatagactagatctggtctccaaaggtaacccagttgaccggctctccgtcgcaggcaaatccgtatggacctgacccgaaaatgaccgtcgagaaggctctggatcctccacctgctttccagcccgagcctccaaccgatctaacgtcttcatcaccgatttcaacatctcctccatcgtaaccagcttagtctccgtttgtaccttagcatcacacagaccctgaaacccagaacgtaaatttctcatctgaatataaacagagtcagaagtaacgctatcatcatcaaacatctctgatccttcacgatccatcatgaaacgatgtaacgaaccttatcaccgcaccaatgatagagtttagatctatcgtagagctcaaaacccagaaaatgtaatagactcaaaatcaattgaaagaaagtgtttacaaagcataaacactcggagatgagatcgtttcagcaatatgaattacagaacgataaacaaggtcgatcgcataatgatcgcctcaaaagcacgcaagcttcacaacacacacaacataaaaagcataaacgaaagagatgaacaacggctccttttattgactctcaaaggaaacaatgaaccctttgccttactctttagccaccttcctcttacgatagtaacattgatgaactgtatcataatgcaacatccctgaaacgtggattaagcaatttaaggttggtgggaccttcatcacctagaagacattctatcggagcttcaccaaatgctcgacgaggaaaggcctctggtttatttggaagaggaacctcaaatgttgacaactggtttgaatatagcagcaagcattcagattctggttcacaacaatcatcagacgaacgtaaacatcgaaaagattatcaccaaccatctaaatttgctggtgcagcgaaaggaatcaattttgatgatgaagatgttgaactcgtaggtcttgcagatgcagactctgaggacagattgagtgatatctctgatagttgtcttccagtgggaacataaactgatggatccataagcagtgcagtagagttgactctattccctgaaactgcttagcctcttgaaataatagaacgacctgaagaacgcatgacttctgagaaactcgagaaatcagtgaaaatggggaaaaccgaaccaaaagacaggttagtatcctctactatcacacattaagagaacaatctgaaggcatttacagattcttatatttgttttgttttgggattttaaaagcagaactaatattccatcgaagattccaaagcagaccttgaaaccaccaggcaaaaccagaccgtctcgtatgtcaattgccactagctcttcctctaaggctttaacagataatgtctctatacatcaactctttgacttgtgtcctaaaaaccaaatatgcttgcctctaattacactcatagcagtctctaatcaaagcttacttagatttctatgaagatctcatatgaagtagatgcttgtttcgactcagtagaatctcccgtagatctttagtgccaatttgctcataagtcatctcttgatttgccacaggtgctaaaagaccaacaattagcacttcatcttcagcaaaaccactcaatagaaggcggtgaagacacaagattcatctcgagggcgggaagaagaagatttgtgatgatttaatctgatgttgtttggtagctaattgtgtaactaagcatatcatgtccttttgttcgtcttccttaacataattcaaacaaacaccttaactaagttttcatatctacttaacatttttgaagtacaacttaacccatatttattgggtcgttttttttttttgggttttacctgcttttttgtccggatctttgggccaaatcgatttattctctctctttcggcccaaacctctctttcaaaactttcaaattttgccggtcctgcaaacaagcgcacaaatctcggttagattattcagataatcaatgtagttaacataaaagagattcaattacccgatttgattgaagaatatatactaaatcagtcttaatcacaacaagaatataacctcctaattttggcaatgaattaaaccaaaaattatactctcctatatgcgatcccgtaaaatgagcaaagccaaatataagtcctcctaactacattccttatcttccttctaatattccataacatttaaatcaaataactattcctaattatctaccataacagcttttaaattaaaatttaaacaaatcaaatcaaatttgaaaatatggaatatcctcaaaattccagcgcctatttacttctagactcacaatcgtaacctaatttgttttgtgctatataaacaatcgaaatcttttaccatcaccacacacataccattatctctcaagcaaacagtcgattcacatgtacatgttttcatttcagttttcagcttcagcatttggttgggatgatcacaagcttttgtttcaaacactaatatctggtaaaagaacagattaaaactcaccgtcttaggtgccataagagaagaaaaagtaatggtcttttccggtggaggtccagctctgttgtggctcaaagccgtgatcactaagcagtctccggaggtaacagccttcactcgtcctttaagccatcagttcttcagccttcaatctatataacagaaattttgaaaaaataatatgatttaattatctactcccagtttgaaacaaaagcttgtgattatctatatgattcaaatttataaccatacctcatctgcatcaagcaatgaggttacgattgtgtaatccggtcatccctctcattccaccaagtaccttcacaaataccacatgtaaaactatatatacgagtatgtttaaaagataaagcctttgtgtaatcacaaaaaacattagaatccataccatatcaacggtgatgttccccactggaacctttccatgttttaatttcagtttcttcgaacggtcctgaaagttgaaagttgtgtttgtgtatgaagtttctctagaatagagagagaagagcttgatcactacatgaaatctgccctgaacatagaaacaatataaatcacaacgaagtagaaacttaaaaaaaaatcacatacaatttgatctccaagcaatcagattgatccatcaaggatagacgagagattaagggatataatctcatgattaatttttttaagcattatcaaatcccaaatcacaagtcttttcttaacaaattaaatgtgttagttctttaaaaatgagatgatgagtatttttaagagtgaattggtgtaatagccctattgttgtttaagttaaagggaatgatcaaatgtctgaataccatttcctgaagtatatggacgaaacgcagaaacagaacattgacccatcttttttgagagagagaggaggatcaagaacatttcctaaagacaactacgcaaagcattaatcactataactctttaatcgactctgttgtttctacacctcaaaagatttgtccctcggtcacaataacatttcaaacagaaaaagttgtatccaatggtcacttatttctcaaactttcttctacctcttaactgtttatgactcctaactcttatgtttaattactgcgaattcaaggaaacatcaagtaatcactggcacactttattgatcactgagtttggttatttaaaaacagaacgtacagagaccaagcataatcaaattgtattttaacaagtaaatggcacaagaaggcccttttagccatgctaaaagataacgattcgttcaatacaaaatcctttatgactctcaaattctgaaaaaaacgaatttggaaaactcataattgaagtgcagagaaagcatcgtcaacttcgtcaacctaaaaagagacaagaggacagaggttgagaattgaataccagggcttcacaaactcaaacacaccacattttacacgtattttaagatccaaagaccggaatagaagaaattcgaatcgccatagaatgaagaagaaagaaaaagagaaaacggaaggatggaatcgttgatcacgattaagagaagattttcttcagttttgctcgtcgatttcatcagtcggaggatacgaaagaagagagaattcgcgaaatgagaaaaaaacagaggaaaagaattc

SEQ ID NO: 202 - DNA, 92569 bp, Arabidopsis thaliana
gaattccaagcaatttgcgaggaacttgcacctaccaatccacttgccacctacctaccaatttttattttaaacgtgtgtacctaactattccttgcaattccgtcgtaaatcatgctatgaaaacattcgtcgtaagttcgttgcaaatttgctacggagctgcaaagaacataattcattgccatttcacgaaggttcatcgcaaattggcgacgaccgtgtccattgcaaatttgcgacaattttacgatagtggcggagcgcctagcaatatacttgccatattgtcgcaaatttgcgaggaaacttttcttttgcaaatatctatcgtaaaatgtctgttttcttgtagcatgcaatgtttagcagaactctaaaaaagtattcatcttccattttccttggaatatagtgaatacgacccaaagaaaaacggttggatctctttttaaacgccttaatttctttatcccatgtgaaataggcaggaatttgagcatataaacaatatctggcacgcttaccattccttccaaccgcattttttctattcaaagtgagacaagccataaactgagagtcttcattagctaatcgttctagaacatcttcaatattagcatgtagatcaaaataagctggttgttttgcttctaaatgagaagataatttctaaacaggagttgatctatgttgaattggatatttaaatatcctccaaatagtttcggatgctgaaacgtatctgcaaataatttatgctggttgacatgaattagtgattcaatgttataccaaaagaatttattaactaaattacaaagtaattagctaacttgcaatcgaaccaatcttttatctcgttcttcttctcagttgaaccttgttcttgcccaggagttttggactccccacctgtagtctgcttaacaggctcaacaataaagaaaactttgtctggtcctttgttgatatacttaaatagatattttatggagccattttggttacaccattccacattgatatgaacattattgatataaccctatttttaccggttttagttatgttttaggtataggttttagagtctatttgttatttgtagagtcttttctagtccttttcaggtctttacatgtttaggattcatttggagataatggagcattctggaggaaaacagagaatttatgttgccaaagaaatccagagactaacaagcgcgtaggtgtcgagcgacaccaatacctgacggcaatttgaaggcgcaatttatttgaaggcgcaacttattgaagttttgaagatttctatattcggcccagaactttcccttatttctaaagaaggctcatcacgtttttaggtcatatatatagttttaaaggtcattgtttagacctaagtttggagaagctattccccttatctcttttatttttgggagcaaaagcctgtggagactccctttagagacctattgactattgatttcctattctgattatgacttgtgtttctttgatcatctctgagtaatccacttgttaggtttagggttcctcattagggattcatatggtttagtagatccccccccttcccctggataggttatctgtagaatgcttcatctttaattattcttaatgctagttctagagtaattaacactgtattttactcattctaggcatgtatttatcattatttagcttagtgatcactcattgttttatatcattttgcatcacatttaacttattttgcacacttatgtatttaggatcatcttgcatacatattgcatgttttggtgtgttttcaggtgtagaaggagcttacaaggaatctcaaccctctactctatcaaaccaggagggaagcagcatagcatatcactcaaccagttactcgatccaggcaggtacagaggaggcagcagaaactactcgaccccctactcgatcctctactcgaccagttactcgatcaagggcaacccattccacaagacttgttgatcgttcaaatcgtttttggataaagttgtttatcttgtttagatctacattttggtatgatttcagtaatttctgggtttgtgttcttagttatgttgcttgagtagtgattagggttcttgaggatggattagattagggtaatctccaggttagtcaggtggttaagattaggttggatcccttctggattcgttggcccctatgcgtttttcactagctaatgttagaattcgaccctagatatccaacgtccaaaagacgttcaaatggatgcctaatttacgaattccaagagatttgtagattctagcccaagaggttggatgtttagactttttattgacttttgtatattgttgcttaagcctaccttgctatgtttcatcaacgagagttgagattaggaagtagtaaggttatgaggatctctgtcacgagagtggattgatctggttatgaatctatcgtctagggtatttgtctttcgcatgttagccacctgatgaaccctagagttgcccttatcaatgaatccatccttagaacttatattcttcttagatttatttgtattcaccccctgattgcacttttatttacctgttatttcattcacttgttaagctacttgttattgtatttttgttcttaaatttgtcatatgatggttatactagacccaatgatcgagtagggcacttaaattatcattttagttgtttgaatcttgatttaggattgttactagaaacccaggattattataatttggcttgacttagttgcttctttacatatcttgattgctagcaataacagtggactggattgacaacccctatagcagcaaggacatgtttgtgtttaaggggaattgaactgaacacaccacacttcaacatatagctaggcgtaaaaacctagttatcaatttggcgcagttgccaattcattgttgcattgttacattcaagatatcagaaaaagttaagatcaagttcttttacattactcaagttactaactcatctttttgtctgcttgtttttgtggtataagtactactctttgtgcatgcaaactcggtccaaaggttctgcacacctactacctttcaaagacagaattgacagaataactcgtgagttacaagaaaccaaagcaaaagcagactatgatcaacaaagaccagttgctatggatcaactgaacagactagttgatatacaaaaccaacctaatattgaacaaccaagaaacattggtgctggtgatgccccaagaaatcaacactaaagacaagggatagtgccaccaccagttcagaacaacaactttgaaatcaagagtggtctcatctccatgatccaaggaaataaatttcatggcttgcctatggaagatcccctagacaatcttgatagcttagatagactatgtagtctcaccaaggtcactggtgtcacttaagatgggttaaagctcagactatttcccttctctttgggagacaaggcacaccattgggaaaagactctgcctctagagtccatcaactcatgggatgattgtaagaaagcttttcttgtcaagttcttctttaatgcttgcacagctagattgaggaacgagatctcgggcttcacccagaaaaacaatgaaactttctgtgaagcttgggagaggtttaaaagctacacaacgcagtgcccccatcacagttttaagaaagcttcattattgagtacactttacagaggagctttaccaaagattagaatgctactcgacacaccctcaaatgtaaacttcttgaacaaggatgtagtagaaggatgggagttagtcgaaaatctaacacaatctgatgggtgctacaatgaagactatgatcgctcagtgagaggaactggagaatctgaagatagacagaggaaggatatcaaggtcctgaatgaaaagctagacaaactgttgttagcttagaagaagcagatacagtacatcactaatgaagagtatttccaaatgtaagaagggggaatgatcaacctgaagagctctgctacattcagaaccaaggaaggttcaacaagggctacatcaattacaagcccaatccaaacctctcctacagaagcactaatgtagctaactcccaagatcaagtgtatccaccacaatagaatcagtctaagccatttgttcagtataaccaaggttatgtccataaacagcagtacaatggaggataccaacagcagaatccaccaccagggttcactcaacaaccacaacaagcaccgacagcataagatcctgaaatcaagctacttattcaacagatcattcaaggacaagctactggagctatggcttttcacaagacgatagctgaactacacaacaagatatattgttcttacaacgatctaatgtcaagtttgaagctttgaattccaaattcaagtatgtggagagtcagtttgtatccacctcttctccgaagcatccagaacaacttccaagaaaagtagttcagaatcctaaggactatgctactgctaatgctatcaccatccaacaagaagatgagtctacaccaagtcattagactcccaatactgaggacaatatgattcaagaaggggggtattcaactcaaattgctgcacctgccatccagcaattcagctggactatagagcacacacctttgattggtactcaccattctgagaagaatttcaaagtagaaaaacccaagtaggatcagaatcatgagatgattagtagttttatcactcaagaaacttacaagaagaaagtcatccaagaaaagctatatgatcctagttcattcactctgccatcctccctaggaccattgacattcgataggtgcctttgtaatttaggagcatttgttagccttatgcctctctttacaactaaaaggctagggatcatggaatacaagttctgaaacctagcttcactcttagctgatggttctgttgcacacccccatggtttaatagaagatcttcctgtcagaataggaaatgttgagacacctatagactttgtagtgttggataaggatgaagagggaaaggatcccctgatactaggaagacctttcttagcctcaacaggagaagtcatagatgtcaagaatggaaagataaatctgaaccacaaaaagacatcaagatgaaatttgacatcagcaaagcttcagggatatcaacaacaggatgtcagaattttgggatccaggatatggatgttgatgaagaaacataagctggaatcccatcaagatttaactatacttctcaactgagcaagctatagacaaattttgaccacaagaagagagcaatagaaaggttagctcagactaaagacccttcggaggatgactggcaggagatgagaaaaatatttaaatggaaaagtaaaatcatagaggggttgtcttcaagagtaatgaagctaaaagatcaactatgggcttttgaaaaaagagttaataagtattcaatgaacattgacccagataagatggccactacactagctatcaaagaggaaaatgagttcacaacataagagtttgcacgagatgatcagaaaagagtttatgttgaggaaagaaacttagaggatgagttgttgagagaggagggaatccatattccgacttattctccaggagtgcctaaactgccccgtaaaccctctgctaaggaagaacacttgacacttgactctattactagagaacttctggaactcaggatagagtaccaagcttaagaggataccattgggaagttaacctacaagatgaaagaactgaaccatgcaatcttggaacttcaagaaatggttaaaagttaccccggttttgaaattgagcattggtcaaaagaacctggttcagaagaagaagactactctactgatcataaagaagtttattttgaagaaaaatcaaatgagtactcatcattacatatgtcaagagaggatggagtgtatggttcaagcattgaagattcaaccactaaagatgaggacttctcagttcctcctttcaacctttttttgactaagctttgtaagagtcaagcttagtgacttaaaacaagctcacttgggaggaagtcacatgtttacctatgtatataactttctatttccttgttatttttgatgttttcgtttaagtgtgtcaggtttatttcattgactctgaggaagtcaatggtcgagtaaattcaaaccaagtcacgaacaatctcaaccaatgatcgagtaaaatgaagaggagtgttctcagccattggattgaatgaccaaatgagagaaatcatccccaccgtttgatcgagtgatcaaaagcaaagcattctccatcgtttgatcgagtattgtgcatttcaaaaggatgctcgaccatttactcgagcttaaattatttggagaccaaggcataagtcgcgtgaccccacttgttccccctttatttcactactcgatggacaaaccatttacccatgccccgcattatttacaactcgcttttctatcccttcaaaaagaaacaaaaaaccatcctcctccactcattgaaatcgcaaaaccatccttaaaacagtctctctctttcatcctctcatttcgacattcctttctatctcgcaccaaacttcgttacaaactctccctttcactcctaaagaattcgttctcatcttcaccatacctcaccaaagttactcgatcattcccaaatccatcctcaaatattcaaccggtttttaagctcaaaactccatcaccaaataacaaaatcctttccactttgatacctcttggagagttgttcttgattttcctgtagaagctcaccaccaaaatccatggattcaagaagaaagagttcatctcgggctagaagatcctctatttataacaaagaagttgcggcgattgacatgagtggcatgactaaacgccaaattcgccaagctctccatgctcaaaggtcaagctcgattcaaggggggagctctagtcgctaaaccatgcaaagagaagaagtagctacgggcaagaggattcttgaggctgaagaagcggtttctgaagaagaggttgagatcatcagggatgatgcaccagcccctgtggggagaagaaaccgtccaagaaggaagagagaaccaaccccaagcgagtactatcaattcttgaaggaattgaagtttgagggaactagataccctcataaggaaacgatgcaagagcttggtagggatgtggaatacctaatggaattggccaatcttgcaacgtttatgtgctgccaatttgggggatttaaagaggagagctgccaactccttgcaatcctcaaggttcactttcatgttgatgattcggagaaggaagaaagaggaggtctcggttacatcactttcaaggttaaaggtgtcaagtatgccctagatatcagccaccttgatactatttttgggaatccgccaagactatgaccaagacgagctactctctctttgtgcaaaaatcgccgtccaaagccctacttgcccaccaagagaaagagtcattcgattcaaagtctcgtgataaggtacctccaccaatgcatcgccaacactctctttccaaattagactaccggatttgttggtgaaggagagctatgcattatcgatcaagctttagtcttcattctgagagagaccaaggatggaacgaagatggcgggtgacagagcagacacttagctgactgttgttcttttagaccacctaatgagctatagagagtatgctacaaccatccatcgatcggggattcggggaagtttttgtgttggtggtctctgaacaccaatcctagtagctggcggggatacacttgggaacccctgatgtgcaccctaagtacctcgacctcgattatctcaggggaaaggattatcttgacaagaagactccgtcggatcactacatcttcaagttcaaccatccggagtttggaccttctttgttacccttaccttgcgagaaccgaacatcagttaggacaaggcgcaacagtaacttcatgccatctccctcagccctgaacattgacattggaggagctagagaagaggaacaagagtatactcaagctgactatgagcaccaagagtattatcctactgagtttgagcaacaagtcaaattcgagcaacatagcgaacaacctgagaaagagaccaacgagtttgagcaagctcactctgaagaaggtgctgatcaaggtagagatgagatagaggaagttcacaagaagctcggtgtgcttgaagagcttgggaatcttcacagcaaaacaatgaagggtttcaaaaagaagatgaaaaccatgaagaagtcgctgaagggtatggctgctaaaataaaagacttcctgaacaagccaaggcccccgtctcccactcccgaagtaagaagaagcggttccacgagctcggctgcaaggagggccgaaaggatcaatcaacctcgagcttcattatttgagcctcgggaagtatctccgagttgagagagccaaggagtagggagagaagagcatccacacgctcgaccaactactcgatcggacaggacaagcaaaaccctcccgcctcaccatcagtccttgcttatactcaagagagtatggacgatttcgtctccgtctacttcacctaattactgaggtaacaccaccaccaccattgtctataccatagctttttattctctttgtttgttatgtgttttggtcttgaattctctttcagatttttattacacaagagactgtgtaatttaagtttggaggagggttcaagacatgtttgacattgtgttctcttttcttatttcaaattttgcatcatataaggcatagaaaaaactataaaaatttgaatttttttcagaaaatgatttcacaaaaaagagagtgtcatgtagatgcatttcgttttaggattgtatatagagtgtttacatttaggattgctcatttgcataggggataatgatgatttcaaacctttgagcacgtaaatttagtgaagtaagttcaatgcccaggttgttagttctctgttgcatgaccgattgtatctctgaaataagactgcaccctgtgatatagctcaaattgccctcagtaggttttaaactttgtgtaatctccgtcattaggtttttaactaacaatcaaatggtaatttccaccttgcaaatgaaacatcgcttgccctctacctttaggcatatacttatctaccttgccaccaagagaggtcattacaaaaaccatattaaaaattcttacattttctctagagagtacattgatatggttcaaattacctagaactactctctcaaataagagatcaaatgcagtattttaggatcaaattcacggagttcttttgttcaaacaatgagttaaatatcgagattaagctagcagggtaatattaaaaataaaagagaacaaagtaaaaagacagcagattgattgtgttgtgaacgatttaataaagagctaggaacaggttattctcaggaaactattggttagtagatctaatgaaagctaggttgttatcgaaccattcttaaactcaaactcgaattatggaataacaagtgggcgtgccgcgaaactccctatatctatagctaataataaccggagaagccgagaaactatcaacctaaatatgcattcttaacgagttcaattgttcatcttagtagataggccgatttctattacacacctataaaccagactcatcaaataatatatccaactacagatacctatggtgggcatatctattgtctggattcaagatctagttaattactctagatctagcattaagcataatttaagatgaagaattctacagataacctagcaaagagggcaatctactaaaccatatgaatccctaatgagaaaccctattcctaacaagcaaactactcacacatattgaatgaagcaaacaacatattcaagtgtgaaagcataaacacagtaaatagagaaggggaaagaagggatctcttcactgtattaagatctgaatgaaactctgaaaacaatcgatgaatagcttatgtctctcagtaacatggttttgcaaaagcttgataaaagacttgataaaagaaacttaggtctaaaaacaatatatatagaccctaaaaacgtccacggactaataatgcaaataatgaaatcttctagggcaaacttgagctcttgtaaactcgaaagcgtctagggtttttgctgggccgaaactggtgtcgatcgacaccaagagtgtgtcgatcgacactcctcgctaattccagaaccaaaatcgtccttatcttccttttccttagcttttgctccaaaatgtctccttatctccattgttgtcccattgcataaaatacctgaaaagaaactaaaaagactcgagaaataacacaaaaactcaaaatcctatacctaaaacttggataaaatcagtaaaaatcgggttatatcatacatgctttcctgagagaaggtccttgataagctttggagactccttgaatagtggcagtttgacacttccttgtccacaacaaagctcgaaaacaggttctgtttttggttaatgtttttctaatacatctatcaaccatatcaaagcacaacaatacttacacatgtaagtaggaccaccgtgatcaagataaagctggaacaatcaagtcaagcaaatttgggttgacatttcaataactaacataaacttaagacaatgatttatataaataacaaacaataaatattttacttaagacaatgatttttgaagctggaacaatcaagtcaaataaatattttcttactcggattagtagcagatgttgatgctttctcgaagtctggttgtcaattttgtatatgagaaaactatgttgatgatcatgttgtttgtttttggttgcttctacatgaataaggatgactaagttctttccttgtaagaaatgaaaaatttagttttagattagtcatgattatatttatcaaagttctacaatacataaagatatagaactaaaaccaacatattcagtaactaacatgtgttcctcgtatatgtagtagctggtgtcatcgatgcatctctatatcggggagatccgtggagtttgtttgtggggaggtcataaaatggaatggtagattttgtttgatgttgccgcgagttttctttgtacatcgaggtaagtcatgatctttctaatgaacctgtcattagtcaaagttttagtaaataactttggcagcctcttgatgtcttgtaaaagctgataaaatataaaagatggatcctgttaaggttgaaaatgacgtttccatataaatatggtatagaatttgcaaacccaaaatgctgagtagaagtagttgcttcattattatcatcacaacagaatggcaaattagtgatatctttgaaaactctgttgaaggctgatctaagatgaacataaccaataggaacaccaccaatagtattagtaaaaaagaaaatgttaatctatttatacgttgtagacaatcaaatacattgacaatataaacaaataagaaaacatgatgtatagttccctacaaacttaccagtaacgtcctgaacacgcatatatagttccctacaaactcaaggtaaatagggaaaataaagtctatacaatcatatttctttatttctgacataggccaaacggaggtatcccacttaaacttgatatgtagagggttccaagaatatttgactgtgttggtggagcaaatgacacaaaaataagagatgtgataccagaaaccctctttgagaacacgcctaaaattgtaaagatagttatcttttggaacggtagcagtgattctgtgatgttgctaagtagcccaaggaaaaaccaaagatcagagcagataaaaactggtagaagaatccacatgcacattaagaaagaatcgatgataaagaactctacttcatatcataaaaatcttttcatcaaccaaaatcattgttataacatcatcataaaatgttggaggatgatcccagatacataggagtttcacgtaaacactccaatgagtcgagttcacattcaaatctatgagtttgtgaataggcgccataagttacccacaagagaatttttaggtttaggagaaaaacaatggttaagtgtatatatatatatatacatataaggtgagtaatatctcaaaagatgcaatgatggcagtttatttaaaaagggaaatataaatcgtttcaaggttaaaaataataataaaaaatatagtatgattatcgaaaaatgatgttggcgtataattatattccaagtttaaacgtcttggaccatatatctaatgatttcaacagcaacaattacctaatatctagcaagttataggtttaatcattgtgagtgaatatatagatcaatttatagtaatataaatctctatatcaaaataaaactttattagttaggtacatatatacactctatatataagttacaaattgtatatatctctatataagatagtaatatacaataacacaaaaaaaaattttactctgttacaggaatacattcaagtggtgcattaaaggtctgttaaaagtggaagacatgatgttgcagagtcattggtaagtttcatttggactcttaagttattcatgagtggcagcttggattatatatctatgattttgaattagaaagagtaaaaactaattgcttaatagaatctttaatagataaacttaattattaaaaagctgaaacataattcacaacatgaaatcgaagaacttagaaaaaagatgtcttaacttcaaaacattaaaacctaacaaaaaaacagagcaaaaagccacaaagtgttcaagaaaccgctgtttttaataaatagagataagtagaactacttcttctcaactttgaccctaaccttgaccatgttccatgaattatccttcttaacttcttgcttcaccacgtcgacatcttcaactttgagttttttcttatctttatcaactgcaacaattattgctttcttggcttggaatagtgcttctttggaatcaaccacttccacatccacggcaataccttggtcttcattctctgagatagaattttccaagtctaatggtacaacacacatcttcttcgaacttaaagaacctttagagagccactcaattctcgagcgtacacacgctttgaagatggagtagtagagtctggcgtaccattaccattctctaacatgagtgacacctgcaaaatataaaaaattacaaaccattatatttaaaaattagattctgaaatagaattgtgcatatagatgagtacattacctgatcgccactaacaattgatgacgagttcacatgttcagcagaatcctctaataattgttcttcgagtagtccatcatttaaaagcacctttgaaaccttgtagatttcttttccatcgaagatattctctttctcgacccacaccaaaaaaagaaatgtctttccaatcagattctttacaggattaggaaggttatgtggatcctcaatctgcaacagggtaatataatatagatttaaagttagctatatatcactttacaacaagtacctaactaataacaaaaacatacctcatcaacagatccattaagtacaaaggttgtagactcgccaacgatctcagagcaaattgaatcaaacaatagcaatttggcttcaccaatgttatccataacctttgcataaatcatgactgagttgaatgtaatagcttactctataaatatttttttaatcatatttacctagataccgcatttgtgacaacagactttcatgtgtcacaccagaatctaggcttcttcctcttgttgttaacaccattaacaccagcatgtatatgattgaccttcttattacatgtcttacagctgatgtaataccaagcccaatctgtatctattacatagattgtgccaataactctaactttgccaacctatataaaatttgatatgatattagttatagtcttattgtgttgaagaaacaaagtgaaaatttaaaacaaacctgcattgagttgatctgatctgcaatgttattccttgaaaactcattgtaatcaatctttttaaccgccaccatttcaaaccgtgggacttgcacgaaaaatgcaaatagtactatcagctggtagactgcacaagtcaaactttaggtcaatagcacattaaaaaggcaaatcaaaaatatcatgtgttgtcagaagaagcatttacgattgaccgaaagcttcaacatcaaggaattcaggattgacatgaacttgagatgcatcaaaagagttggataaacttttcacacctgcttattcgtaaaacataagttcctcttttgatgatagcgcttagaagaaaaaagatcaatcatattatatagaaactaaaccactcaccaaccaaaatatgagggttaagctcaccactctggattttggaaaacttagccaaagacagaaagttggtatcagagatagactcacaacccatcacctcagttctagcctgaaaccccatcttgtaaagatggtttgtgggacgaaactggccagacgcataggtaagaccaaaagtctctattaatattcattctccaacaataagcttgtgaacaaacttagaaaccaattccttcttcacagtagcatgcatttttttcccttatgatcaatatagtaacaatatatgttagctggaatgcaatacataaatggaaatagctactaataataaatcttacatattgatcggagatgaccatctcaatggtttcactggtgttgcgtgagtacttattccaggagtgaaggatcttgacctggaccctcgatgtgtttttctaaggcctaatgtctttgaggtaagcgaaagtagttgccatttctcaaataacaaagttgtagaagtagagaaatgtatagctagtttgatgtgttggtgatgatgaaatgagcaaccttatttatagtgggtgcactaagttagtaaacctaaattttcacaccgtataaaagattctaagcgcagctcaatagaaacagacaatttggaatggttttaaaagaggaatatgcatgagtatttagattttgctttgattctcaagcaaaattttggagatattctagctaatgtgattttttctggcgacattttaacggcataacataaccatttgaaaattttaattgtgctatgtttgaaacatgaaactgaattgctcggaattaggaatggcggcagttgatgatgcgattcaaatcctaaaatatctttggaaggtaagattgtcttacatttaaattagatggagaatatattagttggtaaagatttataacacaatatctatattaggaagatgattgagtatgaatgaagtatcttctcaaaatatatttaggtattgcaaatttaagttcagctagtatattgtgtgtttgtttggggtaaccaaaataaatgcatctctaatcactgaatttattatgtaactgataagtaactaaagatatggttagttatgattgattatcgaaattaataattaggaaataagcattcattaatttcgtcgagttttaagggtgtgcttatgcaatatttttaagtgctacttaataatatcgattttttagtaaggatttaatgcaatatttgaattttggacgataaatttgttgattgttctaatgaaaatatcttgtctgattaaatttgtaaggactaatcatacaattaggaaattgataaaagatttttcaacccaaaatccttactaaaaatgtatatatagatatcagatagaggctaatctttaacctcggtccatatgtccacgaaataaaagttctattcgtgtttctccctattagagtgtatatagcttgttaaccttggtttaatttcttgtatagttcggtgagcatagtagtttagtttcacttgtatttaaccttaatttgtatctcattttatatttgaatggagaaaagctaatatggtatcagagcaaatattaaattcttcattcaacttccgctgatcttcatcgattcatcaaagcgatcgaacatgttcttcggattttaattcaaacttgcgattcagattttttttccctcttcgatcagttcgttttataataacgattgatctttgttcttctctttcctcgattgatcgatttcaatggccgattcatctcttttctttcggttctattgattgtcaactgatctcgagcttgaagaacttttatcaccgatcgattcatcaatttcgatttggtttcatctatttcactattgattcagatttcttatcgagcatgatctcctcgaagcgagctccattttctttgaatcaagctttaatccctttatttgttagcttggtttcttagatttgagttcttattcgtttgtttgaagcgtatcatcatctcggatcgtcttctatcttttgaatttgcttctggttattccgccagatttatgctccattttgtctgtttttattcttttatggatctagtactacgtcgattttgttgaatttatatggttgtttcacagttgttgacgctctagatcatgtttgttccgctgcaagaagcttgttgatatgattttaattgatccacatgtttcattggtttatcactgtgtattgatgtcgtttgcacttgttttatgattactattgtgatggaaccatttcttagttttgttgagtctatggctccaccaggagagatttttgtcgatggcaatttatgtggactatatccatggttgaaatttgttgattgagccaatgttttcgttctgatttctgctgcgaccaccagatttgcaatttaatgtggttagtccatgttttctgactttgctttttgagatatttgatatgtagatatgttcatcgataggagagctaaagttagaaaaatttaagagattttttcatatggaatcgataaaagctgatttgacttctttgaagctaattgtcatggatatatgcattcagtctcccttcgtttgtgagacaaagtttatgaggttgatgaactttgaaattttgtgagtgatacctgctcatgtagctgctcatattgaaggctctcatgttactacaagggctactatgttttgtcaattaagcctctatgtctagacaattatgattcagtttctttggttttgtatgatctctattgatatgcaactcaccattgccacaattgattttggctgttttatggcaaggtaattgttggtttcaaggtttcagagaatgagctaaaaagatatgcttcatcaacatttgtttcaagacagtgggagttaatagtgatgtttttgaactggttatgctgcaccgagacgggtacggggacggggacgaaaaacggcatatttaaaatttgtggatacgcggacggcatcgggacgacaataacaatagtattaaaaatatcgatagatccatagtataaagaaagtaactcataaatcctaacataaaagaaatttgagtataaaatattaaagaataataaaaataagctactcattgatcaattcattttcaaattaaggctcatctaatgaaagagccgcaaactccaagaagccgagatcctccctagtatcatatgtatctccaccaacatcccacatcttgattttttcttcttcatattgaccacaatttcttgataaaagacgtagattgttgtggatgtacaccaaatcttcagctcggcttggatttaacttatttcttctaagtgaatgaatgaagttgtaagtactccaattgtgctcagcacaagaagatgaactaggttgacaaagtatcttcaaagccaaagtctggagatatggagtttcagcaccaaagttagcctaccaaatcttaggttccatagtactcatcgctacaatgcatgataaatctgcaaaaacaccactcctcatcgagaataatgcatacttatccagaactcttctatgctcatcagcattaggaaacatcttcgaaaacacttaattcttgcatgagagatttcagtatctctatgaggagcttttctcttaagatcctcacttagccatgcatcactataaaatctgcaactatacaatatattatatgtttgcaaggaaattaaaataaaaaataaaatatatagttttagttttacctacgatttaaagggtgaggtagacaatgtaaaggagtattattcttcgtccaccgagccactaagatctcataaacaacatcatagaagtcactatgtacagtcattggacgtttttatttcttgaagatctcaaacttcaccttctcaatcatggaatccaacatctcatataccaagtgaagacattccttgtcagtgtcacagaatctaaacatgtcatatatgggtcttgtgaaatcaattatataaaacactttttcccaccattcatcattcacaatcttctctttaaccaacattgctttcccccaactatcctctttataagtagaccactcctcacttatgatcatagcttgaaggcctcttttgataagctttaatctcttaagcatcacaataatggaagcaaaacgagtatcgaggaccgaaagcaacttgagaggagagaacttactgaaaattgacagtctcatgttttggttcatgatgaaatgttttattgcgagcgcatcttcatgaacttctgttatccaattgcatccccttccacattctttgctgcacaaatattctttaaaacaagattatgggtatgcacaacacatggagtccaatagatatgaggatacgtgcactcaataatctctccggccgccttacaatttgttgcattaacagtgatgatttgcgcaacgttttgatgacccacttcattcaaaacatctttcatcaaatcagaaatgaagaatttatctttcacttcaccaaaacaattcacggccttgagaaacaaaggaccattttcagaagtagcaaagaaattgatcaaaggttttctcgtaggatcactccaaccatctgacacaatactcacccctttttctttccatgataacttaactggttctagtaactgctcaacatgatctctctctttgtgtaacaaagttgttcgcagcttattataaccaggaagcacataatcatcaattttgttgtcagtagcaaactgaaaggacctttgataatgcggatttcctgcaagattaaatggtagtcctcctgtgtaaaacattcttgcaatttcctgatccaactgatctctgacctcaataccaaatgctctttcaagaggggagatgctagactttctcttcttaaaggcagaagaagctacagaacttgtttcccaaggcaaaggaaccgctctagctccagactcgcttttcttcttctcaaactcgtcttctaacctttgcatattgagcctttcacacctagttactttcttacaaggagcaatacccgcattttttattccaagcaaatttgctctcactctcgaataagagccgctcttggtttcaccacatatgttacacttaaaagaccaagatcttccttttgctccttgttttgttttcttggtcatgtaagtccataatggagcttcaccactttcattagacccaccaccaatatcatcatcattattttcagaagccatgatatcggctgcaagcaatatgaaaagcaaattattaagacgattccataatctgtattcgaccgatatgaaacagtccaaccaaagctatttgtcaaacaaagattaaacaaatttcttaatctcttaagcatcacgtcgctatttgttagtcaaccaaccgtactcgactaataacttgtattaaaaagagattttaatcatattaaaaacttagagatgagtcatgatataccttttatagaaatctactttccagagggtgtgaaaggagagaagtcgagaagatttagtttagatgaaaaaaaaaacaacgggctcttgtatattaagggagattaaacgtttcttaaaccctaattacacaaagtttaagaatatattttccttttcttttataatttatagaagaaaaaaaagttatattttcttttttggggtagaaacatttctgaaacgtccctcaaacggttcggcgccgtccccaaaagctgctatcgtccccaagtttgagaaacgtccccgatctaaaacgtttccgatacgggatacgtcaccttttagccgtccccgtgcttcttagattcacatatatacctcattatgttgactatttcatgcacaagtgtatgaagatgtccatttgttatacaatgaagaagccaaatctgttgaagttattctttattggaatcaaaagttgtagattatttttgttgctacatggtgatggtagtcttgttagtcttaaggcaaaagcatgtagatgattctggtcattgaagcacatttgtctttagatcactaacaagaccgccagaggacattgtgatttcagttgattttatggtttaaacctttcccaattttcatggagttttcaaatccaagataaaaggatcttgagggggagtattagagtgtatataattggtttcccttggtaaaatcacttaaatagttcagttagcatagtggtttaggttcacttgtatttgaggagatatgtgtagatgatattgaaaagtacattcccaattttgtttatgtttcttcttcaagagtaaataaaacaatctagtgagttatcttatgatttgtttaagttattgattttgtgtctatgagataatggcttgagagtagtaccgtcaacaaacatagtgatctagataaaaccggatagaaaacgacagataaccatccaaaacatgtgaattgagtgacccaaacggaccggtttatcccggttcaataaagacattagggcttatacagtagaaacactataaattaatactcgatcaattaataaacacgataaattaataaattatgccggtcccaagtcgggtcaatgtaaaaattaaccaaaaatatcgataagataataagataatatttttttttgaaatctctatgtaacaatatggtcccaataatatcataaattaataaccacaaattttaagcatactttaagataatttaatataatatgaatctagcgttgtttgtcttttcttaaaatttgaatcttgttaaagtccatctctaattttctttgttgcatcaaaaacttctggtgttgtcttctcgatatgtatcaaaaagttgtgaagagttctaggcgcgataattgcttccttacgtgtcactatttccaaaagtttcacattatcgtcttcaatttattcaccaacattatagacagaaatcacaatttcttctcaaaactctttgagtatgcttcattttcacccggataatcgagtatgctattgacttttattatattctgaaagaatatagtgttgtattttgattaaatatttctataaattaatatctataaattaataaaatctcatggtcccaacattattaatttatagagagattttacaaatacagtaaaacctctataaattaataatgtcgggaccaagaaaatttattaatttagagaggtattaatttatcgataaattattaattattaatttatggagagattttacaaagtttgtaattgtttacaaaaatttgatctaaaaggtagtttctctatacaatcaataatttttctaaaaatctattacaagtagataaccattattaggtttagaaaaaaaaaaaaaaaaacatttatacgtagtaaaagtattagaattgaattttacaaaaaattaatataaattgaagaaaaacaatactaaaatcatattttactaagttttacataatatatattcataaatttatagattttttttttttttttttgtcaaacaagacatgtattcattcaatcatattccaaaagggcaagtttacaaagtctgcaaggatgaaaagggttacaaagatcttagaaaaacataatctagctacataggtcgataagtagattggataggccgatgagagtcggagacagaggcaaacaagccacataccacaaacgacttcaaagtgtgtcaaagacacgtccacgaacaagtcggagaattatgagatagtcactatcaaacaatgataaaatgacgttgagaaagagtcctgtacctctgtgttcgtcgacgcaaaacgcagcgaggacattgggacaaagggttgaatatcctgatagatatagataaattcgggtatgctcttgagttcaaaaaccattaggatcgaagaacagagtttggagaaggttgggtaatcaccgctcgtttgatgcgggatcataatgcccttcttctgcaatcttgtaaattcaatagggagatctctgaagatgctaaaaaacaatagcaaaaggaagggttcgataaataggcgcagcagagatgacgatttgaagaagtgtcgggaatcaccgctccttggaggcgggatcataatgccgctcttcttccatcgtcgattttcatgaagaggatccttaaagtcgttggttagcacttgatgaaacttcagattgagagggaatggagatgaaggattgaacaaactccagtgaaagtcggtcttcttcaatccgaggcttttggagtggtggttaaacccaatatttccaattctgaacagaggctgtgaatacaattcgggatcgcaaaggaaagttcgagtagctctatatgagagcatgatccgacacgatgaggtaacggaggttgtaatgggcttaaggtcggttgacggcttaaggtaagaaacccgagaatatccaggacaaaagttaccttgccaaaaggagatcaacaagtaaatcttttcaaagaacaaggccaaaagtgagattgacgcgaaggttttaacacgacatacacaaaaccaaaacatcgaaaatgctacacctctctggtggacgccttggccacacagaacagagaaacagagcaacaatcagactgaaattggtaaaggggaataaagaacagacctgggccaatcaaaagagaaagttgggccattgcaattgggagtgggccggtagaaaggtaatgggctcaaggatgggaaaaggctcaataactgaaaccctagttgaggctcgtttgggtagaggatggagaaggtacggttggtctgaggcggcgaatagaggatctgaattgcgctggtcgctgccggtgggagcgagatcgccggtagtaatgtttctgagaccatagacaacgtattgatactttctacaccaaatctctaaaacgttcatgaatctgtgaagttttttgtgttacctactctgtcttatatcatgcgattgttgtttgttctgtttcaggttaagaacttaattgagacatgcatttacaagtacatgagtttggaagaaacggagacatatgtggaggacaatcacaagattagtcaccatctcaccaaaccaagtttgtattttataatctctgctttgatgtgattctgtgcttgtttataaggaatttgattttgtttctttattagtatgggagcagcttcagaaagagagtccagagtttttcaagaagtactacttcctctgtgaattagcgcgtcagatcgtctctttttcctgatgataacgatgttgttgcggtattactcctagcaggccgttattgtttgcttcatattcaagagttagcagatcttctactgagaaattctgttagcattctccatataggtcttgtagtggcttctcgggttgtgttagtcctccttgcagtccgttgttgtttgcttcatattcaagaggtagcagatcttctattgagagattatgttggcattctccatataggtcttgtagtggcttctcgggttgcgttagtcctccttgtagtccgttgttgtttgcttcatattcaagaggtagcagatcttctactgagagattctgttggcattctccatataggtcttgtagtggcttctcgggttgcgttggtactcctagcagtttgttgttgtttgcttcatattcaagagttagcagatcttctactgagagattttgttggcattctccatataggtcttgtaatggcttctcgggttgtgttagtcctccttgcagtccgttgttgtttgcttcatattcaagaggtagcagatcttctactgagagattctgttggcattttccatataggtcttgtagtggcttctcgggttgcgttagtcctccttgcagcccgttgttgtgtgcatcatattgcaacccgttgttgtttgcttcatattgaagtttttgcagctcttgtactgaaaagtttcgttggatctgtggttgcggttggcattgtccatataggtcttgtggcggcttttcgggtttcattagtactccttgcatcccgttgttgtttccatcatatcgcagcacgttgtttacttcatatggaagttttcgcagctcttctagtgagggtttttttagaacctgcagtggcagttggtattgtccatatgggtcttgttgcaggtggtcgagttgtgttagtagttttgctgttgaaggatccatcggctggaaatttgggctgctattattaatatcttctccaaaaccatttgcaaaatggtcaaatgccgcagtaggtgcttttgcaaaagttggagctcgagtatctatgggaaggaaatcattagatgttggccattgagcagtggctgctggtgcaccggttgaatatacaacagtatagttatctatggagaaaaaagaaagaaagagtaattcaatgtaaaagggtttaaactatgagggataaaggttgagtgttttctttacacgtaggatctgtatatggcaaccattgaccattatctgctggtggaacggcagaagctccagaattggtacctatggagaaagaaagtagtgtaattcattaaaatgctcaagtagaagtgttaaacaaatgatagattaagagagaaagactaagtcttttttacacgcaggatcactataaggaaaccagtgatcattagctcctggtggaacggtaggagctcctagatgggtacctatggagaaaaaggtttgatcattagctgctggttgaacggtaggagctccacgagtacctatggagaatgaaagttgagccattcataaaaaatgctcaagtaaaagtgataaacaaatgatagattaagagagaaagattgaatctcttctttagaagcttgatgatttggtgtagaccattggttttgaggaagatgattttgctgaccaattggaatcggcaactggtttactacaagacagagaaaccaaaggaagctttagaagtcaaaagtgaaagaaaccaagttttgccagctgcaatcatgacctgctgtacaatgcaatagatatcaaacaaaacaaactcaatattcagaagagagaatggtttgagtctgttctttacaaggtatatgattagttgtagtagaccattgataagaatgaaattgattttgctgatcattaggaatctgcaacttgtttactacgaaggagaaaaacacaaggaaattcttagatgtcaaaagtgcaagaaatcgagttttcgagcatgaatctagtaccatatgtgtttttatgacttgttagaccatgtgtatcatccaatgccaacgttgccaagcttgaaggactcatctctgacctatcagctacataatgcaaagagttatcaaacaaaataaacccaattttcaaaaacattattgaactttagatatatctgtagagagatttacaaggtgtactcgctagtttcaccatgagatgagctccttcaggatcttgaccgagaaaattcttgactgcatctacacaaagacacaaaaaataactgaagcggttcataaaatcagtcagtaaataatccataagaagattttagtccttgtgttatacgtacatggtgcagtaccaatatcaagatctcgattctcgaccatcagactaacttgctttccaagaaaattgttacacatttttatcaaaaaaacttaaccaaaaatactgtgattgttgatggttggacaaagcttatcattcatgaaaacaagtaaatattttttgaaaagctttataatgcaatgttagttatagtgtggtcgaggcagtttcagagaatagtgaagatattaaaataatgtataagtaaagaaggtgagaacaaacatagagagaaagagaaagataatgagttggaagagaatgaattggagagggagatgaagaggaaggagatgagactgagttggaagagaatgagttcgaagaagatgcaggtgaaacaaagaaaatgagcctaaattagaggaggatgtgatcgaagaagatggagaggcagagaaagagaatgagtctgatatcgatgaagatggaaaggcagagagagaaaatgagtctgatactaaagaagatggagagaaaaaaatagaatgagaaagaaaaagagttggaagagtatgagattgaagaagatgtatagaaaggaaaagaaaaagagttggaagagaatgagattggagaagatgtagagaaaggaaagaatcaagtggtttggctaaagataaagagagttggctgaagataaagagaaagagtcaattgagaagagggaaaaggtggagaataggtacaaataggtaaccttttttcttcatcaaataccacactagtttttgtgccatgatccaccttctcaaacatatgcaaatattgataaaccatcttgaaactctcatctggactggcacgaatatcactaagatgtagttttttttccctattagcaatcgagtatgacacttttgtaccatatttttcctgaacaagactaatgagactttcaggacttggggtcttttattgacatggataatcttcatgcaatacggatgcaactaaacatgtagtacctcttcttttgatgcatgtagcagtactcgactatacacatgtaagcaacttcttatatgttcgaatagagaagcaagttgaatgcttagccttcaaatatcgtacataccattcttcaacacatgttgccacataccgcttcgtatctgagttttgtaaaggcagaccaaaacaattcttatttgctcttgtctcaactaaatatttcacatcatgcatgtttttaaattcttgacctataacgagatcaagatcatcttcccatggaggtttaaacttagcattttggctaacacgtggtttctaaacatatttacgaataccatcattttccttactcatatccacattactatcaataccattatctacatctctaatagcaacaatttctagtggctccaaagtctcatgaagttgttctcttagtggctcatttgcgtaaagagttatagcaccaacattagctctatcatcattatctgtactactaaaattctcttcaaaataattcacaccaactgaacatttttcttgtactctcgatttttgctcgtttaattgaaccatttccaagtcattaccgacttctacatgcaagacacttctagttttctcttcatccaacatggttagataaacatatacatcatcatcatccctaatatataaatatgtaagaattttaacttctgatggaatgtaactcaagaacagctttatcgtagattcatctatcttaatcttcatgcatatcttatccactaactatgaataagttatctcctccattgatgatgtcctaaacgatataccatacaaaccaactacttttggatttcattaatatatggttctccagtttttgaataatatccatcataatcaaaatatatgtttattggaaggttgctcattctcttgaaaaaaaaatcattagctgttatctcataaataccatttgtatcagatatactacttcgaacaattataccacgtttctcagtgatacctagattttcctattctagcaaattgattctcggaccaaaaacactaatctacctaagattaactacaatcaaccattacaatatattcaaatgtcagaatggacccgaaatacatagttaccaacataatgtccattaactaggtttgtacccgcgctacatcgcggaggaatgtcaaaattttcagtattatgtgatggataattgtatgtgtgtatgtattttgataacgagacgtattttgaaaataccgcaatgcaatatatattgacatattttaaaaaagaacaaaaacagttgtgattacgaattaggaggtgtatagtttcaaatcgtatggacggtagcaaaattacatactgatattatgtaataatgtgtattatatttttatatacttatatttaatcataatatatatgttttaaaaataaacgattgcgtaaaaattgtattggtaatgaatgttgatatagtttagttagttaatgtatttaaattgtagctgtatataattgattcttactttttagggtttgactttttcaaatataaattttcaaaataagtgcctttgtaagatccttaagaaagtcattggtatggcttcatcaatcatgacaaccatgttcagatccgctgtctaccgtaagggaatgtttttatccatatagtgttataatgtggattttaatattttttagaattttagtagaacgaatgatgtagtgtacatataaatattcatgatagggaacaatagagagaaatgacaaatgtttacaactaaaatccatcgtagtaattattatttagtagcacaatagtgttttccttttttggaagtgcataactataaaattaataggaatattgtttagtaatataacaacatagagtttgatcataggaatatttgcattccaatgagttacatgtttattttagaataagacaattaggtaatgagtgaaataaagatttgcatcggcttttttgtttttatgttatttaacactaatctatcttaaatgattcatgtaattacgattctcttgactggcagtcgatacaaagagtgtagtatgactatgagaaataaaatagtcgatacaaagagtgtagtatgactatgagaaataaaatgatacaaagctatcaaggcctagggtagttaatctgcaactaataaaacagctcaatatgggctaatgggggaaactaaaactgaagcccaatttgtgacatctctctcgttaactgagttgttgacaagaagaacaaacgttaattgaaacatcgaaaaaaacagagacatgcaattaagaggagaaaaattgttgaagcataacagaggcatgtgttagatttctttcctgaagatttgcaatacgatttcgaatcaagagatcatcttttataataattgtgtccaccgataaggttctgtttcaatggaggcgacggtgatggcgttcagtccagaccaaatagatggagacttccaagcaataagcaaacgggatctgtttctaggaagcatgtttgagctttgtaattccttaattggccaaagagagattcccaatttcttagagagttgaagttgctacgttttgataagattttccaaatcgcccatgagaatctgcattaaaaaagaaggtgtggtcttgattctaggaaggagttataaaagaggcaagagggatctgtttgcaatctgcattacaaaagacgatctcttacatggcttcgttgaagaaccatgtaacagttagcttgtgttttttagttagattttagatttctcgatcaaagtaaaattttgcaagactaagtattataaataaaataaaatggatcaaagcaacagaacaccaaatgaaaattccaaaccacggtagcaatccactctcttctgcttgagtcatattttccattttaatgttcacatcttccttcttttcatcatcgatgatatttgaattttcaaatataagagcaaaagccttcttatcattttcttcatcaattttttccaagtaacgtcttggtagtggatgactgttctgttcaagagattcaccaatattagatgcatagacactgttagatgaaggagtagttaatccgatagtcttttgactagacaaaataataataattcgttattaggttattgaattaagtacaatataatagtaaatattcatttttggtagggtttttggccaaaaatccgtcacctatttacttagtccttaccaatttaatctcatacaaataactagaatgtgaccggtggtacaccacgggtttagtactttttgtttattttttatttttataaatgaagaatttatcatgtataatgtgtattggtgtttgtgttaagtaataaagttttcgataagattatatatggtttttattaagtcgtaagtttatgatattaataagcttaatataattttatcttctaggatttgacccgtgatacactataaggtaatataatatgttttattcataaatttttgtatttaaattacataatttaaattttttgtgtttttaaatttagcctgtagaacacatgtaatttaataactttgtattacaattagatatttagatgtgttaaagaatatgaacattagaggcatcaaaaaacttaactcttattttaatattcaataatgttgatttttaatataccaataaaaagaaattttttctaactaaaatattaaaattaaaattttatttgttaaatgctactattatttgttttgtttagtgttaaagattatatagttgtactttgattgttaaatctaagattctaccttggatatatgggggaatcctaagataatttgtaaagttttattaaaaatatttgaggtaatgatctttgattagtaaatattgtgttaaatttaagaatctttgattattgattttttgtccatatttcaccaaacatttttatttaaaacatatcattcgagtcgatttaaaagttggagattattacctcaaatatttttgttacttttctactttcaatatatatataccaaacaccaatacactatctcaattaaatcattgttgatcaaatttattggcaaaattatagacacatcaaataaaacaaagaaaaactcttgaattttcgtttggagcacaacaaataaaacattcgtaccttgtgatcttgttcttttagaggaagcaaactattgtgtcaaatttgttcctaacatgagtcaaacttgttcggtcttcaaaaaaatatacattctcatcattccctgaagctataataaagaaaaagagtcaataaaacagaatataaaatcatatttagatagtattactaattatattagaaacccaagatcaatattttctttacatatcataccttaagctgtaacaaaatatatatatatatatatatatatatataagtgtcaatttgatgattagaatctcaaaaaaaaaacatgattagttttgtatttgcaagaagtctaaaaacatttgaattgtctaaccctaactttggtattaatacatatatatatatataaagcacttgatgaaatttgataatcttaacattttttctttgtcacgtatgagggtagcagtgtcttgcttacattgacaatccctcaaataagcaaatgacgcggtcattggtgttggtagggttttggagcttttgctatagatcaaaatggtattggtgttttgtgtttaggtggttgagtatttatagttttttgttatattaatagggttttgattagaaaatataaaaaatattaatgagtaggtatttgatatctttgaaaatctttaaattgtcacaaactaagaatatgctacgtagatgcttaatcaaatattgataaaatctttgagttatgagaaatttcttatttgattagttggattgaatatttaattaatatggttcaattttgttaggaaacaaatgctaaatgtaatataatctctagcattataataggaaacaatttgctgtggaaacatttgtttgttataaattcagtgattaaatgtagtttaaattttatttaggaaaatctcgaattaggtaggaaaatctatcttaggaagatgcttgagtatgaatcaagactattctgaaaatgtattttgattaccggatttattgttgaaagtaattagagaaaaattgtaacaacccgccccgtgggacccgcacacgtggccactctctaccacgtggcatcctgctggctctgcagcgcaccgaccctaacctctggtggcccagggctttggtggcctaaggagagaggttagggtcgatgcgccgcagagccagcaggatgccacatggcagagagtggccacgtgtgcaggtcccacggggcgggttgctacaagaataaattttggtaagatttgatgacatttaaaactaaaatcgttttaaaatcaaataattttaggtatggttagttaggattgatttccgaatttggctaattaggaaatagtcattcattaattccgtagagttttaggaattgatttgtgcaatttattagggtagtagttaacaatatctgagtttatgcaagtagttagtgcaatatcttaattgttaatcaaaaatttggtcattgtcctaaagaatatatcttgtctgattgattttgtagggactaaacatacaatgtcgaaattgaaaaaggatttttcgacacaaattgtccccaaaaatgtatatgtagatttagaactaaaaacttacaattagtttaattgcattgattacttgaattaactccaataacacttgaatcgcataactccaacgacacaaagtttttatagacagtttccatactcaacgatctgcattcatgtcaattaaaattctcaattcaaatatatgataaatatcaatcggcatatacaacttgtcctatataaacaaattatcaccacacaatatcacattcataatagtcaatatatttaagcaataaagtttgcgtgattagctcacgtactagacgttttaaacaatgaatcatctttctatataaacattttttggaaatacatatagtcaaattaagatgctacttatatttctcctttttttaattaaaataaatataacaaattaaatgtacaatattaattaacagtttacacacaacacaaaccacaaaagaaaaaggcaaatcacaaagcaaaaaaatactgaattttagcataataaactaatatacaacagatataaaaaaaataaacatgatatactcaaactttacatcgataaaaattataaaattttaaatatattattcatatacaaataataattcttataaaattatatataattttttaacaaatatatacactgcggtgtaccgcgggtcaatatctagtttgtattgatttttgtagtatgaaatggtcaccagagacaatagaagctggaataatcatatttccagaatattcatgaatttctttttctagaatttcatcattggatggtaataaactgttaagacaaaaaaaatctctcttgaatcattaattatttagtgaaagctaaaaatcagaacaatcatcataaaagtaaattgatgcatactttctcgtctgcttcagttaggtaaattagaactggaaagtattataatatgagaacttacaaatatatctcccaaaagctggtgaaagcagtggcagtgttataggccattttgtttgatgtaagtttgtatagaagcgatttagatagaaatggttatggagctatatggtagtgtttatggtcagatagaatagtaaaggatatatatatatatatagtttttctggttagatcttattttagggtttataagagaatattacactcttagacactttttccaaattatttccgtgtttaggcacttaaggagtagacactttctcaatgttgtttttactaaaatacctcttaactaaaatactctcttaacccacgttctcttctcctctctctctctctctctctctctctctctctctctctctctctctctctctctctctctctctctctctctctctctctctctctctctctctctctctctctctctccttctataatttgtagtgtctctctctccacgtctccataacttctacgcttgattcctcttatcgattttgcagagagagagagagagagagagagagatttccttatttgcataaggatcgtggaagagagaaagtctttaacttgtgtaaatttcaaataaaagtgtttggttaaattaggagtaaaaatgtcttaaaagaagttaaataatggaaaaagtgttctctcccttataagtgcctcaaaaggaataagattctctaaaagtgcctaaacgtgtcacattccctttataataagcatattctgtaagcatttgtatgcgaataaggttagataaggttagtttgtagcgtatattagttaatattgtaatcatatcttaccgaaattgcatatgaaaaatattaagattatcatgttagcattattttcaaaattttaatatgaattcatatgtttagttgccatatattgtagatttcgtatattaggaatggtatcttggaagcatattactaaataatgattttgagaatatatttagttagtcaaggataatagaatctaaattattgggtcaataatgtgtacatcaccttagtaatgtaggaaatatatagttaatcaatacggaatataattgactattttgtagaacatgtagtttagagaatatttaaggtagtaagttaggatatgattggagattatgtagattttagtatctttaaccaagtaaattagagaatattaccggatcccgcaaacaatattcatgaaaaaataaagttgttaaaggtaactaaataaagttagttaccattttagtagggattgttattaattgataccataatcgtgtattagttacgatttgtttgtttttgggttatttaaaaattctttttaattgaaaagatgagaaggattaatagatttgaaatcatatgacccgatttgtaaaattacccgttaattaacccattttgactttaatttcagttaaattttaattttaaccgacccgtttatcaaaagtacttctcttttagatttcaacaccaatttcaaacctatcaaatctagctgaaatctccaaagtacaaacacaacaacacaagagtagatgaattaagatgtgaagagtataagaagagaatggtaaagctcactttgaataatacacgaagaacaaagatgagcttggtcgattggattcgacgacgaaggattcgacgatggctgcaaaggggatcgattttgtctcgatgaagataaagagaggtatgttttaaattggttgtttttgtttttaatttttgaattaaataaatgggattgcatcgattaagagagtaaaccgtgatcggtttggtttgttgggtaagggtaaacatggattttaaaatttcattaagtgtatgagagtaagtcagattttaggagagtatttagattcatatttcgagagtgaggagctcctcatattaatgtccgtcacagtcttgtttggagagtgaacaacatacagaattaaccagtgaaagagatgactacaaaattgattataaagatgaagaacaaaatggattttatactcacagttttcatagagaatagcgatgtggatgatatgggaatctaataacaagcttgaagggtgactttgcaaatcagaaaatttgaaaatcaaatagaattgagagagagaaagagagagagagagagagagagagagagagagagagagagagagagagagagagagagagagagagagagagagagagagagagagagaggagaagatgaagtgttgaaaattttgtcgacattcgagtttccaatattggagataaggaatacggacagaaacagaacttgccgacgatgggattggagcgaaggagaggggaagaacgagatggcaagacaggatgattgtattacttggatcttaatgaaactgatcgttgagtttaaccttttttgcgctaatctccaaattattcattgttcacttttatttttgctttatcatcttcttctttgtccctatttaaggaattcaaattcacttctactgaagtatttcttgtatcttctgtgttggtcgatttgggtttaaaaggattaatcttttaactttaaactttatccttccatcgatttcattatttgtttctgataaaggcttttgctttatggaagtgataagatagtttgatgatgaaaaaacctaatttccaaaagttccccacgccttcgtcttactctttttatctctttcggcaattggagaatatgacttgaaaaatctcaattttgtttcattttttcttctggatcctcttcttcttctctatctcgtttcagtcgataccctttcatcttcttcttcttcccttttcacttgtttctctagatactctgtgaatctgagatatctaccgtgaatatgagaaatccactttgaaaccgagaaaccgccggtaagaaatcttttgtgtcatatctatgtaagattttatctgtttgatccatagtttttgattgattgtgttgggatttagggtgtcatgggttagattacgttttgttttagagtttggtctcttcttctctttgatttagagatggattttggataagttatcgattgaattatgatgtttaatgattataatttggattttatcattacaatttggatttgaattacaattcggatttgaaattgggattcttttaaattgtcccttagtagcctttgttaaggatagccattgaaacaagtttttatgatttaaattcggatatgaatttgttccttatagatggtttgtgaatatcactacaagaaatattgacattgttagcgcgaaatatttgctatcatacatataatatagcgaattcacaaatgttataacatcggcatgcatcgtaagtatgacccatacattagcatttttttaaatgctacgatagattcacatacaatagcactttcttgaacgcttttatttatttttatatgacgatacatccatgctatgatctatcattttttcagtgctataatattcagttttatgactcttattttatgcagttgtattactctacaaacatttggtggaatctgtttaatttggaaaatattcaatatatatattaaatttccaaaagatcaaacattaatttatacataacacgagtctcaaacatgtacaactaatatctttaattctatatactacttttgcaattggagaacttgaaaacgattgatgagatcatgcaaaatccttatttcgttttctagatattggactcggttcctcaaggaagttagctcagcttcatacgttgttgttgtactctctttctttctcataggttttcgaaaaagactactaaactcttccgtatattttctccaaatgttgcagtcttcatctttgtcactgtcctcaacgacatctgtaatttctggtacatgaaagaaaacaaggaagattcatgcttcctactacaaaacttatcgaatcactttattagcaaacaaacatctttactcacatgcaaacgtaacatgtgactgagacatatctttaccctcagaagagactaattccatattatttatacctttactttctccaaaaaaagaaaagttaagaccatcacttgtatccagcattggtgattcatagacataactcgaaaaccatttacttagatcaggaacttctgataattgtgaaaataaaagtgaagaaccacataagtgaaatcaatgcagctaaaacaataagatatacatatcttcccaaccagccaagcaaattcgggaaacagtttccaagaaaatgacttaccttcactatcattcatcttttaattatctatgttcgctcctctttgacctaagaatcttttgtataagccaacaaacaataaaatccaaaaccatgtaatgtatgttagtactaattagtctacaagaaacaaaaccaagactaaatttttataatgtaggcagaatatattattttagaatttattacacgaaagactaaattttggctaaatttctagcggaataaggtattttagtttcccgtttaataaaattatacattagcgttaataaaatgctatatcagcaaactctatcctagcgtatataaaatgatatatatgaaaataaaaattacaattaatcttcaatagcagttgagtaatctgtgctatgtcgttatgctatcaatgtagactttttttgtagtgtatgtctaaaacaaaagatgacaagtattttaaatgtttgatattgaatttgtattttggatttgttgttgcaagtactaattactatagttgttactcgtagaggaggagaacctacttctagaagtgaagtatatgcctatcttagaagtgataatagacaaaagctatctgatccactccatttagagatagtagttgcaatggacaatgacttggaagatgagggggactaatgatgcctctgatcatgaggtaagtaatattcatgtttgatttttataagtacaatagagtatcaatatttacaactatgttgtgggactaaatttttgtgtgttagtattgcaggaaatagaaatagatttggatgagtttattctttactcctgacgggtatgaaaagattctgaaaatttctacaaggtgtaccattggtaacacgtttgctatcataggaagtatgctcaaggagaataaaaagaaatggtttagaacgaacaagcaattcaagcatatatggcacatggataggcatagtaaaaataaggtgcatggtatgttgatgctccttatgcagactgcttcgacacagaagaagagggtttgctggtttgtggtgaatgacgttccaatatgctactcgcttagagaacatgctctaattactggtttagattttcatcaatttgaattagactttaaaacaaggaattttggtagctttgactttgtggagaaggtttatggaacacaagttgtaaatgtgaaggatgtggaagatatgctgaagtcaatggaagatgagtgtgatggagatcagttgcgggtggctgtcttactctttttatgcgcgatagtaagagggaggagaaggtttggtagcatacattcatttattctgaagatagtgaatgacttggaataggtaaaaaagtttcctagcgggcaaaatacttttgaagacactatggaaaagatcgttcacttgatgaagaagcgattagatgggaaagtgggaattgactatttgtttccagggttcatcattcctctgaaggtaaaattttgtttttcttcttcaataattagtatatctgttttgaatgatttaagatatattactgtgtaaaatgtgtataggttttggcgtttgaatgcattcctgagatgtctaaacaatttcaaaaaaatgtaataggcgcaaaggatggatgtccattgatatgaaaaagaaatttgaagataatggaatgacagattttcaacttcaagaagtaaacaaagcgcttggaacaacataggtaagaactagttaggtaatcaatagtattttggattagtaaaacatgtggtaacctctgttttcttgttctttgttggacatcattagtaatctacaaccatcagcgggtgaggaagctcttttgcttgacattgtggggccatttgatgatgaagccacaatggaccctattgctgatgcatggaatgagcgtctggatgtagaacataagaaaatttggtggaaagatatttaaaagttgtatgtagattctcgaggatatggagatgtacaggtcccagctgctgaacaaatggaggagacgcaacaaaatgttccaccaattgaagaaatgaaagaggagtcggagttgttgttaccttctcttctaaagagaatagtgaaaacagaggtagcagatgcgatgcaagatgtctatctgagattggataaacttgaaagggatgcagagacaagcaaaacaaaagaaaaagatagagaagaggaagcaactggtgaaaagacagatggtaagactggttttggtggaggtgattttagaggtgattgtgagaccggttttgatggaggtgattatagaggtgatgcggagaccagttttgatggaggtggtgaaaaagcagttggtgagagtggtcacgaggcattgaaaaaagatggtatgttgaagctagtagaggctgtctaggagataaatgttggtgagaaggctgttgatgatgaaatggttggagatgatgttgttgagacaaagccgggttttgggaacactgttaatgagattttgaggacagatgatgtgttaggtgttgttgagaagagtgttgatgatgagttaaggagtgtgttaagaaaagtgttgatggtgagttaaggagtggtgatgagtcatcatgtcttgagaagagtgttattaataatgagccgactagtgagaataagacaggtggagagaaacgtgttcatttttttttgagggatctggctttgagaagagtagtgacgataaatctgatgagatggcttgtggtgatgaagttgtaggaaggaaaagaaatatgaggacgaagaactataataagctgtgtgttgccaccgagaaggttagtgaagccatcaattaatgtcagttcgcattttacgaaagaaaaggcaaaaatagaaagaaaaaaaaaaaagaaggagaaggagaagacgaaggagaatgagaaggagaaggaaaaggagaagaaagaagaggatgagaaggacccaaagaagaggctttagtggttgggtttttagatatacttgttgtaagtttttaggtacaattgttcggattggatgtgttttgaggtttggtgtttagattcacttgttgtaagtttttaggtataattattcggatttgatgttttttagtttttaaggttatgtatgaatttactaattaggtacaattggaaacgagcaggtacaactatgtatgtgggtgtttgtatgaatcaactatgtatgtatgaatctaagttttttttggtaaatttcaactatgtatgaatcaaagtttcttttggcaaatttcaactatgtatgaatcttagagtgttgatcgaaatctaagtcatatagttttgattttaaaacaaaaaaatcaaaaaaatcaaaaaatatatacaaatatctgatgaaaatctgatgtgacgccgttatttttaaaccttggtgaccatcatcgtctcccttatctttaccatcattagtaaaccactcgcccaaaccacttggcctcttggacctcttcttacctccttttccatgttctccaacggatggatacttttttcttgtcttcttccttgttttacctcaaaatctcgtgcatatgctaagagtttcattatctcttccggaacacaccattgagaattatgttgaactggaaaaatcgtccttgtctacgccaaaacccaaagctctatccaataatacttgagcacgctattgcgactacaagaaatttgttcattgatagagtaacgctattatcaacgctattaaatagatttactcatatagcaaggttctaacgctatgatagaattcctctaacccgggaaactaaaatgactcatacagcgaaacacttacaattgttttttcattttttctgcgaacaaacatattttccctctgagctcgagaaaaccctaagacatagccacactctctcaaaccgacgactcgaatcctggagccactgattaaaccatccctttcgccatctccgttgttgaagtttgtcgccgtcaaagccgtagccgcgacagcaatcccaatttcagccttaattctctgattaaaccatctctctgaatcccaaaatcgaaggcatgtttctctgaatctgtagatttatttcatccctttcgttaacctagttagttttcttttagctgtcgttaatccattgaactgttttggttcttaatcactgtttttataggtttctctgattcgattcttcaaagtttttatcttttgcatgtccgtgttctttgcaaaattagaactttttgtttatgtggtttgatttaggcgtagctcgataaatagaatgcacaattttgctttcggaaattttagatttttagatttttaaaaaacttctcgagatttacaagtgtttgttgacattctattacagctatttgtattgacttgttcttcgaatctttggatcttttagtgcttgtaataacatggtctctgaatctgattttaaacacattcttgcataaacaaacacatgaaactagatatactcattctattttttgtttttgcaagtgctgctgtgtaaataatgggaatgtgaagctgatatttggttcttattacgcgacaggttagtatcatcttgatcatcactgtttctttttgtcttgaacatcactgtggctttgtgtattgaacatcactgtttctttttgccttgaacatcactgtggctttgtgtattgaacatgactgtttctttttgtcttgaacatcactgtggttttgtgtattgaacatgactgtttctttttgtcttgaacatcactatggctttgtgtattgaacatgactatttctttttatcttgaacatcactgtggctttgtgtattgaacatgactgtttctttttgtcttgaacatcattgtggctttgtgtattgaacattactgtttctttttgtcgtgaaaataaccgtggctttgtgtattgaacattattgtttcttttgtcttgaacatcactgtggctttatgtattgaacattattgtttcttataatcttgaacattattgtttcatataatctgaaatcattcttatggtattaaaggttttaaaacacgttttcaatttataatggtcgacaaggattgggtgcatctttgcaggtaagattttcagtaggaaaatctggagatctaacctctctttttattctccttttttgtcttcactgaagagttgatcatataatgatttttttttattaccctttaactcttctctgaagagttgatcctgcttatgagagaggggctacaaagtttgtacaagatgtggctacagctgtgggagacgtagatatgaatatatgtccctgcattgattgtcgctgtttagatcgtcattcagtttctgttgttgttgatcatcttgtaacaaggggaatggatgaggcatataagaagcagtgtgactggtatcatcatggggaatcaaactttagggctgagagtgataccaaagtgagtcaatggaatgatgaggtacttgggttatatcaagctgctgaatttttggatgaagagtttgcttataaggttggcttgagtgagattgcagagtgtgatgacaagaaagaagatgagttccttgcaaagcttgcagatgctgaaacgccgttgtatccaagttgtgtgaaccatagcaaggtgtcggctattgtatctttctttagacttaagacaaaaaaacgggtggtctgacaagagcttcaatgattttctagagatattgctggagatgttgccaaaggataatgtgttgcacaaatcactgtatgaggtgaagaagttattgaaatcttttgatatgggttaccagaagatccatgcatgtgtcaatgactgctgcctattcagaaagaattacaagaagcttgacagttgtcctaaatgcaacgcttcaagatggaaggctaacttgcacaatggtgaaataaagaaaggtgtcccacaaaaagtattaaggtactttccgataatcccgcgccataagagaatgtttaggtctgatgaaatgcctaaggatttaaggtggcactttagcaacaaaagcagcgatggaaaactccgtcaccctatagattcagtaacatgggatcagatgaatgcaaaatactcgtcatttgcagctgaagaaaggaacctgaggcttgggctttctacagatggatttaatccattcaacatgaagaacactagatatagttgctggcctgttttgttagttaactacaatctgccccctgatttatgcatgaagaaggagaacatcatgttgactttgctaattcctggtccgcaacagcctggtaataacattgacgtttacttagaacctcttatagaggatctatgccacctgtgggacaatggggaattgacatatgacgcttacagtaaatcaacatttaatctgaaggcaatgttgttttggacgattagtgatttccctgcttacgggaatcttgctggctgcaaagtaaagggaaaaatgggatgtcctctatgtgggaaaaatactgatagcatgtgattgaagttcagtagaaaacatgtctacatgtgccatagaaagggtttgccaccaacacatcatttcagaatgaagaagtcttggtttgatgggaaagctgaaaatggcaggaagaggagaatattgagtggtcaggaaatttaccaaaacctgaaaacttttaagaataactttgggactttgaaacaatttgcaagtaaaaggaaaaggacggtgaatattaaagcagactctgatagtgatgatcaatctagtgaatcagaggaggatgaagaggaccaagtagatgaggaggaattatctagatggaagaaaaagtcaatttttgtcaagttaccttattggcaggtgtgttaaacattcctgttatttaaatttcagatttcatcactaatcattgattaaaacttccttagtattatctcagattttatcactaatcattggttaaatttttttgttttctttcgtgtgttgtataggaacttcctctgagacacaacttggatgtcatgcatgtggagaggaatgtggctgcaagtattatatcgacattgttgcattgtgggaaatcccaggatggactaaatgctagaaaagatttggaggtacttgggattagaaaggatttgcatcctaaaaccaaaggcaaaagaacatatcttcctgcagcactttggtctctatcaaagacatagaagaagatcttttgtaagcggctgtatgacttcaaaggttcagatgggtactgctcagacatatcaagaggcatctcattagatgagtgtaaggtcacggggcttaagtcacacgattatcacgtgttaatgcaacagcttctccctattgctcttagagggttgctacctaaaggtccaagggttgcaatcatgcgcttatgtactttctttaaccacttgtgtcaacgagtaattgatatggagcagcttttggaactagaaactgagatcgttgaaaccctttgcctgtttgaaaggtttttcccaccaagcttctttgatataatggtgcatttgacagtacatttaggcagagaagctcggttaggtggaccagttcatttcagatggatgtatccgtttaaaagatatatgaaagttctgaaggattttgtgagaaacactacaagaccggaagggtgtatagcggagtgtaatctagctgaagaatgcatacagttttgtagtgaatttttgaagaagacaacaaatgttcaggaaagtgttgatagaaacactgagtatgagagcaactctatacttgatgggcgtccaatctcagcaggctcttatattaatcttactgaaatggagacaaaaatagcccatatggctgtcatccagaatatggcagtctctgaatcttatgttgagtaagttccaatctcaataggctcttatattacttagctatatatattttacttatccatatggctgtctctgactacttctaatttttccttgtattagtgagcatctgtaacatctacaagactcaaatgtaagatgcagacgtgatgcatcacacttatggaacttgcacactcagaattttgcttcatggcttaaaaaactggcatgtttttctctcacacttgacacttaaacactatactttatcggtaagcatataggtgtctgacaatttatttttaaattttttagatacctcttgattcaaacagacatgaagaaacacttaaatggccagcttatatatggtcaacggagttgtgcaaggacatattcttgttatatagtgaatgggcagcgatttcatacaataacagtggataagaaaactcagaacagtggtgtgtactatgaggcaactgctatctgtaggtctagtggaaaagacacttctcaagtggtcgatttggtttcatattatggctgcattactgatattatcttgctggattataatgtcttttactttccattgttccgatgcaactgggcagtaaaaggcaatgaagtaaagcaagaggatggttttactcttgtaaacctgaatcatagtcaagactcatttttgagggatccatacatactagcctctcaagcaaaacaggttttttacctaagagaagatgactcatcaccttggtatgttgcattgagaggttcttcaagaagatttagtcagaaagagtttgtagattcagttgcagccattggcacattgccaccaaatgttgacatagacgctgacttggatgaagctgagaatgagaggactaattgtaaaggaatttatgtttgtgaaatgtagttttttttgcttcattttcattccttgttgcattctctatgtttgatgtctgtttcccatagtgtgttcaatgtcttatttgcatccagtgtacttaaccctttactctttcatttttctccggtgatttaagatgggacaacagaagaaaaagcgaggtaaaagtaacaaaaaaaaggtcaatgcaaagaatgccaatgatgaggtcgagtatattggaacaattgaaccacaagtcaatgatgaggaatatgcagaaccagctgaagttcaagtttcagatgcagatcaagtagaagatccagatcaggtgattgatggagatcaggtgaatgatgaagatcatgtggaaccagatcaagtagcagatccagatcagttggttgatggagattcagataaggtcaatgaggaagagcctcaccgagagcttgttttatctgagggtgatgattgtgttgagccaaagcgtaagcgacatcgaggaccaactaggctgaaggatattgccaaggatccaaataccagagtaaaagtagagttcactaacatgggagagcctattcgtaaaggctcagttaagctggcatcatatgtaggtgcattggtaagagaacacgttccagtcacaattgaacgttggactaaaattggtgaagaactcaggacagttctctggaaatctgttcaggtaagctttgtgtaaaatttacaagtttattagatattggtgagtacttgactgttttgtttttgattgcaggcaaggtttgaactagatgaaaagtaccaaaaggttacagtgcttaggcagatgggatgtttgtgaaggtcctggaaatcaaggcaagttacaaacattagagaagctattactaaccaagagaggatgaacatgcgacccaaaaacatttctccttttgattggcgtaaatttgttaagctcaaaactagcaaagaatttaaggtatgcatttggaatttgtaaatttatctatatacaatagaaattaacattcatctgttaggttgtaagcgatagctacaaggaaagaaggcgcaatcagattccacatacttgtagtcgcaggggaatggttagacttgccgaagacatggtaacagttgtacacacttatattgttcatattgctcagcctttttccaaagtccaaacacttatgtattaactaagatcattttcttggtttagaaaactgctagtgcagacccatctgaagtgacaaggctaaaggtttgggttaagtcacgtactaagaaggatggtacaccagtgaatacgaatgctgctgaaaagattgtgagttattgtttcgtttgatttgcattttggcattttgaatcacacttgatattttaaaatgtatcttatgagtttcagaaaaaggcagaagagattgttaatagtgataatccatcaacaaatgaagcaccagattcactaagccaattgttagggcctgacaatcctggtagactgagagcaatgggtcgcaatatgaataagattaagttagcttgtttccaagtgaagcacaagcgtatggctgaaatgcaagagaatcattggatttagacttatgttatgttaaatgatttgaatggatttttcctctatgttggatttgattcagacttaatattaaatttttattcagagtttttttttctgtgttgggttctggaaattcagataataccaaaaacaaacaagttgtgaaagattgtattacaacataattaaaccgcataaataaacaaaacttagcaattatttactgttatggtagaagaatcatatatcataacatcaaacgtaatgctaaaaaaaaaaagttcgcatcgtgaactaattgctaacatagaataacctattatggcacgaaattaaaatcgtcgttactttttagcaaaaatttaaagtgctatattactaattaaaacagcgttctaattttgctattatattattaaatataatagcatttacaaaactgctatcgtacgagtgacacctaccatagctgccgagaacatggcgtttgtgaattcgctatagataatgtaagatagcagatttttagcgctaacaatgaacaaattatcttgtattctacaaccatcagcgggtgaggaatctcttttgcttgacactgtggagccatttgatgatgaagacacaatggaccctattgctgatgcgtggaatgagcgtctggatgtagaacataaaaaaatttggtgggaagatatttaaaagttgtatgtagattctcgaggatatggagatgtacatgtcccaactgctgaacaaatggaggagacgcaacaaaatgttccaccaattgaaaaaatggatgagtcggagttgttgttaccttctcttctaaagagaatagtgaaaacagcggtagcagatgcgatgcaagatgtctatctgagattggataaacttgaaagggatgcagagacaagcaaaacaaaagaaaaagatagagaagaggaagcaactggtgaaaagacagatggtaaaactggttttggtggaggtgattttagaggtgattgtgataccggttttgatggaggtgattatagaggtgttgcggagaccggtttggtggaggtggtgagacagggttttttatcagtaacattggggagactagtggtgaaaaagctgttggtgagagtggtcacgaggcattgaaaaaagatggtatgttgaagctagtagcggatgtcaaggagatagatgttggtgacaaggctgttgacgatgaaatggttggagatgatgttgttgagacaaagccgggttttgggaacactgttaatgagattttgaggacggatgatgtgctaggtgtcgttgagaagagtgttgatgatgagttaaggagtggtgttaagaaaagtgttgatggtgagttaaggagtggtgatgagccatcatgtcttgagaagagtgttattaataatgagccgactagtgagaatgagacaggtggagagaaacgtgttcatttttttgttgagggatctggctttgagaagagtagtgatgataaatctgatgagatggcttgtggtgatgaagttgtaggaaggaaaagaaatatgaggatgaagaactataataagctgtgtggtgctaccgaaaaggttagtgaagccatcaattcatgtcagttcgcattttacgaaagaaaaggcaaaaatagaaagaaaaaaaaagaaggagaaggagaaggcgaaggagaatgagaaggagaaggaaaaggagaagaaagaagaggatgagaaggacccaaagaagaggctttagtggttgggtttttagatatacttgttgtaagtttttaggtacaattgttcggattggatgtgttttgaggtttggtttttagattcacttgttgtaagtttttaggtataattattcggatttgatgttttttggtttttaaggttatgtatgaatttactaattaggtacaattggaaacgagcaggtacaactatgtatctgggtctttgtatgaatcaactatgtatgtatgaatcaaagttttttttggtaaatttcaactatgtatgaatcaaagtttcttttggcaaatttcaactatgtatgaatcttagagttttgatccaaatctaagtcatatagttttgattttataacaaaaaaaacaaaaaaatctaaaaatatatacaaatatctgatgaaaatcttatgtgacgccgttatttttaaaccttggtgaccatcatcgtctacctcatcttcaccatcattagtaaatcactcgcccaaaccacttggcctcttcgacctcttcttacctccttttccatgttctccaacggatggatacttttttcttgttttcttctttgttttacctcaaaatctcgtggatatgctaagagtttcattatctcctctggaacaaaccattgagaattatgttgaactggaaaaatcgtccttgtgaacgccaaaacccaaagctctatccgataatacttgagcacgctattgccactacaagaaatttgttcattgatagcataacgttatagcacggattactcaactgctattgaagattatttacaaattttgttttcgtataacagcgtgttatcaacgctattaaatagatttactcatatagcaaggttctaacgctatgatagaattcctctaacccgggaaactaaaatgacacataccgcgaaacacttaattttttttttctttttttcttcgaaagacatatattccctgtgagctcgagaaaaccctaagacatagccacactctctcaaaccgacgactcgaatcctggagccaccgattaaaccatcccttttgccaccgccgttgttgaagtttgctgccgtcaaagccgtagccgcgacaccaatcccaatttcggccctaattctccgattaaaccatctctctgaatcccaaatcgaaggcatgtctctctgaatctgtagatttatttcatccctttcgttaacctagttagttttcttttagctgtcgttaatcaattgaactgttttggttcttaatcactggatttatggatttctctgattcgattcttcaaagtttttatcttttgcatgtccgtgttctttgcaaaattagaactttttgtttatgtggtttgatttaggcgtaggtggataaatagaatgcacaattttgctttcggaaattttagatttttagatttttaaaaaacttctcgagatctacaagtgtttgttgacattctattacagccatttgtattgacttgttcttcgaatctttggatcttttagtgcttgtaatgacatggtctctgaatctctagattatttccacaacttgtcaaacacattcttgcataaacaaacacatgaaactagatatactcattctattttttgtttttgcaagtgctgctgcgtaaataatgggaatgtgaagctgatatttggctcttattacgcgacaggttagtatcatcttgatcatcactgtttctttttgtcttgaacatcactgtggctttgtgtattgaacatcagtgtttctttttgtcttgaacatcactttggctttgtgtattgaacatgactgtctctttttgtcttgaacatcactgtggctttgtgtattgaacatgactgtttctttttgtcttgaacatcattgtggctttgtgtattgaacatgactgtttctttttgtcttgaacatcaatgtggctttgcgtattgaacttgactgtttctttttgtcttgaacatcactatggctttgtgtattgaacattactgtttctttttgtcgtgaaaataatcgtggctttatgtattgaacattagtgtttctattgtcttgaacatcactgtggctttgtgtattgaacattattgtttcttataatcttgaacattattgtttcatataatctgaaatcattcttatggaattagaggttttaaaacacgttttcaatttataatggtggacaaggattgggtgcatctttgcaagtaagattttcagtaggaaaatctggagatcttacctctctttttattctccttttaagtcttcactgaagagttgatcatataatgatttttttttattaccctttaactcttctctgaagagttgatcctgcttatgagagaggggctacaaagtttgtacgagatgtggctgcagctctgggagacgtagatatgattatatgtccctgcattgattgtcgatgtttagatcgtcattcagcctctgttgttgatcatcttgtaacaaggggaatggatgaggcatataagaagcagtgtgactggtatcatcatggggaatcaaactttagggctgagagtgataccaaagtgagtcaatggaatgatgaggtacttgggttatatcaagctgctgaatttttggatgaagagtttgcttataaggttggcttgagtgagattgcagagtgtgatgacaagaaagaagatgagttccttgcaaagcttgcagatgctgaaacgccgttgtatccaagttgtgtgaaccatagcaaggtgtcggctattgtatctttctttagacttaagacaaaaaacgggtggtctgacaagagcttcaatgattttctagagatattgctggagatgttgccaaaggataatgtgttgcacaaatcactgtatgaggtgaagaagttattgaaatcttttgatatgggttaccagaagatccatgcatgtgtcaatgactgctgcctattcagaaagaattacaagaagcttgacagttgtcctaaatgcaacgcttcaagatggaaggctaacttgcacaatggtgaaataaagaaaggtgtcccacaaaaagtattaaggtactttccgataatcccgcgccataagagaatgtttaggtctgatgaaatgcctaaggatttaaggtggcactttagcaacaaaagcagcgatggaaaactccgtcaccctatagattcagtaacatgggatcagatgaatgcaaaatactcgtcatttgcagctgaagaaaggaacctgaggcttgggctttctacagatggatttaatccattcaacatgaagaacactagatatagttgctggcctgttttgttagttaactacaatctgccccctgatttatgcatgaagaaggagaacatcatgttgactttgctaattcctggtccgcaacagcctggtaataacattgaagtttacttagaacctcttatagaggatctatgccacctgtgggacaatggggaattgacatatgacgcttacagtaaatcaacatttaatctgaaggcaatgttgttttggacgattagtgatttccctgcttacgggaatcttgctggctgcaaagtaaagggaaaaatgggatgtcctctatgtgggaaaaatactgatagcatgtgattgaagttcagtagaaaacatgtctacatgtgccacagaaagggtttgccaccaacacatcatttcagaatgaagaagtcttggtttgatgggaaagctgaaaatggcaggaagaggagaatattgagtggtcaggaaatttaccaaaacctgaaagtttttaagaataactttgggactttgaaacaatttgcaagtaaaaggaaaaggacggtgaatattaaagcagactctgatagtgatgatcaatctagtgaatcagaggaggatgaagaggaccaagtagatgaggaggaattatctagatggaagaaaaagtcaatttttgtcaagttaccttattggcaggtctgttaaacattcctgttatttaaatttcagatttcatcactaatcattgattaaaacttcctgagtattatctcagatttcatcactaatcattggttaaatttttttgttttctttcgtgtgttgtataggaacttcctgtgagacacaacttggatgtcatgcatgtggagaggaatgtggctgcaagtattatatcgacattgttgcattgtgggaaatccaaggatggactaaatgctagaaaagatttggaggtgcttgggattagaaaggatttgcatccaaaaaccaaaggcaaaagaacatatcttcctgcagcactttggtctctatcaaagacatagaagaagatcttttgtaagcggctgtatgacttcaaaggttcagatgggtactgcttagacatatcaagaggcatctcattagatgagtgtaaggtcccggggcttaagtcacacgattatcacgtgttaatgcaacagcttctccctattgctcttagagggttgctacctaaaggtccaagggttgcaatcatgcgcttatgtactttctttaaccacttgtgtcaacgagtaattgatatggagcagcttttggaactagaaactgagatcgttgaaaccctttgcctgtttgaaaggtttttcctaccaagcttctttgatataatggtgcatttgacagtacatttaggcagagaagctcggttaggtggaccagttcatttcagatggatgtatccgtttaaaagatatatgaaagttctgaaggattttgtgagaaacactgcaagaccggaagggtgtatagcggagtgtaatctagctgaagaatgcatacagttttgtagtgaatttttgaagaagacaacaaatgttcaggaaagtgttgatagaaacactgagtatgagagcaactctatacttaatgggcgtccaatctcagcaggctcttaaattaatcttactgaaatggagacaaaaatagccaatatggctgtcatccagaatatagcagtctctgaatcttatgttgagtaagttccaatctcaataggctcttatattacttagctatatatattttacttatccatatggctgtctctgactacttctcatttttccttgtattagtgagcatctgcaacatctacaagactcaaatgtaagatgcagacgtgatgcatcacacttatggaacttgcacactcagaattttgcttcatggcttaaaaaactggcatgtttatctctcacacttgacacttaaacactatactttatcggtaagcatataggtgtctgacaatttctttttaaatcttttagatacctcttgattcaaacagacatgaagaaacacttaaatggttagcttatatatggtcaacggagttgtgcaaggacatattctggttatatagtgaatgggcagcgatttcatacaataacagtggataagaaaattcagaacagtggtgtgtactatgaggcaactgctatctgtaagtctagtgcaaaagacacttctcaagtggtcgatttggtttcatattatggctgcattactgatattatcttgctggattataatgtcttttacgttccattgttccgatgcaactgggcagtaaaaggcaatgaagtaaagcaagaggatggttttacacttgtaaacctgaatcatagtcaagactcatttttgagggatccatacatactagcctctcaagcaaaacaggttttttacctaagagaagatgactcatcaccttggtatgttgcattgagaggttcttcaagaagatttagtcagaaagagtttgtagattcagttgcagccattggcacattgccaccaaatgttgacatagacgctgacttggatgaagctgagaatgagaggactgattgtgaaggaatttatgtttgtgaaatgtagttttttttgcttcattttcactccttgttgcattctctatgtttgatgtctgtttcccatagtgtgttcaatgtcttatttgcatcatgtgtacttaaccctttactctttcatttttctcatgtgatttaagatgggacaacaaaagaaaaagcgaggtaaaagtaacaaaaaaaaggtcaatgcaaagaatgccaatgatgaggtcgagtatattggaacaattgaaccacaagtcaatgatgaggaacatgtagaaccagctgaagttcaagtatcagatgcagatcaagtagcagatctagatcaggtgattgatggagatcaggtgaatgatgaagatcatttggaactagatcaagtagcagatccagatcaggtggttgatggagattcggataaggtcaatgaggaagagcctcacggagagcttgttttatcttagggtgatgtttatgttgagccaaagcgtaagcgacatcgaggaccaattaggctgaaggatattgccaaggatccaaatgcaagagtaagagtagagttcgctaacatgggagagactattggtaaaggctcagttaagctggcatcatatgtaggggcattggtaagagaacacgttccagtcacaattgaacgttggagtaaaattggtgaagaactcaggacagttctctggaaatctgttcaggtaagctttgtgtaaaatttacaagtttattagatattggtgagtacttgactgttttgtttttgactacaggcaaagtttgaacttgatgaagagtaccaaaaggttacagtgcttaggtagatggaatgtttgtggaggtccttgaaatcaaggcaagttacaaacattagagaagctaagactaaccaagagaggataacatgcgacccaaaaacatttcttcttttgattggcgtaaatttgtgaagctcaaaactagccaagaatttaaggtatgcatttggaatttgtaaatttatctatatacaatagaaattaacattcatctgttaggttgtaagcgatagctacaaggaaagaaggcgcaatcagattccacagacttgtagtcgcaggggaatggttagacttgccgaagacatggtaatagttgtacacacttatattgttcatattgctcagcctttttccaaagtccaaacacttatgtattaactaagatcattttttggtttagaaaactgctaatggagacccatctgaagtgacaaggctaaaggtttgggttaagtcacgtactaagaaggatggtacaccagtgaatacgaatgttgctgaaaagattgtgagttattgtttcgtttgatttgcaatttggcattttgaatgacacttgatattttaaaatgtatcttatgtgtttcagaaaaaggtacaattgttcggattggatgtgttttgaggtttgttttttagattcacttgttgtaagtttttaggtataattattcggatttgatgttttttggtttttaaggttattcatgaatttactaattaggtacaattggaaacgagcaggtacaactatgtatctgggtctttgtatgaatcaactatgtatgtatgaatcaaagttttttttggtaaatttcaactatgtatgaatcaaagtttcttttggcaaatttcaactatgtatgaatcttagagtgttgatccaaatctaagtcatatagttttgattttaaaactaaaaaatctaaaaaatctaaaaatatatacaaatatctgatgaaaatctgatgtgacgccgttatttttaaaccttggtgaccatcatcgtctccctcatcttcaccatcattagtaaaccacttggcctcttcgacctcttcttacctccttttccatgttctccaacggatggatacttttttcttgtcttcttccttgtcaaaatctcgtggatatgctaagagttttattatctcctccagaacaaaccattcagaattatgttgaactggaaaaatcgtccttgtgtatgccaaaacccaaagctctatccgataatacttgagtacgctattgcatgcacacgtggatatttgtctatatcaaactgtcaaactgtctagaccattgcgattgatcacactatattcaaggttgtaatcgtttagctcttttaccactatcttctttgcttccttacatgtattctggtgttccttctccacaaaagaaaacaaatattgtccacttggtattagtccctaagtttttctacgtttgtcaaaccactctactatcttccctactatttcatctatcaattgtaatagcaagtagttgcttggtttctctaaagcaccattaatatatagatgcaatcaaattacttgtgtctatgttgtacttttctcctccaaaataacatgtagcccattttgtcacatctgcattatcatctagatatgtaagtgccaaaagatatgtagtcaaaaaactccataaaaccttaagaactccgcccccgtataagctcgagcacattccctaaacttttttccagaaattgctttgtctactccataaaccttcaggttcacattttgaggcaaatggtacaaaatgtccatggtgggacaactaatagatatcggctattgccttgatgagactttggtttctatctcaaagaaacacaattttcaggatcatccggtataatcgacttgagcttcatgagaatccaagtccagctgtagtttttcccaccatctactccaaaatcaatcagataatggtaatgatcgggatcttgagccgtaacaacaattaggactccaccatatgcagtcttcatatgaattctatccacaatgatgactttcctcatagctcggaagctttcaatggaagcacctaaagcaaaaaatagtacttaaacttattttcgtcaaccacttccacatacgaaactgaatcatgattcatattttgtaacatgtatataataatgcccaaccctaaaatctttctttgggttacctctaatatcatttgcagcttctcttttttctctacacgcggtagaataagagacttgcacaccaaatcttccttgaaccaaatgaataagatctattcagttggagtggcaatttgacctggataatctttggccaataatgaagcaaccatagtcggtgtgcctttccttttacttcgtcctgtagttttacttgaacgagagcatgaatgaatccttctatgagttcgtatagaataaggcttagaattattacgctttgcagctcatagataccaatcacatccattatgtgcttcttaacatgccatcacatatctcaacagctctgatttctttacaacaaactcaaagatattgttgtgtcccgccttatcaactaaactttggattgcttttttgcttccaaattcttggcctaccgtaatttcaagctcatcatcccataaaattggtccacacacatttccttctaaatctctatcctcattctccaccataaacagatattgttttgattgttctcctacgtacatagcaaggacaccaccaccaatctcatcttctccaccaataagagatatatcttcactatttgcaacattttctataaccaaatcctctctcaatacatgatcgaaccgttcattctcatccatcctcatatttggttcaacatcataactaatttgaacatgcaatacacttctaaacccttattcactcacatcttcaaaataataatctagatcttcatcatcccgaatataatttggtcttaccttacgtccttggaatgagaagggaaagtaactcactttaagctttgtcgaaattcatctacctttctcttcctacaaatcttcttaatcaacttcgcatattttacctctcctttcgatttcttcaaaaaaataaatacatcttcatcttcttcgttagaaatccaaagtacatcttctctgatactaatatattacccatcataagcaaaacgtatcactagattccttttcattgtccttgaaaagaaaagagagaaagaaaacggtcaataattttacatttttcataagtcaataaacatagttatacccatttgtcacagttgcacaatatttaagatgtacgtaaatattctaattatttgtacaccttggtttcagtttttctacaattaaacgcattcaaactacgatttaacctttctcatccatagacacgaacgtcaaacattactccactaagaaacaagaatacttaccttaatgaaacgtggatgttgaagaagaagtaagaattaatgatggacggaaaagaagaagatgaaaggagatatgtggatcttggatatgtagaagaagaagacgaggtgatatatctgaaatcgtatgaagaagaaaacgaatgttttttgcgtttttggttggttttggtaggtttaggtggttaataaagagagaatgaatatgattggttgattctaattgtttgtttggtagcaaaaatttaatagaaaattaaaaagaataaaaaagggtaaacttttatttcaaatatattgggaaggggaggaaatagtgagaataagtggatgtttttcaaaaattgattcaaccaaaagggccaaagagattaaaatccgaagaagacgaagaaaggaaacatgtgaaaaagagcactgggttgggtttcaattagttgtaattgggttaaatttatttttatttatgtttaatctggtttagtgtctttgtaaattggtttagcaaaccgtaaaccgagcaaaaccaatatttgcggataattagttttgaactatttgtttatggagaaatatgttttaaactttgaattcggaaagatacagatcgagaaatattttttcatggacatatggagcaaggtaaagattgggatctatttggtatgatgtcatacttctcgtgggaaaatagactgtttttccgtagtcatacacatcaagcataacctaaagattaacatttagatttcaatttcgatcctttaaaaacgataaaatcaaaaaataaaatggcatggatactttatagtttagtttgttagaaaatcattttcaaaaaataaggaattcaactggagtacaattttacaagcattcagtcgaatgatcagcaaatggaaaaaggtcaggaataaacgtgatctgataactcaatgacaaaaatcgtgtcaaaaatcacatattagggtagaatcgtcattatgtacttaatgttagcctaaagtatttagtctctcaaaaaatcgcttattggtttggttctagttcaaaatatctataatttggttagatttttggtttagtttaacataattcggttatgtttcggttttctgctttataaactttcaaatataaacaaaagaacagatttactttttttttttttcataagtgttatattttatttcaaagttgtgttgtaaaaagtacaactgtggaaacttccatttacagggcttgacacattaagctttacaatattggactatatctaaacaatagaataatccaatattgtataaaagaaaccaccaagtccgtctgttaaatttaggtccaaagtaaatgaagcccagtccagaaaactaaaaccctttgaagaagtaagctgtaaaaatccaaagcagaggcacgtgtaaagctattaaccattgttgagacacgtggagagatgaatcatatgtcgttgctggatatcgtcgatgtagaaagcgacctgaagaacctccaaaatcaccggaaaccgccagagcttcaaaaagaagtccattggtttttaatcagagaaattcacaaatcttcatcaccgaatctgcaaacgaagctaattgtcaaaaacgcagatcgccggaaaactgttggagcctaaaaacagaactcaacaaagaagccaatcaaagcagaataaactaaatcatgcgaagagaacaactcttcggaactgaagattctgcatatcataatgcttcatcatcaagattttaaaactataaaacaaaaacaaatcacgaaaacccgaattcaaaattgaccaaaagaaaattctaaatcctgaacaacgggagaagatagccgaaagacacccggtcgacagaagccggaagaaacccgaacgacgatcctaaacatttattgggatgagtctctctctgaaaaatactaaagagagaagagagaaactcgtccgtcaatctcaattcacttttccttacatccacttatgtagaaacagatttacttaatatcataattattcaatataagtatatctatttttgatacataccaaattatagatattttgaactagaataactatatctatttttgatacatacttgaatttgatttactgtgttcagttcggtttcgttacacaaaaatgatttcggttttaaatttatttggattctagaataatgaaaccaaacggtttataattattccggttaagtttcggttttaacatttttcacggttgattcggttcagtttttgtattttttttggtccacacctaatgaatgcacatagtttacatgcgtcattcgagaatctgaagtcatgaataagacatctcatttcaaatctgaagaagaagtggttggatagcaaaatgtaaaagaggtgatattatctaacaacagagagactatagcattttggtggttgtaacgtgtgaacacttgtcttattccattgaccgcctgagataacttgatcttatagcccaaagctgcttcccaacagcttccatgtcaggccgctcttttttagtaggagcagcacattgaaatgccaaactaaacatcttccttagtatcttctcatctactcgttccctcgcgttaggatccactagttcaaaaactcgcccttcattgtacttgtcgaatgcctaccataccgcaaactcgatttagtaaaggatgatgtaagttggagaagaaacattataaagtggcttacccatcggaccgtaatcctctcatcaggaagtcgcttggcctccactggacgacggcctgtgagtatctccacaagcaaaatcccgaacgagtaaacatcgcttttagcagtgagatgataagttttcatgtactcaggatcgagataaccaacggttcctttcacttgagttaaaatgtgagtctggttcgagtcagtaggaccgcctctcgcaaagccgaagtctgctactttggctctcatgctatctgtgagtagaatgttcgacgattttatgtcacggtgaattatctgtctttctgttccaaagacaagaatcataaaatatcaaataagatcctttcaagatttatacttatattatgaggaagcacaacattctctacctgcataagaatggagataggttaagccatggcagacatcaataacaatctccaacctttgattgaaattaagtttagttccacgagcacctgcaataacaaaaggagtctttatggtttagtcatatgtttttatagccatgacaagctcgggaagatgtaaagaagttcttaccgtccaagtgatcgcggagtgtaccatttctgacatactcagttatgataagtcgctcgtctcctttgtcaacataaccaagaagcttcactaggttccggtggccaattttagacaaaaggtcaacttcacttttaaactccgttcgcagattctcaaagtgttcctacaagacaagtaaaatcaacacttaattagttcatattgtgcagtgatcaaggtctcaatggcactgtattagtacaaatgatcgttaatcttcaagatttaaaaaccaaagaatagatatctagttagagtcctaatcatggaatcacaaagcaacattactcagtaaggctagaccacatataattagtgtgagaacttgatttcctaacactacaagaatctagtgcctattagttgatcatgtaaaggttctattattagcttctgtcaacgttataggtcatgactgaataaactatactacaaatttgataccacaagaaaattgaagctgaaagattataagagtacctttttggctcgttttatggcaacaacctggccatcatctagaacgcctttaaagactacaccaaagcctccttcaccaatttggtgactgtctgcaaaattaccagttgctgtattaatctgactcatggtcagattcaaaggtcccagtctactaggccttggggacatagcatatctagatggactctgcggtacgcgggatggacttggtggtgctcggaatggactttgtggaatcttctcagaagaagggctcatttcaaaagaagaaacttggtgcactgtgatagaaatatataagcttcaatgtcaaatgttattatttcatagctacaaaagaaagataaatgtgagagacactaagtgacctgagttagattctttaggtagaacttcatgactatttgctttcctctctttatgaaagcaaggacaacaaagagcgcaacacaagagaagaaacccacttcctgctatgctaactttaacatggctatattcagttttaggcttactatttttggaatcttttacagttttttcttccaaaaaccttctccctacattaaacaatgtcacaattaaccaaattcggttactatatataatcaaaggagcacaaaaaaatctttaaatagagcaaacctagtagagagtgaattgtgcagaagtcatcactaaaagaatcctcaaagatacaaccattggctttgtgaaaccgtaaagcttcgcaaaaccggagtttctccaccggattaccgttaattgtgaacaaactcccttgttgataaggctttgtgtaggtcaagtgatcagacttacaaacactcgagcttacaaaggatgttgatgcagaagtttccttgatttgtaacaacattaacagaccaaacaaagcagtaatcaccaatcttgtgaagctcaaatcatctccacccatggttttggttttatcaacaaaatacacaacttcaattatccatttataaactcagttatgagaatcttttgagttcagaagattttctctaaacctgtagaaacaaaaactcagctttagaaagcttccaacattagggttccatttcaatactatagcaaagatccagtaagagatttcctaaaccctaaaaaaaactctcaatttcggaattaaaaggtttccaagaaaagaaagaaaacgagaaatcaattaagcgaaatcaaaacagaaaattttttgattcgaacttttgtagaagagaccaatttagagaaaacccaggagagttaaggaagagaagaccaaaacctggaacacgatcttgtagctttgacttgactgtacagtatttgaatcagtttgaccgaatacaaaagatttattctgttttcagagaagtatggcaaaagaaagaagaataactaaagtacttttgtctgaaggagaagagttagggacgtggtaacgatcttatggaagacatcgtgtggaaaactttgaaaattcgtgttctgtttttttgttttccgtctcaggaaagttcgtgttgttttctctgttagatgatgggaatggaaaaaaaaaatatatatatatcaaaaaatcaaattgaaaatagtttttgtaaattcgaagcaaaccggcggttgaaccagaccacaaaccacaatgattgatagtcggcaaataattattgaaaactagattttaccgcggaataatttatattttaaagttaccatatataaaagttttaaaattgtatctattatagtttacgattgttaacgacaaaaaaaaaatagtttacgattgttattaaattaaataatgatatatcacgagtctacaaaataattgttaataaattgaaaatttaacttgtattaaagtggcatgttaagattattttaattttttataaatattgattcaaacccatcttccacaaaatcacgttccaaaatataatatagggaatgtgacacgtttaggcatttctatgcacttttattccttttgaggcacttctgagggatgagacactttttcttgtttcgtggagaataaatagacaattatatccttttcaatctaaaccatcaattgcttaaccagttagcatagttttgttttgatttggtttctaataaaacgacagttgatatttacagatgagaaagggagctaccttcgccgactgaaattatctcacaatatcgatgttgatggcagttaattcttctgaccaaggaattattttgaaaagtcgattcggaatctccgagtcaggtatgatccttgaattggttgatattcctgttcaacgctctctctcccatcccaaaaatctcttgaaacgatatttttcaattgaatagcctctgccttaaccacggcttgggaacaatgtttatgcagcgacttaaccgccactgggatgggaaagatgacatagaagtcgattaggaatctctgcctgtttggtatcgacctgccatagcgatgtttaatcatagattttgataatcttaatattatggaacttgtagatatctgaaaggtttagaataacgagagtggcgagtagagatattttgttgctgcaaattgttgtgtacttctgataagcagatttttacgcctacttatatgctgaatgctgtttgagttcagttcaattcctctaaaacacaaacatgtcgatgcagtcatagagggtgtcaatccagtccattgtattgctagcaatcaagatgtgtacaaaaacaactaagtcaagccagattataaagatggtgggtttctagtaacactcctaggtcaggattcaaacaagtaaaaataagaacttaacagccctactcgatcattgggtcgagtagaaccaacatgtgacaaaattaagaactaaaatgcaatcaacaggggatgtaaatggaggatacaaataacaggtaaataaaagtgtaatcaataggggatacaaatcaatcttatagaagttctaatgatggattcattgataagggcaactctagggttcatcaaatggctaataggcgaaaggtagatacccatgacgatagattcaaaaaccgggtcaatccactctcgtgacagagatccccataactctaccacttcctaatctcaactctcgttgatgaaacatagcagagcagggtttaagaaataatctaccaaagccaataggcagacaagccaatcccttggtcgagtttacatatctctggaattcgtaggtcagacatccatttgaacgtcttttggacgctggacgtctatgatcgaatctccacattagccagcgaaaaccgcataggggccaagcgaatccagaagggtataaacctaaacactaaccagctaactaacctagagattatcctaatctaatccatcctcaagaaccctaatcactactcaagcaacattctcaagaacacaaacccagaaattactaaaatcataccaaaatgtagatctaaacaagctaaacaactttacttaaacaatcaaatgcaaaaacgaaatagattaagagtaattaaggtttcaagattcataaacacaaagaaaaactgaaagataaagcatagatcctttggacaaatcccaaagtgatctatttatactaaaatgttggaaaatctagattcattagaagacaagagacttgaggcggttttggcgaatactcgaccttggggattgagtaaagagggtgctgcaaagtctgcgcctttgtgtctatgctccgagtgatcaattggtcaagtagaagcttcatcctctcctatccgtatgctcagatgtctggttgagtggggaatgaggaggatccaaagacgctttgatagctcaacaagtcttgtaaagatggtcacccttggtcgagtaaatgaatcgagtagtggatcgagtaggagggttgagtagatcaatctgctgcttcatctaaggttgccttgatcgagtaggagggtcgagtaaactgcagcctcctttgtagcatcctggatagagtaaagaggtcgagtagaatgatgcctcttttatagctgcctggatcgagtgaatggatcgagtagagtccttttaagctccttttgcacctgcaaacacaccaaaacatgcaatgcgaatgcaagatgatcctagatgcctaagtatgcaaaacaagctaaaatggtgcaaaatgatatgatacaatgagcaaatgcatagctaaatgatgataaacatacacctaaaatgagtaaaatacagtgttatcaacttccaacacctagactttagtcggctttatatcatcacatggttctcataaagcaatttttttactgtattccccattgaaacatgaaatgaagggttttattttctgaataacatgacatagctgattaaaggattgatgtaggtaatttagtcggtggctttaccatgaacaaggtgaatgttgccatttcaaatacattatgcatcgttagcagaaaaaatataaagatatctatgtacataaagcatctaaatcataatgggctagaattgagaaagaaaattccagttgcgttcataaaaaatgataaattgtatcaaccgtagtagaattcatgccgtggtttgacttgatccccattaaacaagaaattggtatgaaaaaatataagaaattgtttctgcaaattaggtagtatccacaatatcatgtccaataaataatagactgcaaactattaatgtccacttctgtatgtccaacgattatatcatagtagttcattgatgagtgtccaatattatcaaatgtactttaacctgttatgttggttatgtttgatataaattatatctttcatgtttttgaccttattttcttcttggactatttttagtcaaagccaaaaaaaaaaacttgaaaccatgatttatattggttagtgatgaatctgttgttgttgtaggaaaaagaggcttccaaataatttgtattctatcaaattgatgcttctcccaaaatgttcagctctactttgcacctctttgaatgtatacatgcaaataatgaattcaagttttatttttgattatttaaaatctttcccacaatgttttatggttattggtttgttttctttgtgtttgctgatttttaacttttcattatactgattttgttttatgtatccacaatatcatgtccactgaatcaaggaataaaaaactattgctctccccttctgtgtgtcgaactagtcaaatccatgtaaaattgatgagtgtttcatagttttgaattgattagtgtccagtatcatcaattgatgagccggttattttggttatgcttgatggttgagatctgcacaaaaagaaaggagttacttcacgattacagacggttgtaatccagttattatttcgatgtcgacgaaggtacgatgaaaaaatatccttaaaaatagtaacacgattacgataatctattatgctaatcggttattaatgtgaattctctgttttgtttggttagggattgatggatgagttttgtatggtaatttgtgaagattgggtttgttcttcgaatggagagtggaagctggagatctgtaacaaactgttttctagggttgttccaacttctgacgaaatgacattaggagcgtttaagtcagcgattttgtaagagttcagaatgaatggtgtaaatcctttgttgagttatgctgcaccggatgaagatatgttcacatcaaaggagaagactcctccacttttggttacaagcgaggttggccttctgtactatctaagtgcatttagagaaaacagaggtcttaatttttttgtgaagtttgaagaaatggaggaagatttacagagttttgatacacgaggagatagtagcactaaacgaccgcgtcaaagcagtttggaggcagaaagtggttcaaaaacgcctaaaagtggtgtcatatctgttcgcgatatatcgtttgtgggttcaaaaactcctacaattttgttgactcctcgtgatgacgaattcatggaggaattggaacaagcagaagcaaacatatgaagtaacaatgggcagaaatcgtcacgaaatgatattgagaatgaaggttttaacattgatgttgaaaacttgtttttcgttgataacgatacagaggaagttaaagcagtcacggaaaaacctgaagatagtatgcccttttgcggttatgataaggagttttggtcaaatttcctaacagataattatggtggctccaatgctaatgagttgatggtatcaggaggtttagatgtaaggtacgggtctaacaataaggttgtgggctccaatccggatgaagtagttttctgtactagcagcggagtttctgatcacgctatatatgtgaacaagaccgaacaagttatgaacggtaaagatggtcggtggagttggaagctctcagggaacaaggaaggaggtcagaaagttggaggaagtggatgacgaggaatttggcattccacctttgtttggggacatcgagtatgaagtaggtaacttacatgatttggacattgatgatgatggtaaaggtatataccagggaaaagtgtatgcgagcaaagaagattgccaaataggatttgctatatatgcgataaagaatcagtttcatttcaagcaaacaagaacaaaatggaattattttgttcttagttgctcagatgagaaatgtgattggagaatattggaaactataatgaatggcgttggttactatgaaattaagaaagcgcaacttcaacacacatattcggttgagactagaacgcagtacatgaagaaagcaacatcaaaggtgattgcatctgtatttaaggcaaaatactatgaagtttctgttggtcctgttccaatggatcttcagcaatttgtactagaagatttgagggtttctgcatcatacaaaaagtgttggagagctagggaatcaactttaacagatgctggcgggagcgatgaagagtcgtatagcaatttggctgaatatttgcatcttttgaagttaacaaatccggggacgataacacatatagaaacagaacctgatattgaagatgaaaggaaagtgaggtttttatatatgtttttagcttttggggcttcaatacaaggttttaagcatctaagaagggttttggttgtggatggtacacatttgaaaggaaaatacaagggtgttttactcacagcaagtggtcaagatgcaaacttccaagtgtatccactagcatttgctgtggtggatagcgagaacaatgatgcatggactttgttctttacaaagttggagaggataatagctgacagcaacacactcactatattatcatataggcacgaatcgataaaggtaggggtgaagaaggtatttccgcaagcacattatggtgaatgtattattcacctatgtaggaatatccaagccaagttcaagaacagaggattgacgcagatagtgaaaaacgctggatatgagtttacgagtggaaagtttaaaacgctttataatcatattaatgccattgacccccctttgcaaaaagtatctacatgacatagggatggctcattggacaaggttatatttccctggtcagcgtttcaatttgataactagcaatattgctgaaatgttaaacaaggcgttgtgcaaggggagatagtcacatattgtggaattgctaagatttattaggtctatgttaacacgttggttcaacgcgcgtcggaagaagtcacaagcacattcatgtccagtacctcaggaagttgacaagcaaatttaaaaacttgacaacatcaagtggaagcaaggttgggagggtaaccagttggagctacgaggtagttgggaagctaggtgctaacaatgttgttgatcttgaaaagaagcagtgcacttgcaagagatatgataaactgaagataccatgtggtcatgcttttgtggctgccaatagcattaacctctcgtaccaggctttagttgatgattgtttcaaactacactcatgggttgcgtgttacaaaagagcagtataccctgaagcaattggcaaagaagaagacatacccgaagagctcccacaccgttccatgcttccaccatatactcggagaccatcagggaggcctaaggtagcaagaaaaccatcaacaggggaatataaggttagataaatattttgtaaatctcgtacattgtctaagcttttgaaaaactaaccaaactaatgtaacatgttggttcacatgttaaacgtagaaacctaagacaggaatgacgcagcagaacaggtgctgacgctacaaaggattggatcataacaagacaagttgttctaatccaatttgagaaattgtgtattcaaatttcagttgttaatataaaatatgtatgatctttaactagttgctatgtttttgtaaaaatatttcagttgttattggttccggaatatataacctggaatttcattttctgctaaaaggggcgatgataagtaagaggaatgataaatttttggaataagtaaaggaaacatatttgtttgtttagttgcaaactaaaacctgttttgcagtgtgtccacgatttggtacaacaatgatggcaccggaatgtggatggatgtatgactgagtaggaagatttggatcggcggggtgggaagaatctctaatgtttgtattgagcaaaacggtgtacaaagtgagtaatgaaatgtaagtttctataaattattgatattcgagagcgataaagcttactggggagaatggatgcagttataaaatcaattccataaaatgttggagacgaggtaacggtcgaggacttgtttatataattgtgccaaatagtggacaagtaccacttaatttaatatcttcacatatgaaaaaatccgataggtaacttcacatataataacttcatatataaataaaagcatagattcttaagtttgtccgcaaatgtgaagaacagaactgaaatttacttatgaaataagtgctacttcttgggagaggtaaaagtaaatacatgtgttacacctctgtccctcatactcattgaggttctgatggtccgaccaacactcaccgtaatcctcaaactcccaggaacttttgtatgtcccttggcgacgtggaccaacctcggtgatatgaaacattagcttatctgcgaataagtcgacttcactaaatttataataccgtcgcttgtactgagtataaaattgccacgtgattgatccaccgcaactatgaagcatgatgtaaagtagaccagcatgtgagaaaacgtctttaatagcatccaaaatagcaattgcttctgaagatatagggcatacagatttttgaaggctatgcatttggtgtaaaacatgtgataactagacgattcatgagccatgtgaatgaaaacaggggacatatctagtcgaacagaagaaagagtttcccttgaaaaacagcggctttgccatcgggtcgtgattgaatccaagcctttaacatatcaacaccgtccttagaaattaagctcactattttagcagctacgtgttcaggcatgtggatatcagggaacgggggaggctgacagaaaatgattccaaaagttaacactaaatttggatgattgttcaaatagcgaagattagtagttaaacattacctttaggtgaaattgaaccaaaggttgacgaggaggctggacagcaaattgatttcccctaacaggggcaagggcacttggtggtagccagaaatgtctagtagggccattggtcgagggtggatacatttgcctttctcgcatacgattttgggcattttggattatcgactcggatagtactgaaggtgtagaaatagcgatctaataatgaaaatttaagtaactttgagatcgtgatagaatgggaaccctaataatctgtcacattggagagggtggggtgtggtggtgagatgagttagtggcgacatatgtagtgggtactacaaaataaaaaaaatttagacatgtaaataaggtttctcatgtccaaaataaatcatgtgtggccaaattatgttattcaaagatatatatctctatggtatataatatacagacgtggatgtcttgtaacatgcaatccaacggggactcatttatgggggaagaggttttccataatcaatcaggtaatacatacataaactgtaatcattaaacaccaaccacaaagtaagatggataagccttagcaaatatagaaatgaagattgaatagctaacgagaatataacataaaaaagtcagactagcaaaagcataaatacaaaaaacaagttttagaaaaatataaacatgtatatagacatataatgatggataacacattatcaaaacattgtctttcaatatttgggacaattagctattttgtgtgcccgaaatttgcaacgggaacaacgtggaatactctctcgaactcggggttgagtccaataagttccatcaattttacccatcccccatcctctccataaggttccatccataaactagatctatagcattcatcaaccaaattctcgtttgctattcatttcatatacaacagttaaagcatgtggattgttggcttcaaggcattttgtaaagaaatgataatagatggaatgcggcattgaccaccacataaaataccgaatctgtcaaggcggacacaacttagtgtctccttggaatagacttccgctttaaataacggaccagccttaacaaagggtttcgaagcatcaacaccagattctgcaacgtagctaacaattttagtaagcaccggggccggcaagtaaatttctgggatagcagcaacctgttgaaaaacaaaacggaagagattgttagtatttgtttaaagttgtagttaaaactgtagaaaactaagtactttaggtttggatgaacaaccattttaacatatgaaacagatgatgtttcaatgttgtttatcttcgtaaacttatgcataatttctctgtgttcaggttttaactgaagaaatgggtaatggaaaaaacattaaagaatattgggtgtttattatatagagattattaaggtaagagtagtataagtttttttgcggttttactaaacaagttataatcggtgaaaaattgtcccgctataatacaatttctcaatgttggggagggaactcaattcagatgcggataaaagtaagagaatattacatatagaacaaaaagtgattaaggtataaaagatagaaattaatttattaacctatctataaacaacaatccacgatagtggtttttatggatttaaaataaaattttcatcaaagtacattggtattagctaatcatgtatctgtagcaataatttgttcgtcgcaatcgaaaaaagtaaaaatgatgataataataaataatatcaaggaattacagtattcaaacgataagagactgacattaagtttgaggggtacataagaggagtaaaaataaaaaacaattcagataataatattgaagcagcaagtgatgattccattcctcttgtattagtcgacaaccttaaaagagaatgacaagaaatagtggataagtttacaaaatggtttttgaagaaattatgttaacgaaagagtacataccattttaatttctttcacttcctcgagatcctgttaaggatacacagttgatataggggcatggcttacaatcttcacacggtgaccaccggtataatacctaactatcttccaccaagcaaggacaataacaatattgttattgcgaagggatcgaaaacttctgtcaaagtccattccgatttctccataagcctcgcattgcaatattgtttggtaagaaatcagtaaaaatatgagattgttacctcttgttaatgcaaagaaatgtaaccatgctatgttgaaaaaaaaaaacagaaattgttggactgggccacccaattcagcttttcctttgcttctttgcttttcatttcaacttcttgaaaaacctctagaatgagtacatccacctatattggactggaccacccaattcagcttcgtatgggagatggataggtaaatgttccataacatcaaaaaatgatggtggaaagatcttttccaagttacagatgattaaaactatgttctgtttgagaatttgaacgcgacttgtctgtaacgttctcgaacatagatctcggaaaaatgatccaattcctaaaatatatgtgcaagttaaatgattagattaaaaaaatgttggaataaaatatagtaagtatatattgtacctgatagtgcaaggtggacattccggtcaagcagttcagcaaagataaatggaagtagtcgctccataaatacatgacaatcatgacttttcatgcctgaaaactttccattatccagatctacacaactagccaaatctgaagaataaccatctggaaatctaatatcatatttcacacattgtaataaactctgtttggcttcttctgtcaatgtatacgctggaaatggagctttgccactactatcaatatgtaagcctgggcgtcatcaaaatttctcaatatccaatcttgacatgatattatcttttgatttacccttaactctcatgagagtgttcatgatgttgtcaagaaaattcttctctgtatgcatcacatcaatattatgtcgaagattgaggtctttccagtaagacaactcccacaagatgctttccttgtgccaattatgttccttcccatagcctcgcatcttcttttcatgaccgttcccaccaacatccttcgtttttggtggatttacactagccaacctctcgtaataaacttgctcccctgtcaaagactcaggtggatattcgctagaagcatctcttcctttcagaaagtcttttctgttcctacgggatggatgaccatgaggaagaaatctacggtgacaatcaaaccagcatgtcttccgtccattgggtagataaaaagactttgtactttccatgcaaacaggacaagacaatttaccatgagtagtccatcctgataacatgctatacgccggaaagtcgctaatcgtccacagtagtactgcttttagattaaaattctgactcaatgaaacatcgtacgcatcgactccagtagaccacaactcttttaactcctcaataagaggttggaggaagacatcaagactagctcgaggatgatttggaccagaattcagaatagtaagaaataagtactctgtattcatgcacataccagggggtaaattataaggagttaggatcacaggccacaacgaatgattacgagacatgccaaatggattgaacccatcagtacacaacccgagataaacgttacggggttcttcggcaaactggggatgtaacccttggaagtatctccactctgctgcatctgaaggatgattcatttctccctcctttgattggtgctaatcatgccatcgcattgccgcagctgtcttatggctctgatacattctcttcaaccggtccccaataggtagataccacatacgactatatggtactttggttcttcgacggtcgtccttaggcttccatcttttcacgccacaaaatcgacattgatcttctttttcgtcttctttccaaaatagcatacaattgttctgacaaacatcaatcgtatgatatggaagtcctaaattgcgcattaacttctcagtctggtaatgtgaagtggttgcctggtttccttctggtaaaaaatctgtaaacatttcgcaaacggagtccaccaacttttcactcatattatactccgccttgttgtgcatgagtcgagatgctaaggataattgcgactgcccttcacgacaaccatcgtacaaaggattatttgcaccttctaacaagtcgtagaacttatttgaatggttacggaccggttcttccacattctgataactatcatcatgacgatagttatcatcataccccacgttaaaattaaatgcatcgttcaccatatccacatatggatcttctacaatattacccacttcttcatgattctcactaaaatacgtcctattcgtgtaactcgttcctatatccatattcatttcttctccatgcttataccaaacataataatcaggcataaatccatgactaaacaaatgactactaactcttctacccgagatgatgtgtttttcattcttgcatacactacaaggacaatgaaatttacctcgactactctgtactattggctgactattagcgaatgtcatgaatcgctcaactcctgcgacgtattcggctgacaaattccccgtcacttcatcaaatctcttgtacatccaatctagatagaaaccgccagtaccgccataattgtagtttcccgccattatacaataaagtaactaattttttttttttctctttgatgttgttgttgttttgatttgttggtgaaagaagagttgcgtgaacgtttattatataggccaatttttgtgactaatttacgactacaactaaatagttagctgtacctacttaccaatgcgaaacacgttttccatctactttatacgactatggtgcgacgtttctacgactacaggccgactaagacgtctagtcgtcctgtagtcgtcaaattagcgactaaataaaatagacggtagaatagtcgttaattagcgactaagcaacgacaacattatcccttcaataatttaatcatcaaatagtcgttacttgccgactctttgccgactgcatacgatagtcgtaaaacaacgactatgtaactacaatttttcgtgttgtcgcatgcgagtcgtaaatccgtggccaaatagtcgtataatgttacgactacgtttgttgtcgctgattgtagtcgtcgtttacctgttttcttgtagtgttggtaaagagatgtactatctatccatgatcttgaagggtagcttgaatccgtccaaatcggtaccattcctcgcgttattggtcagaaatccataatcaacgagtgcaccaagcaaatctggtcgaaatatgatgaagatgacagtagttaaatctatgtgtttggaaagaaaattaaatttgtgaagttattacttaccaaccaaagtatatttgcgaacagtgtcttcgatgatgtagtcaaatggagtgaagttgttaagcacaacggtttctttggtggttgagggagtcacgacagtttgctccatgaacaaaatccgaaattcatgaggagttgttcttattgcttcgcagtttggtcgaacaataaaagtagtaatcgttttccattgattctctttgattctgtcataatagaaggcagaaaaacgaggcccgattgttgcctctatttgggtgccctatgaaaacaacattataggggtgagggattagaaaaaaatctgcaaattgcgaaaaggaatacgagaaaattgtataccaatttatcaaccaagagaagtcttagttcgaatgcatcatggttgagtatttttttgtaaactctcactaccatgacacatatcgcccaaccagttaccaacggagacaactcatacagacggtggaactgaatcatggtgaaaagcggcagaattgaagagtaacgaaaaacagaggattatggaaacgaaaacagaggacaatgtttttcttttgtgatggggttgtcttggtagagtcaagtataggagaggtatttatagcaagtgaaaaggttcctttgattgaagccaaaacggtgtaacttcgtctgcgagaaaaagatgtaacttttaacatcgaagggttggttacttgaacgatccgttgtcgttacactatatgacatatttatttttgagaatattacgtattgagttgggggtggttgtaatattagatagataattcgtctggtgtcgtttatagtcgagttatttatttgtaattaaatgctaaatatatgttctatccaagagaacatgtccaaagatatatgtccgtttggaatttattataacgacgtgagcacacgtatatggccttaaagggttatcaattggaaatcatttttgcggacttagcttaaacataaatatgcaaacctcattcatggcaacgaacaaattttgatgggatctgacttttcataggagtaaacagagtataaattatgtattttataaaaacaaaggcagaacatcagaaattaataagcaactattttctgaaatgaaaggcagaacatcagaaatgaacatcaaaaacagacttttcattgtctttcaaaatttgggactatttgttcctttctttgattcctatccttaatgctctccgtatagctttgcccataaggtagatctatagcattcggcaacaaaattctcatatgctattggtttgtacaatacagctttcaaagcatgtggattgttggcttcaagacattgtgtgaaaaaatgataatagatggaatgcggcatgaaccaccacatgaaataacgatatttgtctatgcggacacaacttagtgtttccttggaatacattgcatccttaaatgttggaccagccataaccaagggtttcaaagcatccacgacatcttcggcaacgtagctaataatttaaacaagtattggtgccgggatgtaaatttttgggatagcagcaacctgagataaaaaaaaaacatatgcagacgattatgttttgtttacgatgaatgtaaaacgtagaaaactaagtagtttagtttatgctgaacaacctttttgacaccagatggttattcattcttgtcgactttttctaacttgagcataacttatttgttttcaagttgaaacagatggaatggggaatggaagaaacttaaataaatcgtgggtgtttagtaaccgtatataattatgctcacctcctcataataaacgtgataattaaaacttttattaaacgaatattgctctaaccataatgtttctggtttatgctctaaccataataatcctagttttaaacgtgaaggtgggaatattcttgctatacaacagtatctcaatattctcggtagaaaaaaattcagatttgtctttcaaggtaaaagagaaagataattgttaatgtatccatatgaatccatccacaatataactgtattaattcgtttgtatgattggataaattattatcattggatgacatttatattaattttttcacgtatttgtaaacataattagttcgaatgatttaccaaatcaacaatagttcaaaatactctaaagtattttttttgttcgcattgttaaccgatatcaactgttagatgcccttaaaaaattggggttatggatggaataaacaaataatatgatacagaccactaaaacattcaacagtaataaaaagataagattatgaatatggttaagaaaagcaaaaatcatatttatagaatccagagttataagtattcaaagaaggaggaagcaatgtatatattacaacatgaatgtagggtgacattccataactagtcagaaacatgagatgaatagagtgggtagacacatagtttatatatgtccatggcatattaacgcctaaacgcgtcgacgtgtttgtcagtaatttcagccattttatctgggagtttatcacttgcctggatctcgaggaacttcatagcaaccgggccacagtcaccactccgcaaattcttgtatataccatcaattcgtctccataaaaacggttgaagaccgtgattctgagaacactcaagcgtacagtacctttggatgaggtggggcaaaagattgacaacccgctcaatgaatcttttatcttatcgtcgtcgtagaggtctgtatttgggtcaagaatttcaacgctccatatgccaagattgattgaaagtccaacccagtgctcatcattccatttcataggtgcgtaaatggtatctatgtccttgaaccattcaattttggatcttttgatgaagcgttgcatgttctcttaccaacgaacgcgtgatttcatcttggcagcattgaaggctctgaatttagcttgtagatggcttgtgaactatggatcaacaaaagcagaacgatgattatcaagtgtagttgtaagcctccgagaaagtaatgacaccaaaacctccatctgcttgggaataaaacagttacacattagtatatcttgataaaaggttaatttgtactaggataaatatagtggactacataccagggttgaaacccatttatgaggtttggcaagatcgacgaggaatgagttggaaataaggaatccacacttggtaacatgttcactatgatgtaaaaaagtagcattagtgaagaacttgatgatgaatgttgtggaaataggaaaaatgaatgctaaaccatacatatttggagagctggagagggttttgacaaactgtgaataattggtttttttaagtgttggtaaaagtggttgtgtcttaggtattagttaggagagaattggtttttctcttttacgcgtcggggatgaatcagataactcaaaatattgatctggttccggggcaggtgagttagagtgttctgacttattatcctgtataggaaaatgtaatatcagaccaatatgcataagctgttacaaaactgaaaactcattccctagtcattatgaacaatagtgaatatatgttaagcaatacctcgtttcttgtacccacactattggaactatgtgtgagagatgattggggctctttgtcagctttggaacttgtatcaaatataggcttccaaacacaaccattgcctggaataagaagataattttaaaagcaatccaaacagtgttgtccaataaaacatatcagaaaattatgatacttgttattaatgtataccttcataggatcagagttgacttcacaaactcctgaatgaattgctgcagccatatccacggtgacctgaatgtttagggttcacaaagagatggtgagaaaaacataagaatatattacttgcaagttataacgaatccacaaactcctatccaatataaaagtgaacatgcaagcctaatttagtttagacataaggatgaccttcttttcagagaacattgcaaaccctaacaatgaatgagatgttggaggcgtctccatggtgtcctaaaagttgaagtacacaaaaagatggtgagaaaacataagataatattatctgcaaatgttaagggatccacaaactcctgtcaaatataaaagtgaacatggtatcataatttagttcaaacctaatgttgaccttatttttagataactttaccatgtggaacattttttctataaatgtttgttgcataatgcctgagagatgcagcaaacctctacaatctccaataaatgaatgaatgtaaatcattagctgaaactagttagaaatttatacccccgtagcatcattgccaatctttacttcgggttgtgcctccgacactgaatgcgatgctgcaagtatctccacaataacctgaatgttgaagtacacatgtagctggtttgaataaatataagaaatattgcctacaaattaagaagtatcaacaaaatcatgttcaataacacaagaaccacaacccataaaatgatacttgttgttactgcataccttataggatcaccgtcgatgttgacttctcgttgagtctctagcaatgaatgagatgctgcagccgtctccatgttgtcctgaatgttgaagtacccaaaaagctggtcagaaaaaatataagaaatatttcctacaaattatgaagtaaccacaaaatcttgtccaataacacaagaaccgcaacccataaaatgatacttgttgttattgtacaccttcaaaggaccaccgtcgatgttgacttctggttgagtctgtaacaatgaatgagatgctgcattgccctatggagaattgccctgtggagaattgccctgtaaatgtttttttggacaaggactgagagatgaagcatctctctccagtgtccaataaatcaaggaactagttaaaaatgtatacctccatagggtcatcgggttgcggctccaccactgattgagatgctgcacccgcctccaaagtgacctgaatgtcgaagtacactcctaagtatccacaaaatcctgtgcacaataactatgcacatgtgccattatttagtttaaggattgggatgcagcaaccatctccgatgtgttacatcaaattatatattagcttaccttcatcataggatcatcgtcaatgttttcttcgggttgtgtctccaacattgaatgagaagcttcaaccgtctccaaggtttcctgaattatgaattatagaggaagatggcgtaaggacaatgaaaatttggtttaaggactgggatgcagaaaccctctccgatgtgttccaacaaattatttattagcttacctcccgcataggatcatcgtcaatgttttcttcgggttgcgtctccaacactgaaagagaagcttcaaccgtctccaaggtgtcctgaataatgaattacaaacgaatatatcttaaggactgtgacaataatttggtttaagaatggactgaggagatttggactgacaataatttggtttatatattagcttacctccataatttggtttaagaatggactgaggagattgttttttgttgcttaggtttgcacttgaatcaaactgattgtaaagtacaatagtcaaatgtgtaagaatctataaaatgttaaataaaatgtttgatgtgttgtgtttgtatttataaaagtacctggatttttccctcatcatctgcatcattgccatttggatccttgacaccagtgtcaaaaattggattgccttcttttgcatcatccttataacaatcatgtgattcaagtggagtatgaaagacatccatggggtcatcagtaatcacctgaaaaaatatggtgatggccgccacgaaggagatgaggtcgagtacccacaaggcggagctgagacacaatagggagattcttcaatggcctgaagcaatcataggtagttattgacgaccaactctgctccttcttcgactgaggtaagcacctcacttcacccttgtattataccatctcctgtttttattttgtttctgtgatgtgttttgtcctgagtactcttttctaaatttggtcacatagaggactgtgtgatttaagtttgggggaggactcaggaagtgtgtgttgcattgtatatagttttgagtctgcattcatctaaggcatagaaaaaaaaaacaaaaaaattgaaaaatttcagaaaatgatttaaaaaaaaaacagagtgttcatgtagttgcattacatttaggatcgagtctagagtgtttcatttaggattattgcatatgcatgggggataatgatgagatagccttgtaagctttttggttcactagataaacttagtgtcctcgttgttagttgtctgatgcgtagtcaattaaattgaaataaaactgcaccatgcctagattgctctactcgccacactgtcatgatttgataccattcccaatcaatttgaacctgaatctgatttagaattatcatgtcttagcatcgaattcgaactcatgtataccctacattatttggacttccttactcattttaaccactcttgttagtccaagtagctgactcccctcattggagcagttaaccccgaccctaaacctaaaccttctttcaagccatttatcacttgtgagtgtttgtcaggtcttatcccgattgagcatggtaaaaagtgttaggttcgtaacgatagagatagtgtctcatgtagttctagttcgcgttttcaggattggatagaactaggtgggcgcttatatcatgggttgggatgtgtttaaaagaaagaaaagggtgaattcattgttgataagaaaagggaaagaattctaggggaagtaagctaaagaagttgacaatggaattccataacgagctttgtttggctctccagaatctgctcaagcatcgattccattcttgtctcttctgtgggtggaggggaggcttggtaagctgaattaccataggtcctctgaaagtttctctaaggaaaggtcttctggaaagcaggctttggagtgtagttggaggaaccctggttctctgtaaacctgttgccactgaagttgccctgtggctgcccaaaacttcttgtatccctgaccatctatgtagaagactccttcctctgactcaggctcaggctcaatagtctcatcctcagctgcaaagtggacatgcttcttctctgtaagcaagttatgaaccgaatccagcttagcattcacctctgccatttgattacctgaaatagctccatcaatcttcttcctctcaaaatcagcattcttgttactgttgctgcaagcgaggttctctatcagggttgtagcatcagttgggtaacgtgtgttgaagttaccatttcttgctgcatctagagccatatggtatctccaattgactcctctgaagaaagtacctagaagttgtacgtcactgaaaccgtgatgtgggcagtcccgttggtactcattgaaatgaaccacacagccttttaagatttagctggaccctgtgtgaaggtagacagcttgtttctcaactcatcaaacttaggatcatcgtagaaattgttcaagaaggctatcttgatgcttctccaagtcttgagggaacctgctttaagttgtttcagtcaagaagctgcttccccagcaagtgaataagggaagagcttgcaaagtaggtagtcctctgagactccattagtcttgatgcttagaacaaggtcctcaaagcgctctatatggtccattggctgctcatgagataagccatggaaagggtgctgaccaactaaagtaaagtagcgaggcttcagctcatagacgttcctctggaagggtgggggtacgatcgctgatcaattagcatagaacaggttgggcctgttgaaatccccaagagtacgacgtggtttcgcagttggaggaatagctgcaggaatctggtgttggtgtcgatcgacacctctgttgtgtcgttcgacaccaactacatcgtcattctgctccctatggtgttgatcgacacctcttttgtatcaatcgacagcgagccctactgtgtctctgacagctatttgcgcgttgaggcgcgcctgattctcatcgacgtcctcaagtaggatgagtccatgatcattcaatctctgaccagccttattgtaggcttgcccatccttatctctcaaaactccttctacatcagctctgatgactctattagtcattgctaatctctgagtttttcggttggtgcgttcaagttttcccaagtccagtacagacaagttgataagcttcttctgttttgtgctctttgtttgcctaggcatacacctgaaacacaaaaaggaagaaaacaagaaacgcgtgagtaacaaaatagggaagtcttctagggcaaatttcctcttctgtaaactcgaaagcatctaggacttttactgggccgaaactgttgtcgatcgacaccaagagtgtgtcaatcaacactcctccctaattcctggatccaaaatcgtccttagcttccttttccttagctcttgctccaaaatgtctccttatctctattattgtctcagtgcatagaatacttgaaaagacactaaaaagactcgagaaataatataaagactcaagatcctatacctaaaacatagataaaatcagtgaaaactgggatatatcaggaactttagttgttaaagaaacccaaatcccctagaagtatcaaagttgagaaagcttctcctagagttaagagaaaagaaaagaatgatctgaaaaagggtttaaaagattaaagaatgcaaagggaagagttaagttcttatattgggattggagatgagattaccattagagctttatttgttatattctgggtagatgggatcttatctctgtatgcataacttgggacttacctttaacattctattaaagctcaatcatttttgagagatcccctgttactcaagcctactctttaagggatcatctttgtctctcaaccttcaccttagccaaatgagttcattgatgatgcattgaatcataacaaggcatggctaacgtttttgagtaaaatccgatcatatcgcatcttagaactaccaacttagacattgattttatctgctttatctgatgctttggttctgagtccccaccttcaaacctctccttcagctatgtcttcttatttgcttgaaggtaagcaaagactaagtttgggggagttgatatgtctatattttgcaagttttctatgttcattcatcatcgttttgagtctagtttcatatcattcatcactattttatatcattcctcatcattcttgcatattttgcatgattagttgcatgattaggatagctttgcatacatattctatttctgagttgttttcaagtgatttggagctattgacgagcaaattggaagaagagagccggaaccagaagacatactcgaccccttggtcgagtaactccagcagcacactcggccccttggtctagtaacattgaggccgttcttaccaatcactcgaccccctggtcgagtaaccacactccatgctactcgatgacaccactcgaccactgggtcgagtaacacttcgtcacacccctgaccaccactcggacattcactctactcgaccacgagatcgagtatcatcactctaccaccactcgactaggcactcgaccacatcttcaaattctactcaaatccacactcaactagacaagctgagcacaaggaagagaagaggagacgaagaagtgtttggaagcggtccggagcttcatccgatcacgatgcccatctcggcccattatcactctatgggacggtcgattaggtttccggctcatctactatcattttatattgttttgtataaataggtgtctgaggggtttgtcctgagacatctagtcgacattgagtttttgcttcagttttattctgttttactcgggctgcgccgctttgcttctgtaacttgtaattcgaaattttccaagttattcagattccgcatttgatttcatatgtcatcttgtatctctactctttatctctttactgatgcaatatacttgtttacctgcgattatgtctctgagcatgttgtctgagtagtgacatagagttctaaaggatgagatagaatggttgtggaatccgtagtgtgtagaatggttaagttttagacttgattgaatccctttaggactagttgtgtttactgcttatttctttcctgagatattcgatccaaagtattcctacacctagaatgtgttcgatggaatgcttgatccactagttcctgagatattcgtctatatcccaagagattggtcgtttagagcgtttattgattttattagtcggttcatattgcctgcatagttagattctattaatgagaattagtctcggctagctttgcttgaggatttctatcacgggagtgaattgatatgttgttgaacctgttatctagggatagcttgattgtgcttgttaaccatctgaataggttaggataccaccccatttgattgccccatccttaggaatttcttgtctatttgatttctctgttttatcgttatcgcttaatcgttctcattgcttgtttcttagtttttgcaattactcgaccaacttactcgaccacacccagtgtctggcaacagactgtccagtcgagtatagttgtttcattttctgtctgttactcgacctgttactcgaccacatcctgcttctagcatcatccagttgcggtcgagtgattttagtaattccgttagaatttctgttttctgcatgttcgcttaggactgttagaaatctcaaaactgttattgcttggcttgacttagtgacttctaataacatttcatttgtttgcatcacacctgattgaattgacacctaaaatactacaacgacatggttagtgttttacgattaattgagtaaaatcctactatcattaatcttggcaaatgcacatctaaatctgttttctcaaacatatgtttacaaattgatattccatttatattctccatgttttatttactaatatggtttactgttttcgcatggtgtctctgttaagaaagacatggtggcaaagtatgtgaacctggtgaatgttaatgagtggatgtttattgaaacctttgctcgtacccatgcttcaggtcaaagacgtcgcatacattgtagtgtgaataccagttccttgaaggtgaaaaagccgaagttttggtgtgatacttgcaagaatgccgtgacaaatgttgtagccaaagttctgaccaaatgaaaggaagacttaccaatcgattacagaagccaatcgagttggagataagaccaagttgcccttaggttatctcgataactttgctgaagatttgtgtcaacaatttttttcaatggatttgaatctcactttaatcatgtaatcactttacctttatattaatgactatgtaggaaatgcattaaatcaattagttcagaagctaagaaaggaagacttaacaaacgattacggaagccaatcgagctgcagatttgaccgttagaagctgccattctctcgatagctttgcggaagatttgtgtcaacgactttttgaatggattcaaattttgattggagagacaatcgtggtcttggatttaattgcagaataaaagagaggaagatttttttcaaatagatggtaacattttatttgcgtaagaagatacgaaatgaagacttaccaatggattacacaaagccaatggaactgtagatccgaccattagaagctggcctcaggttctgtctataactttcggaaaatttctttccacggttttcttagaatggattcgaatttggattggagagaaccgtggttttcttcgatttaatcgcaggacaaaacgatcgaagctttgtttaaagtagatggtaacattgtttttgttttgccttttccaattttgttttcttcctttcaaggaaacagactttagttttagtgggcttccatgatcttagcaaatacccattgaaaaaaacatttgttgtttctaaattattatagtgggcaaataccctaaaacctaaacaggtttcaagtttattgggctttattcttcattataattatcagcccaccacacaagcatatctaacaatgtcttattgttctaacaatctatgtt

SEQ ID NO: 203 - DNA, 98432 bp, Arabidopsis thaliana
gaattcactaaaggtgactttgtcaatcgtcatttttctccagattgggatgattatgatacattgttttacaatgcttggaagaatgtggataacctacctatacggtttgcggattttgatttgatgcgtcgcttgaagatagagaaatctgttttaggattgctagagtatataggtttgggaacaatttgtactaggtagtatgacttgtatcctgagctagtgtggcagtttatggcttctgttagggtttcctatgtaaatgatagggtgcgcgatgcttaggaaggagcccttattttcttcattcgtggtatcagataaattttaccgctcagggatttgtgtgacatctatggttttgagaatgatacttctcatgtttcgcttcctggacagtttgcagatgctcaaatattttggagcgaatttggcaatggaatttatgattccaaggatgttgtacattcaaggatttgttagcatgttctgaggtatttggctagactgattagcaacacatttttgtgtaagatggagcattggaagatgaggctttctaagttcttgctactttatcatgttgttcgtgacttctttcctgacactttgaggatggaggaagtggaccgcaatgtcaactttggggctgttttcgcgcatcacttggtctctcttaagaccaaaccctttacatgcacatggaagaagactgagcagattggtagtctcctcactcctatctttgagcattttcacattagtgttgagggggagaagattgtgaccaagagagccaccatggatgaggcttatttgaagagtactcactggcttaagggcagtttggtttggtgtttcagagattgcacagggagccatatgattcagttaccctgtcgtgcacttacaaatatcacatgagagccagaggagcttggctttcatcctgaaccttcactactgcaagctgcaccacgcactaggaaatagagaggtacaaccacatgatccgcgcctacaccgatagaggatgcgtttgttgatccttctaggggtcttcaatttgggtcctcttcttcagccttaccttatcagctgcttactcctgctcttatcccgatggagccagcgaactttcaacagtacgtagttgacatcttcaagagcatttggaacacaatagctacagtttcttgatgcggttgtgttgatcctactcgtcgctgtcgtcactctccagcacctacttttggttctaagcatgaggattagccatcctccctatctctactttgtactctgacttagtttttctttcctttgagacgattggttgtttgattcgaaacttgttgcacttatcatcttatgcttttttggacctattgatgtgtgttttagtgatttaacagttcagctagaggatccatgtgaaaatactaacctaagctctgcaatgccgagctgaattagcaaagcacaatagaaacgactagagtgtcgatcgacaccgcttcacaaacaaggtggcaaattacgtttctctaacttttcacttttgactatttttcttttgatttctctagcttgatagctcaggggacagtgttatctaagtctggtgagtcagttactaacttcattttttcttttcttaagagttggttgtgttgtttttattagagagttgttttattgagtcaaaacttttgtctcaaattatgatctttctttcgagtttattgtctggattgattaagtactacaaattcgatttagtccgactaatgaaaaatccagaaggcaaactgataaaattaaggacatccagttttccaacataatccaaaaggctagagccaatctcactgctcttccttttacctcttcaaaacagttagtgttcgtaggacttgactccttgttcatacctgatacttcgaccaatgtaaaaaagaaaagtactcgtctccctaataacactgtattttactcattttaggcatatttttatcatcatttagctgtgcattttttgtatcatatcattttgcaccattttagcttattttacatacttaggcatctatgatcatcttgcatacgcattgcatgttttggtgtgttttcaggtgcagaaggagctaaaaaggtctctactcgatccaggcaactacataagagacatcaattcactcgacctctttactcgatcctggcagctatagaggaggctgcagtgtactcgaccctcttactcgatcaaggcagcttcagatgaagcagcagattgatctattcgcccctcctactcgatcctctactcgacccatttactcgaccaagggtgaccaactctacaagaattgttgatctatcaaagcgtcttcggatcctcctcattccccactcaaccagacatttgagcatacggataggagaggaagaagcatctactcgatcaaattgatcactcagagcatagacacaaaggcgccgactttgcagcaccctcattactcgatccccaagatcgagcatttgcccaaaccgcctcaagtctctagtcctctagtgaatctagggttttcaacattttagtataaatagatcactttggggtttgtccttaggatccagcttttatcctttagtttttctttgtgtttatgaatcttcaaaacttaattactcttaatctatttcatttttgcatttagttgtttaagtaaagttgtttagcttgtttagatctacattttgatatgatttcagtaatttatgggttcgtgtttttgagaatgttgcttgagtagtgattagggttcttaatgatggattagattagggtaatctctaggttagccaggtggttaagattaggttaaaacccttctggattcgcttggcccctatgcggttttcgctagctaatgtggagattcgatcatatatgtccagcgtccaaaagaggttcaaatggatgtatgatctacgaattccagagttttgtagactcgaccaagacattatcttgtctgcttattggctttggtagattgtttcttaaaccttgctccgctatgttttatcaacgacttttgagattaggaagtggtagagttatgggagtctctgtcacgacagtggattgacctagtttttgaatctatcgtcaagggtatctacctttcacctattagccatctgatgaaccctagagttgcccttatcaatgaattcatccttaggacttctattatatttatttgtatctcctgttgattgcacttttatttacctgttatttgtatcccctgttgattgcattttagttacttaaattcgtcacctgttggttttactagacctaatgatcgagtagggctcttaaattctcatttttacttgtttgaatcctgacctaggattgttactagaaacccaccatcattataatctggcttgacttagttgcttctgtacacgtcttgattgctagcaataacagtggactggattgacatcccctaaagctacatcgacatcccctatagctgcatcgacatgttagtgtttgtaggggaatggaactgaacctctcacacattccgcataaataagtaggcctaaaaaacctacttatcaatttggcgccgttgccaattcctttttgcattgttacattcaagatatcagaaacttttaagatcaagttcttttccatttatcaagttactaactcatcttttcgtctacttgtttttatggtataggtactaatctttgtgcatgcaaactcgatccaaaggttctgcaaacctactaccattcagagacagaatagatagaatagctcgtgagttacaagaaaccaatagctcgtgagttaatagatagaatagctcgtggctgcaaacctactaccattcagcctgtgatcagcaaagaccagctgctatggatcaacagaacaaaccagttgacgttcaagacccacctaatattgatcaaccaagaaacattggtgctggtgatgccccaaggattcatcaccaaagacaagggatagtgcctccaccagttcagaacaacaattttgagatcaagagtggtctcatctcaatgatccaaggaaacaagtttcatggtctacctatgtaagatccctggactatcttgacagcttggataggctatgtggccttaccaagatcaatggtgtcactgaagatatgtttaagatcagactatttcctttctctttgggagacaaggcacaccactggaaaaagactctacccccagactccatcaactcatgggacgattgtaagaaagcttttcttaccaagttcttctctaatgctcgaacacccagattgaggaacgagatctcaggcttcacacaaaaaacaatgaaactttctatgaagctttggaaaggttttaaagttacaccactcggtgccccatcatggtttcaagaatgcttcattattgagcacactctacagaggagctttaccaaagatcagaatgcttctcgacaccgcctccaatggaaacttcctgaacaaggatgtagtagaaggctgggggttagtcgaaaatctagcacaatctgatgggtgctacaatgaagactatgatcgctcagtgagaggaactggaggtagtgaggataaacagagcaaagatatcaaggctctgaatgaaaagctcgacaagctgttgatggctcagcagaagcagatacactacatcactgatgaagagcatttccaaatgcaagaatgcaggaatgatcaaactgaagagctgtgctacatccagaaccaaggagggttaaacaaggggcacaacaactacaagcccaacccaaacctctcctacagaagcactaatgtagctaacccccaagatcaagtgtatccacctcaacagaatcagtccaagccttttgttcagtacaaccaaggttatgtccctaaacaacagtttaatggacgataccaacagcagaatcccccaccagggttcactcaacaaccacaacaagccccagcaactcaagatcctgacattaagcaactcattcaacagatcattcaaggacaagctactggagctatggcttttgacaagaagatagctgaattacacaacaagatcgattgttcttacaatgatttaaatgtcaaattcgaagctttgaactcaaaaatcaagtatgtggagagtcaatttgcatcaacctctgctccgaagcaccctcaacaacttccagggaaagcagtccagaatcctaaggactatgctactgctaatgctatcactatccaccatgaagatgagtctccatcaagtcattagactctcaatactgaggacattatgattcaagaaggggggattcaactcaaattgctgcacctgccacccaacaattcatccggactatagagcacacacctttgctgaatactcaccattctggaaaaagttcaaaattgaaaaactcaagaaggaccagaatcaagagatgattagcagtgcctccacccaagaaacatacaagaagaaagtcatccaagaaaagcttgatgatcccggttcattcactctgccatgctctctaggaccattgacattcaatacgtgcctttgtgattgggtgcatctgttaaccttatgcctctctctacagctaaaaggctagggatcatggaatacaagttctgcaacttagctttacttttacctgatggttatgttgcacatccacatggtctaatagaaaatctgcttgtcaagattaaaaatgttgagatacctacagattttatggtattggacgtagatgaagaaggcaaggatcccctgatcctagggagaccattcttagcatcagctggagcagtcatagatgtcaagaatggaaaaattaatcaaaaccttgaaaaaggcatcaagatgaagtttgatatcaaagaagcttcagggaaatcaacaacaggagttcagaattttggaattcagaacatggatgttgatgaagaagtagaagctggaaccccaccaagagttaactatacttctcaacttagcaagctgaagagaacttttgaccacaagaggagagcaacagaaaggctagctcagactgaagatcgtacagaagatgactggtatgagatgagaaaaaatttaaatggcaaagcagagtcataaagggattatcttcaagggtgatgaagctgaaagatcaactatggatgtttgaaaaaagagttaataaattttcaaatggtattgacccagagaagatggaaactgcactagctatcaaggaggacgaagatttcacaacagaatgggttgcaacagaagatcagaaaggagtttacttagaggaacgaagcctagagagcaagttgttgagtgaggaggaaatccctattccgacttatgctccaggagtacctaaaccaaccaccaacccttctgttgaagaagaacactttattcttgattctgttactgaagaactcctggagctctgggttggatacaaagctcaagagaataccattggggagctaacttacaagatggaaggactgaaccatgcaatcttggaacttcaagaaatggttaaaggctaccccagttttgaatttgaggattggtcaaaggaacctggttcagaagaagaagattactctgctgatcagaaagaagcttactttgaagaaaaatcaaataagtactcatcctaccatatatcaagagaggatgcagagtttgattcaagcactaaaaattcaacaacttaagatgaggacttctctgttcctctcttcaaccttttttctgactaaactctgtaagagtcaagcttagtgacttaaaacaagctcacttgggaggaagtcccatgtctatcaatgtatttaactttctattttttttgttatttttgatgttttgtttaagtgattcagttttatttcatagaccatgatggagtcaatgtggagattaggttagaacccttctggattcgcttggcccctatgcggttttcgctggctaatgtggagattcgatcatagacgtccagcgtccaaatgacattcaaatggatgtctgatctacgaattccagagatttgtagactcgaccaagacattggcttgtctgcttattggctttagtatattgtttcttaaactctgctctgctatgtttcatcaacgacaattgagattaggaagtggtagagttatgggggtctctgtcacgacagtaaattgacccattttttgaatctatcgtcaagggtatctacctttcacctattagccatctgatgaaccctagagttgcccttaccaatgaatccatccttaggatttctattatatttatttgtatcccctgttgattgcacttttatttacctgttatttgtatcccctgttgattgtattttagttacttaaattcgtcacctgttggttctactcgacccaatgatcgagtagggctcttaagttctcatttttacttatttgaatcttgacctaggattgttactagaaactcaccatcattataatctggcttgagttagttgcttctgtacacgtcttgattgctagcaataacagtggattggattaacaccccctatagatgcatcgacatgttagtgtttgtaggggaattgaactgaacctctcacacattcagcataaataagtaggcctaaaaaacctacttatcactccccttataaaatttataaaaaaaaacaagagattgatacgatttttggtagtgtataggggtaggaatgttttccatgaccctattattatacattattaggaatgatcaattacaaaggttggaaatatgttgaggatgtaaatctagtaatgcgagtacacttttgtttactcttcaaaaagaataagtatgagggagagaaagaataccaaaatatatatatatatatatatatatatatatatatatatatatatatatatatatatatatatatatataagaatagtcgattttattatggtatagtccaggaatgagtctagaaagttcttaaatattagcttgattgatgagacccaacaatgggaacctaatggatatagttgtgagatttggtttggaatctaggatgttgtgtaagttagcggagaattacatggtggttaggacttgactagaactatttcgtacatggaattggtttgtatgattagggtaataagctagagagatcggaaatttcaatgtttttaaaaccttttccagatattcatttttatgttttgcttgagggtaagcaaaggctaagtctgggggagttcatatatcatggttttttattgatttttaacataattttagaatatattttagagtctttctagtcatttttgtatgttttgagtcattacaagtgcaattaaacatttgagagctatggagcataataaggaactttggaagtttttgagcaatgaagactatcagagactttttcacaagatggtgtcgattgacaccacatctatgtcgatcgacactcttattcggcaaagggaatttccacgtttcaccaagtctttaaggagttcctgaagttttccctatttgcaagatagaccctgcacgtttttagtaacttatatacataattttatggtcattgtttagacctaagcttgtttttaataagagatacacttttggagagaataatccgatccctccaaacaagatttgaactccttttactctttttcatattataatttaatgcaatttattcagattatgatttgtgttcctttgatcatgtctgagtaatcaccttgttgggtttagggaatctcactatggatttagctgaattagtagatcgataaccccttagaattagttttagagttcttcatctataattgttcttactgctagttctagattgatcacctatgacttgatcttagatagtaggtatacccaccataggtacttgttattagaactattatggatgagccaacgtttataggtgtcccaaataagatcagtctatttatttaggtgaacttatcaaactcgattagcatgtatatttaggtgtaggattttacagcaaatcaccggaaatcgtacctttaggcatagtgagtttcacagaacatcaccggttattctataattagagtttgagttcaaaaacggtttgataacaatcctaatcatatttagatctacaatttatctatttcctgagactatcactagacctgacgctttaatctcttgaatctgcaactcaatttactgttttattgtcttttacttttatcaactgtgtctagcttaatattagtcgtcttaagtttattgtgtgaacaacgagagcttagtggaattcgaccctttagtgctaacgacggtctcttatttgagggagtaagcctaaggcagtttgagctatatcatgatgatgttcatgttaaaatacatttggatttattttaaacataacaaaatccaaatgtcccaaataattaaataatatatatttactttggttgctgtttctcattagtattaatgaaatttgtttcaatattatttatttatttgataattaaataatagtttcaaataatttatatcattcttataggtcatcaagtatgtgacttgatcatgaaaccctataagtagaaaatgaaataaattattgaagtccctagtcaatgttattaaattaggacattaataactaagaatgactagtatgtgaggtgactgatgactaagtttcatgaagtcattaatatctggtattaaagtcaatcacataaatatgtgttagagaacacaatattggacttacctgttgtgagaactctacaagatttttatatgagtgtcataagagtttctcatcacaactatagagtatagtactttgaccagagttcgtcatgatttcttattcatggattagttcgctttgactctgtcaaacgtcagccgtaaaaggtaattataaagaaagtgattggtgcgttatgaattgtttaaggaacagggatggaaaaggatgggattagtccctcccatataacgggagataaatatctttgggcctatcgaagatctgagactgagaaatgtgtggtcgtgctcaaacgaggtgagtgttagtcgtttgttttatcagtataaatcggagttcgataaaaatgatctagttgagtaatgatgacaatttctttccttatgttgagatcgagatatagagacaaaaggattatgaaaatagatgattccaatacaagtggaagattgttgggaattgtcctgaaatcagttgtacttttctctagttaaagttgtaatgtcgagatttgacatttgtataatattagatggttataatgttttgctagagaacgcttataatttatgagtgtaaaactcattactaatattatacaaatcggtcacagacttaaacaaactggataatatttaatttagattaaatagaattttgtgaattatctatttataagataaacagaaatagtaattatataatatagatgtgatatttatttctataaattcccatagaaatttattgggcttataaatatctattccttagttaaggaaaacacacataatggccatgtccatgagctaagcctaagttaattagggttttatatgttgcatataaaagctataacacacacgtgaaagaacgattattattcaagatcggtggacgtgagaagcctttctcattggccaacgaactagagcaaaaacataaaaaagtgtttcttgtgtttacaagtccaaaaacgattcgtacgtgatggatttgaggtaggatctcggcgttactagcatagcgtttaatcaggtttgtgtgcgtgtggatatcggtagagacacaatacttagaatgctaaaataatattgatagaatatagttcacttttctgctgcgaaatatctatttattttcaaatcctatgatctagatttaatttatcgtttacacggttcctcgtaatttaattcattattagtatttataaatcattataaaccggtacgaattgttacacaagacttaatccatcatcttggactcaaaagtgctcgacgaagcttatcaccgcttcatgcggaatttgattccttgttatgggcaatggaatgcatgacctcgattggcaatacttctggcgcttttgcttccgactgcttagacctgatttttatcattgacaatcaagaagattggctgatattcacagcggaattggcatcatatcgctccttagtttgtttttttccttattttcgtattagattttttcctcgtagttctaatactcgagcagattgtttagctaagaaagctcgggctcgtaataactttttttccatgtaagcacatcggttcctgaatggtcctctctagcgtagagtctcttcccgataacttaatataaatggtgtttgatggaaaaaacccggtatgaattcctacaaaacatatataccgtatgaacactcacaatgattgaaaatcttcaacttcttgaatatcaacattcagcgtatattcggtgtaatttgtgttacatatagaagttttgccttagaaacaattcagtgttaagatataagaaagttccaatcaaaaggtatatatacgaatacaaatttaataaaagaatgaaaaatacctttgtaaatatcaacaacactccatcaaataatacaaacaacaacttatttttctaatcctctccacatgttatagaaactcacaacatctatgccggttaactcacatttcaataggaaaaaagtccgaaaaaaacctcatctattttttatttgcccgttttatacctgcattattaaattatacatactggcaaggacactaagtcactacaattttatattagcttaatactaataattatatacttaacatgaaatgtataaattatattcattcataaatttatatttcaaattacatgtaaaatacttctattagctttttaattatgtaatgtgtttttaaaggttacatcattgattagttaccattcatcataataatatctttattatgtttttcattttctaatcaccattcctcagaaacaaatatgttgcaattctcattgtcattttttttcttttagtagtcactagtcaaagtctcagttgtaattccacacttgttgagaatatttattaaaaaagtattaaaaaaaacaatttaattatcacacaaatatatataaaatgaacaacatacaagtttaccactacattaaaagatatttattaataagattttacaaaactcaaaaaacctaatacatggagagagagaaaaaacctcaatggtaagagattaagatattaaaatatcaagtgaaggtcattgcaaacaaaaaaaagatgaaacttgattggatcgcgaaccaaaagatcagttcccatttttaggtttttgattttcgatccaaggaaactttacctcccttgtgacatggttgtcattattataaaatgttcaagtaaaataacaaattgacctctatataaaaactattaaatagtacaagatctaagatttaatactcagtgattatcatggctaggaaaaaggtacgacttgtagtgataatcatggaggttttgattcacgattcaggcaagtctcaccttcttccatgccatggccatcactcataattatctctcacttagatttgctttattttctttgtggtataaaaagagagtcatgcacttgttatcttatatagaaagaatcaaggataagagataaagatgtgagaatccaaaatattatgaattttaacaaatattagataagtagaaaatctaacaaaatccgaaaatctacatatactatttttttatgttaataccattttagacttaaaatttttttgaatggattttgttggaaacttaataaaaaataagaatattattctattttatacccttatgtttatcttcatctttccaacttttgactcatttttactttcactttctaggtattttcatctttccaacttgtgattcatttttacttatttcactttcactttttaggtttgtaaatttcattacacttatacagctatcgacacctaaaagaatttacagtcgtgttcaggaaagtacaaaccccaactctttctacgtttgaatttctctccccatgcacttccgtcttctttcatgtatatttctttgtcagttttaagttcatgtttgtgtatcgtttttgcttgatcctcctataaatcaatatatattgccttatatacactacagaaaaacagttattattaccgtctgaaaacactatcatttaatacaatagcggttatagaaacgctctgtcatcgaccgcaagatttattcttctttgtcccttcaaactctaggtcatctttctctctggacatatcttagtttcacattatctataaaattaatactgtagaatgagtatataaaatacgtaacttgcacatgaacaatttgtataactcttcaatttctattacgcatcttctttttatgttttacttcttttgattgggcctatacaataacattttgtgtctttttttgcatgagtacattaatgcataagaatgacaaatggacatgggtatgaaactggatttttttttttttcatactgaagatgaaactagctctgcaaatatatgctaagtttgtactattgtgtttctggttttgactagaaatattggcttatgtatctggtttttatgctggcatttaagaaaaagttggtatcataggatcaaatataaacaaaaatattttgtaagcagattttgttgttagttggatatagttttttagaattcttattgcttttataatccaaaaacctagtcacatcgtccaattaagtattttaggatatatttttcctagctaggtaaacaaattcgctctttacaatttccattttatttggatttgataaatgtcaaacaattattttgatttttaaaaaatgtttatcacttactactaaacttaaggtatgacgaaatgaaaacatttgagttttaaatcagagcaaagatatatatcttgtgcatgcctagagatttatggctgactagggttttgatttatacttatttaaaacacgtgttttatgaaatcgaaatataaaacacattttagataacacattggtgttattatctgtgctagaaaattgcagagatttgtgtcctatttgtagttactccttcatttcattgagcagagattcaaaactctcttattaaacattttttttactaggacatttttgccgtttttgtttgctcctcctactgttcaaaactcttaaaaacatttattttagtattcagcccaaacgggcaatggatgatgggcttacaaagactgcacggttacaaagggaaacaaaaaaatcggcgaaagctctgatgactcgacatacgaaatgctcttcccctcccccccccacccaacacaaacgtacttgagtagattaaattttctaatttggatttgaggagctaaccatattattgggctaaacgttttcaaatctaatagctatattgggatcatttctaacaaataaatatattcattcaatagtaaaaaataactaaaacatactaaaaagagagaaaaaataaaaaaaaagaaatgttcaatgatcattattccacccaaaatatcattttttaaataataaaactgcttacctaataggctgaggtgattttgagttttatggggtaaaaaatattaacgattttgagggtcgatgatctatataattctttatttattattattattattaatttatatgtttttaagtctgatgaactatgcatattaccctttaagatttaggggcccaagcaaatgttttgtctggatctccacatggctggcctcactaacatggagacggtaactgcaagtgtaacttcattttttatttttattagtttcacctttattgtaatatataccatttagtgccaaagaggaaatcaatataggaggagttttaacttgagttttcctatatacgcatttcatattcattttagcacaaaactcatttagaattatttgcatcgtgcttgttttgttgtacgagctagaaacatcaaacaatatgattttactactaagcaatccattataatgaactactaccatgtctcatcccctaatattttttttttttaaagagtgttcaatagttgcctatcatatgcaaaatgaacatgactctctacaattgtctactttatataataataccaatgtgttatctaagaagtaatttttatttcagtttcaaaaaacaaatgtttttactctgtaagctttaaagaagcataaataaaaatcctagtaagacctaaaaatcaaagcatgcacaagatatctatttttgctagatgttttaactctgttatatcttaaatttagtaagtgacaaatattttaaaacaaatcaagaatattggttgacattgataacatctaaataaaatgaaaactgtaaagagaaaactggtttacctagttaggaaatcagaatcctaaaaaacttaattgaacgataagattgaggttttggattataaaaaccaataataatactaaaagtatatccaactaacactgaaatcttgtttacaaaagatttatgtaaaactttgatgctattataactactttccttcttattaataccatggctcttagtcacaaacaaaaagcacaaaaatacaaacctagcatagatttgcagtgctagtttctgcctcatttagtagacgttctatgcaagctaggtaacatatctccctcataaaatttccgcttcgaagacgtatacatggaagtaatgattctcactagatctaaagctagtctgattttttaaaaaaatctagtttcatacacataaccattttttattcttatgcattaaattctctaaagagagtacaaaacattgttaaatggggttattgtcaaaacatggcttttttgctaaaactttgattttgggatctttccattagggatttgaaaaagagtactttaagaacttggaattgacgtttttctcctgctttctttcttcttcttctttgctcatcttcatcgttctttttttttcatgatttcttccttttttcatttctctataaaattcaaatcatttttagttaatgaaaactaaaacttaattatgggaaaagggaacccaagcaactaatttcatgaaattttgtgatagaaataaatgtgtttgtgcttattccgattttttttttcacttctccataaaattctaatagtttttaattagtgaaaactaaaacctaatgatgagaaaagggaacccacgaaaccaatttcatcaattttgtgatagaaattattgttttattcttaatatgattagtgtgtagattaattttggttttagatttcttcaattgtttctggttttgaaagatttgcacttgattcatttttttttcttttggcgttgaaggatttgctctagattactaacctatgaagattcagtcttagttttagtgtgttcttaaatttaatcactgaagaacgtgattagatgttcatttgggttattgtttacattcatgtgggggggggggtaaaaatgtcagttcaaactgacctgatttcgtaagtcattaagaaagtacctgatcttataatattttaagttttttaagctttctagataaataagtcttgttaaataggcgcaatccaaataaaagtaaagcataatggaaattgaagagttctaaagattgatcatgaacaagttcttttactttacgaactcattctagaatataacttttatggatgatgttaaaatgagatatgtctagagggaaagataaagagctacaattccaagtaacaaattaaagaggaataaaagcggtagatatatatctttaagaggaccaaacaccaacggcacgcaagcagagactagtggccgacaggaaatatacatggaagaagataaaggtgctgagagatattcaaacaaagaaagagttcgggtttatatttttccgaacacggccataaaagcttttaggttttgacagaggtataagagaatcacttcaatataaacgctattactttctcaaaatatattattgtagtataatattattatttataaagattaaagtataaaagaacagtttacacaattataataaggcatgtgccaagatacgtttttatggtctctcaattgagaaaggtttctcaaactcactcataatttagtatctatttttattttttgattggtcataacccttgttagaacctctggatgagattctcttaaatgaagatgaaatttacaaaacatagaaagtgaaagtgaaagtgaaaactagccacaaaagtggaaaacatgaagataaacatagaggtataaaaatagaataacctaattttattcattcagttttcaaaaacaatattcgaacaaattttaatggtattaatagaaaaaatagaatgtgtggattttaagattttgttagattttttttcttatcaaatatttgttgaaattaataatatttggattctcacatccttatctcttatccttgattcttcctatataagatcacaagtgcatgactctttttttacaccacaaagaaacataaagcaaatctaagtgagagtgatggtcaggcatgaaagaaggtgagaattgcatcgtgaatcaaaacctccacaagctggatatcttgatttcctgatcaacacaattcttacttttttcttgttattatcatcattgagtactttaatcataaatcatgtaagattgaatatttttgacattgaggtcaatttgttagtttacttgaacctaataatcaatgacaatcatatcaaaaataaaaaatcctaaaatcggttttctgacattttggtttcacaatccaagcaagcttcccaacttttttttgcaataaccttagtatttttttttctcttactattgagtttttttccgatgtattatggttttcgagttttctataatcttattagtatatatcttttgatgtttcttgttcacaaagattacataatgccattcctctattttttggatccaagtttactaatgtaggcaaccctatttgactaagattctcatagtccttttgctctattgacgaggcatattgattaagaggcatcacattaccattaaaagtggtagtttgagcttgtttcaggtgaaacttgtatttgtgatgttcattgcctcataaaaggtagcaccaacattaaattttgagttgatgatatccgaaaacaatgtagcgttcgaggataatctatacaaaataattgtattagtaaaaaaaaactaaaatacatcaaaaaaaaaaaaacaataatcaacgtcccaaacagaagtatcatttgttcttgttttgtttatttacttatctaacatggaggggataactgcaagtgcgactaagcgctcaatttctttcttatttagtgctcaaaagtaaagaaatattgaaaaagtttcagtttttgttatcctaaacatgcatttcatcttcatttggcaccaaaatcgtcatgattgtttggacgtgcttctctcgatgtacgatttacaaacgatcaaacataaatgatattacaactaattattccattgtgaagaattggtattctgtcaaatgccctagtgttaactatttttaggagtgctcaacaattctccaccgtatgtaattaaaaaggacatgactcaacaattgtctttctcgcacaataataccaatgtaatcgaaaagtgctttttgcttcgatttcaaaacaaaaatatttttactatgtgaactctaaaagggataaataaaaatcctcaatcagaacaaatctccatgtataagatatatataaacattagaagacgaatcaaggataaacattgcttggcattgatcacatgtaaatatttttcttcaagagatgtcgtgatataaaaagagtttagtttttcaaataaactgaatacctaaaagcagtaactatagtaaagactatccaactaacattaaaatcttgtctatggaagatttatgtaaatctttgatgcgataacaactttccttcttaaatactatcatttatactcgtttacttaaccattaaaaaaattagaaacaaaccatttactctttgtcaaaaaattgagaagcacaaaagtataaattgcgtagatttgcatagctagtttcttcctcatttagtagatgctcttatgcaagcttggtaaaatcttgccttcattagatttccaattcatagacgtgttatgggaagtaaagattctatcagaagacgtaaacttcgaagtatgagaagaaatttttttaaatccattttcttatgcatgaaaacttaggtcattcgtatgcatcaagtttttcacaactcctacaaaaaaaaacaaaaaaaaacaaaaatttgttgaataggtacaatcaaaagcatagtaaatcatgaaaacaacgatgaacaaagaaattgaaaaattcaaaaagactgataatgcaaatttatatattatgaactcattctataatacaaatattataaattatgtgaaattaagatgtgtataaagagaaagatgaagaactacaattataatcaacaaagaagaatacatgcaatagatatgtaccagtaggaggagcaaacaaaaaatggcatgaaagtaattaaagacttttagacaacaaacaagagacatgaatgaagacggaggtggcgagaaagagttaggggattgtatttcccccgacatggctatattcttttagggttggacaactcgaaaagtgaaaatatattttacaaaaacctagagtgaaagtgataagtgaaaacgagtcacaatgttggaaaatgaaaatgaacatagaaagaaaaaatagaatattcttattttagtcattaagttttcaaaataatctattcaaacaatttttgattctaaaatggtattaacacaaaaaaatatggtatttgaggattttcagatttggtcaaatttcctgctttttataaatatgcttaatttgagacattgaatatagaaataaataatatttggattctcacatctttatctagtatcattgatttttcttatataagactacaagttcagaccctcttccacattacaaaaaaacatatgaaatctaagtgaaaatgattagtaacggccatggcatgaggaaggtgaagttttcatagttttcccgccttgttgtcacggatccaagcaagcttaacctttcttcttgccatgaccttcactgagtatctaaattttgtaccattataaaaaaaatcatgtaaacgtcaacctgttagttggctatgtcatgagaaaactgaggaaggtttggatcgggaaacataaacccgaaagttagttttctgtatttttagttttcgatccaagcaaacttcaaacttcatttttccataatcatcattaattatctaaatattgaatactttgttgacataaaagttcatttgttagtttaattgaaattttactaatcttagtatcatctcgggtacgtctagcatatgtgataagtaataattttgtgtaataaaaaaacaacttgtgttattattttatattcatagtgtatgtgattataaatatattaatatactattttaaatatttattatatactcttttatatttaaaatgttcatatatcttttattaaaaagcgcaaatcctatacaaaaatctaatatccacaaagtaaaatataaatccaaaaaaacttaattgaaaaacatcatccattcatggcctacttcttcatagaatccaaaaaccaagttttgtgggatttcttttaacaatttaggtgacattttgttttctttttgtttattaatttaaatatgacattttcaccatttaccaattcatccaaaactaaaaccctattctatgggtaaaatccaaaactaaaaattaaaatagataacttaaaattttttaaaaatataaatattatgtagaaaaactaaaaactaaacaataaccattcaagatattggaaaaactaaaatctacaacaaaatcaaaaactcaaaaatcaaaaatgattaaccaaaatccaaaaaccaaaaactataaaccaataaaaaaactacaaaacattcagagccaaactataaagtttgtatttctaaaacgttcggagaatctgtttactatatactacgttacttaatcacgttgactaatttattggatttttacacttttgttcactgaatagtttacaaatcaaacatggcaagaaaaaacgaatgcgaaggaggattgatcgttttcatcgcctatttatattttataccttctttcgcaatttttccatctttaagaatcatttataggatattgatgtggtgtcaaattagacctaagctactctctcaaataagagatcaattgtaatactttaaagtcgatttcacaaagttcttttgttcacacaataagaagtagtctcgaaattaagctaaatcaatagtaggaaatttaaaagaaacaagtaagcaaagcagattggttttaaattcagatgattaagacgtcagatttaggaaaattctcaggaaatagacaaataatgaatctagctatgattaagatcgttatggaaccgttctagaactcaaatcacttaacacatggccaaccaaccctccccgtattgactaactatgctaagcaataggaattgtaactctcatatgtaaatccctaatcctaaacatgcactataatcatgtttgataagttcacctaaaagctaaagcagacctacctctatctagctactaggcctatctataatagttcaagttaaataagcgccctctcggattgtacctatcaacctaagatcaaattctagttagctactctagaactaggagtaagaacaattaagatgaagaactctatagataatcctaacaattttatcgatccaataattcatctaaatccctaatgagaaccatcagcccaacaagtagattactcagacatgatcatagaaaaaaaacatatttgaataagaaaacataaagaaatcaagagaagaaaagaatttagaaaatatctcttcactatagggttttggaatctttaaaaatctcttaaacctctcaagacttgattatgaaaaacgttatgacaagttaggtctaaacaaccaaaaagagtatttatatgtaacaacatgagctggggtttctttgcaaatagaggaaattctagggtaaaactgcagttcttcaaaactttaagccgtcttggacttgtgcagggcagcaaacggtgtcgatcgacactcttcagttggtcagaatttgaattcgtcctttagcttaattccttatgtttttgctccaaaatgttccttattctccaaacgcatcgcgatcctaaaaatacatgaaaaaactttaaaggaaaaatataaagactttaaaatctatacctaaatcataccaaaaaccggtgaaaatcgaggtatatcagatgtggcacatattaatcaaactcacaactctctttcgtatcggtattcgtttatgccacttgctttgctttctcatttctttatctcctctcaatattagccttaatactatgtaatcgtcaactacgacatattgaaaacaaaaccaaaccaacacacaatacttgaacttgagaatatattaattcaccaaaactttgcacgattattatagttaatcgtataaatgactaaaactattatatgtgaagcaatttactcatacaccaaaccattcttactatcccaagctttctccttcaaacgcatatgtgaccctctccatatgtagttcgttcttgggttaatttgttcattgctatggtaatcttttccaacgtctaatcttcttccatgccgttaacaccctcaatctttggaagcccattatcctttttctcctcctctgtcttgacacatattacaagcactaagcacaagcacctataaaaatgtagaaatatggttcgctaattaaatccaaactcacaaattattttttcctagtgagatataaagctcttcagacgaaccataacatgtagaaacaaatcatatatatgaaaggaggctaactctctcccacaacttggcacatcagcacataagagcttgccacctatactttataaaataagtaatacataattagtaattaatttaacataacaactaaaataggaggatataattaataagaacttgaacaatcactctttctacatttttttaattcaatatattctctttaattttgagatctacttaagtggctaaagtgatcttaaaatccaaacatgctacacatatttcttgcctaaaaattagatgattattatgaaaaaagccatatgaatatgtagattaaatatatctaagctttttaagatttatgctaagaaaacaagtaatttgaaagatgtttgaggagctatcatttaactaatacgtaagatataagattatgataagaacttcactaaactttccaagaacatcaagttgaatatgattagattgaatatgcagagacatggttactaaagacatgttatatttttagtctaagaaataaattttctaaaatttcaccatctcacaatctaaacatataaccaaaaaaacaaggatatacaaattaaaaaaaaaaaactgagaatctagaacaacaataaaaaataactaaagcacattcgtttttcagatgaactaatatagttggacttttcaaaaacaattacaaatcatatttatgtttcaaaaccgatgcattcaactttactttatatgaacatacattatataaaataatttgtaaatagtaatatatagacccgcacgtagtgcgggtacttatctagtactactaataaaagaagcttgttgaggcttctcaagctaggcacatcaacaaataagaggtttttaaaatcatgccacatcaacaatttataattatgatttaattgtgtcttagagcttaaataacaaacaaaataaataaatgatgtatctaagaaatggaatatatgttaaggtatgaagggtacctatttactattttcattctatagtactgatgctttatatatgttaaattttaattatacaattcaaagtcatgatcaaataaataaattctataattctatgaatgaaaaataaaataaaagcattaacgtttaagatgaaactaacacttaaacgccaaaagaatatactttcaatatctacatatacatttttccagctattttgtgaaacaaatcctggagttggaacttatttacaatggttgccattgacttctaattattaattttttttagcaataaattgattaacaaacgaaaaatattccaaatatattccaatcccatatatcaagcagatttttccaaaatttgaagtagatttcggcaactatttaaaacaaaaatgttgacaaactaaaatacaattgcaatcccttaaaatgagctaaacgcacctaaatacatttcttatcgattcactaaatcttagttctccaaaatttgaactagatttcggcaactatttaaaacaaaaatttgtttgacaaactaaaatacaattgcaatcacgtaaaatatttattttaattatatatttaattagcggtgtactgcgggttttttacgggaccggtttggcgagacgggtttggaagggctttacttaataacaattgtaaactataaaataaaaatattttatagatagatataatttgcaaactcttatatatattaatttaaaataaataaattgtcttcgcggtataccgtaggttaaaatctagttgttacaaaaaaatgaatactttcaacaaacattaattcgaacaaaaatttccacttgcattaatatttatggctaaacaatacactttaacttttaagaatataccttgcttggatgcatagccatttgattaacgatcaattgattaatccatggatatccaataataaatttttataaatacatagattcattttgcaaatatttccatattacaattcagtgcaactaaccacaatagtgaggttatgttttggtgatctattagttaacgagaatattatacttcacaggaggataagtgtattccgaataagttctttttatgaacatggtttgcagtttcacagatggatctctctgagcagcctcatgaggaagggtcacaggaggaagtaatgtttaatgaggagactaaggagagtgataatttggtggaaggagtactaaccaagggggaggaaaatggattagaagtgtcaaattcagaatttggggatgatgagcagcctgcaaagaagaaagcggttaaaaataaggctacttttccgggggttaactcaaggaagagaaacctaacttctcctcgaaagaggacgatagctaaggcaggtggcccacctgtgggcactagctctcttcatggagagcgaactcctttaagacattaatcggattgtgttacaaactagtttggatggagttgagaaggataagtgtattccgaataagttctttttatgaacatggtttgcagttttttgttctttttaaatctaggtattcggttgaaccgaagattttttgtaaggtttctattttttcttgctgtgatgattcacattcacaatgctttgtcatttgtgagattgttgtaataaaaggaataaaagctttttcctttattatgtgttttcttttggttattgaggatttaccaacttatctgagggtcattgttcacgtttccatttttggttatattatcggtcatggtcggagagtttatctgttacttaaggatagaatcttttttaaactatttccaatcaggattgtgtgtttggaatttgccacattgctggcaacctcgaggaaagttaatttaatttttttcaacacatctttgtgttcatttcgaaggtctttaaacgggagaaggggcctgaaggagtttaccataaaaaacttgaaaaagctatgatgattttaagttggaattgtcttaggaaataaggcaaccattggttatttgagggatcattggaaaaaacatcgaccggacattttatttttatcggaaacaaaacaatccacgttatatatggaaaaatttgttggtcactttggctataaaaatttaacaacggttgaccctattggttttagtggtggattagcttttttttataacaatgattttaatgtttcaatcatttttcaaagtaaccggttaattgatattgaagctgttcataaaggtaaaactaataatcttacctttatatatggagacccagtaccaaagaatatagatcaagtctgggaacggttaacacggattggtacgactcgggatacaccttggtttttaattggagattttaatgaattaacaggtaaccatgaaaaacgagggggcagtttaagatatgcttcttcgtttataccttttaatttaatgatttaagattgcgggcttttggagtttccttatcttggagattggttgtcttggcggggttggtgggataaaaaaccaatacggtgtaggttggatagagctttagctaatgaagattggcatgatttattcagtaattctttcattgaatatctacaaatggtagcatccgatcatgcaccggtgatagccacgattgcggataagaaaccacgaggaaagcaaaaattttggtttgataaaagatggataggcaaagaggggttattagaggcaatttctactggttggaatctcgccactggctcaggagaaaggcagtttgtggaaaagttaaataattgtaggcgctatttctcattggcggagagaattaactccgtacggacgtaatacgatagaagatattaaaactgaattaagtgcggctcaaagggatgattcaaaaacacgggaagagattacagatctaacattacggttgaaagaggcttattgagatgaggaacaatattggtaccagaaaagtcggagtctttggatgactttaggggacaacaactcgaaatatttccatgctctgacgaaacagagacatgctaggaatcggataaccgggttacatgatgagaatggaaagtggtctgtagaggataaagagattcagcacatagcggtatcttattttgagaatttgttcactttgactaatcctcatgattttgaggattccttgtcagaggttcaaacattaataacagatcaaacaaatgattttcttacggggacagcttctgagaatgaggtgcatgcggcattatttttaatgcacccggagaagtcaccaggtccagatggtatgacagctttattttttcaaaaagcatgggataccataaaaacggatttgttatttcttgtaaactatttttttcaaactggagttttcgataaacggttaaatactactaatatatgtttgattccaaaaacggagcgaccgacacggatgacggagctacgacctattagtctttgtaatgttgggtataaaattatttcaaaaattctttgtcaaagacttaagacggtgttaccaattcttatttcggaaacacaatctacgtttgttgaaggacgtcttatttctgataacattcttattgcacaagaaatgtttcatgggttaagatctaacccgtcatgtaaaggaaaatacatggcaatcaaaacagatatgagcaaagcgtatgatagggttgaatggaattttgttaaagagttattaaggaagatgggattttgtgaaaaatggatatcatggataatgtgttgtattacttcagtccaatatagggtccttattaatggacaacctaaaggactcataatactagatcggggtttaagacaaggcgatcctctctctccttacttattcatccactgcacagaggtccttatagcgaatatacggaaagccgaacaagataaatttatcacgggtatcaaagtagcaacagcgagcccttccgtgtctcatttgttgtttgcggacgatagtcttttcttttgtaaagcggataaagaacaatgcggagtaatattgggtatccttaaataatatgaagtggtaccaggacaaatgataaatttcacaaaatcatcgatccagttcgggcataaagtggatgatgctataaaggcagagattaaatcgaccttgggcattcataatattggaggtatgggttcttatctcgggttacctgagagtttagggggctctaagacaaagattttttcttttgttagagatagattacagactagaataaatgggtggtcggcaaagttcttatcgaaaggagggaaagaagtgatgattaaatcggttgccgcggcattaccaacctatgtgatgtcttgttttaggtttccgaaaacaattacttccaagttaacaagtgcggtcgcaagattctggtggagcttgaatggggaatctagaggtatgcattggatggcttggaataaactgtgtaatagtaaaatggagggtggctcaggttttcgggatgtagatgattttaattcggctttactagcgaaacagttatggcgtctaatttcgtttccagactctctttttgcaaaggtttttaaagggagatattttaggaaatccaatccttcggaaaatataaagtcatactccccgtctgatggctggagaagtatttgtttagctagatctctggtttgcaaaggaattattaaaagtcggttcatgggcttccatctctgtttgggaggacccatggatcccggctcaattcccgagaccagtaaaaagtaatggttcaactgttgacccatctttaaaagttcaacatcttatagatagctggtcaaatttctggaatattgatctcttgaatgagctctttgatctggaagacgtccagttgataagtgcactacacttgggtgcgtcaacaagggaggatttcccaggttggcatttcacaaaatccagaaactatacagttaagtccggatatcagacagcacgaatggaaaacttggaaagtaatttatctttcattggtccatagaacaaagtcctgaaagcacatgtttggaaagtacaatgtccgcctaagttacaacacttttttatggcaaatattatcaggttgtgtgctagtaacagcgaatttgcgaaaaagaggtataaagtgtgattcaggatgtgtcagatgtggcacaatagaggaaacaataaatcacactattttcaagtgtcatccggcgagacaaatatgggctctctcaaagattcctacggtcccaggagtttttcccacagactctatttatgtgaatttggatcacttattctcaagaattccttcagattttgattcattcgcatatccgtggataattttgtatatttggaaagcacgggatgaaaaagtatttgaaaatgtcgaaaaagatccgttagacgtgttatgtctagcagaaaaagaggcacaatcgtggcagttagttcaagttgagttcaacaatgaaaaccatatcgccttgtgatcggaaaaacaagttcgggtgagggacaactcacaagataataggtactctggccttcgttgttttgtggacggttcatggaaagaaagcaaaaaagtttcaggtctagggtggttttgctcattagtcaatggagggtcatcaactatgggagctgctaatctgcgtagaagtctttctcctctccacacagaagtcgaagctttactctgggcaatgaagtgtatgattggagccgacaaccaagaagtagcttttttcagactgttcaaacctagctagtgaagatggtgtcttccccaaccgaatagccagcattttcaacttatttggaggagttccagcgttacaaagaagagttctcttccttttctttatctttaatctctcgcaatgcaaatgtcaaagtggactatttggctcgaaaaattcgtgcggaactgttacatatcacttttgtaaaatattttccctaaaattggctcgtttgagtcctaaataatatatgatgacaaaaaaagaagagaatattatactttacaaagtatggagctggaatgaaaaaaaataaaaacttgcaaacaatgaaaaaagacatggcgaaaagaagagggtaattactctcaagttttgttagttgctttgtgttttgtttcttaaatgtcttattaggacaatacataagagtatcataagagaaaaatacattaagtgttagtttcatcttacaattcagtgcaactaaccacataatcaaattgtgggaaatttggtaacaatttttaatgtatgatcctatacaaaacaaaaggcttgacacggtgtagtagaagttggaaaaaaaaacgaaactaagacactatgaagtaaaaattaagaatacaactgttcaattttttatatctctactaactacaaataatttacatgatgcatatacatgaaaaatttagactaatagtaaggaatataatgaaatttaatttgtaaatattaattacaaaagaaaaaaattatacacaaatacaaagtaccatatagtatattgtaggtaattttcttaataatgttactacattgtgatatgattaaaaactaaacttttttctaaactacgttaatttatttttatttttcaatcttaaagatgtatcgtacttagtttattaaaattttcaattgtcacataatgttttaaactattttaatatgtatagtatttagatgcataatttttaaactatttgttatgcgtaggtctatttttaaattttttaataaatttgtttgtgactaaaatattttaaaagttttgagatatatatttttatatgtctacttattgttaatagtttaattttttgaattttaaattactatggaaaataattcaatttaaatatgtaaccaaaaataactctaatacaatttttagtttttacaacatttatctaaagaacttttgttttgggttcataactctctctctctagctatagatattttggatgaccgcattttcttacgttaggcgttttgatagaatctcatgaaagaaattgttgtatgaagaataagttcgacgactttctcattttggtattcgcaaatttactattgttttttgtttatcttcactacaataagtcttctaaaaataagattctatacagaagtatattcataaatttatctatactttctttttaacaaatcatatttttcacattcttttcaatatgtatatgaatttccttcttgacatttttatcactctttctatcttttgcaagcattcgttttatttgtttcgttctttcctacattgtatctgatatatccctctttttacggtttttatctatgatttagttattagttttagagtctttttgttatttctagagtcttttctagtctttacatgtttgggattcatttggagataattgagcattctagaggaaaacagagaatttatgctgctgaagaaatccaagactaaaaaccgcgtaggggtcgaacgacaccacccctggtgtcgagcgacaccaatacctgacggcaattcgaagacgcaacttattgatgttttgaagagatttcttctctacgatatatgttgaattattttccgaggtttcttccctacaatctatttttaaaaagtagattgtagtgttgatcaagcaaaaaattggtttataaatctaactttttacgaaaaaaacaaaaatataatatttaaaatgattgctcgagcaattaactcaatcttaaccaaaagtagtatattcgaggtcgatccacaaagaccaaagatatacttttaaacatttttgagactcgttcttacctaaaacaaaaaagttgtttgtttgggttttcagattgtaattaaataaaaattgtaaataacttaacaattaaacttatgaattaaagacattgggttatgggtatttcaaagattcaatgaataatagaaacacgacacaaggaatttcaacaatgaagcattgtttttgaacatgaacacaaatttatactaattttctctcaagatattaatcaccaaatttgactactcgactactaaactcttgttcgtaatttgctagtcaattcgcattagaattaggttcattcgattcagaatacattctaccatcaactcttattagatagaaatatattgctcaattcacattggttcatgcattttatcaaacacttttgatgcatagaaaaacttaaaatctaaaacaggatgatcaatcctattcagtatttagaatataagaatcaaagaacttaagcagaaaaaactgtggagaaccatcaacccattaattcattgaatctcttacttagaatcctaaaacttaattaaaagactaatacatattgaaaaaaataacacaaagatatgaaaaaaacataatagattaataaaatgtataaaaaagaattataattcttctccatagtgtgaaagagattaatctctaaaatcaccaaatgctctctcgaacttcatgagctctatcttcaattcttttgtcatttgccctacatactctccggccaccacaaccagaacttacatacatatgcgtaagtgattgtcatattatctaaaccgaaccaaaatccattaattaggattcataaccaatataaaaaagcacaaagtttacgcaaacaacatcaaatcatttataacatcatacaaaaacacattttttacgactcatcgaagatataaagaagaaacatcccgacgaagagataagtccttacaatgacaaaagtgattaaaaaaatagaaagatgtaccattgaaagttgtaaccaaccctacactgttactgacgactcaaaatttacaatgttaaaaaatatgttagaattagatgcatcaatattgaacagatctagggttaatcaaatatattttttgttggaagataagaaaattaacaagataggaataaaaagttgatttattcacatattgtttttcaaaaatttacatttctgtttttttatttctatatatttgttttcttattcttctgttgttttcaaaaatttacattactattctttacatatgattttttttctttattaaatatcttaatatatataatattataatttaaaattctaattaacgtgatgtcaaaattatcaattagtgataagactaatcgcggttggttacttataaaaatttgatagtataatcaaaattgtgagactaatctgaattatttaatgtattctaatatgaattatacatcttgcttcaatatattatcatatttctcatatttataaagaaaaataaatataaaactagtatattttaaaactaatcattcaatgagatagttattaagataaagtggctattgtaattgaagatgaagtattaataaatttaaagacactaataataaataatttatttactttgataaatttaataaaatagaaatttacattttgatactttttatattatttggtggcataatatttagaaaactttccatatttttttattttgttttttttctttacaaaaatctaaagaaaaatagaaaataagaataatttcataaatgttaattaacgagatggctaatcacaattggttgtttaaaatcctatgtggacggcagaagaagcaaaaggcctcgacttttctatagtatagattaatatacataatctacgaaaacgattgtcgttatctctgaaatttatgatcagagactttgtgggtcttattgcaatagtacacatttaagtagtaaattttgataagactaccttcacatcatcaacctccaaacttttcaattatagaatgatgtacaaagccttgaatagtagtattttcgattttgaaaactaaaactaagataaataaataggaaaatatttaggtttaaaaaaaaaatcttttcatcaagtaaaagaaaatttattcctatgaagtcattttttccttttaaaattatttatgtaagatatatatgtactagataagacccgcctaaaaaggcggatgtaagaaataaatataattttgtatcattaatatttgaattctaaatagtaataaatatttttattaacatttaattttaaaaaatttcaaaccaaatttcagacttacacatcccatatttttctatacactttaactatttatttcatattaataaactgcattttaattctacaaactacatcttatcgatgatttttgaattcaaaatagtatcttgctctctttttcatttttaatttattattttaatttaaaaaaatttccaatcttacacattccatttgcaatacaatttaactatctatttaatcattataaactggattttgattctacggacttcatcttaatgaataaatgctaaaaatattatatcaaaatagtgttatatgattttgatttacggttttggcggaaaaacgtcggtttacggttttggggagaaaacgtcggtttacggttttggggagaaaacgtcggtttacggttttggggagaaaacgtcgattttcaggttttggcaagaaaacgtaggttttccggttttgacgagaaatcgctggtttacggttttggcgggaaaacataggtttacggttttggcgggaaaacatgattttcaattttggtggaaaacactttttgtgatttcggcaggaaaacaatttttgtgattttggcgggaaaacaatttttgtgattttggcgggaaaatgtggttacggttttggtgggaaaacgtcggtttacggtttcggcgggaaaacatgattttcaattttggtggaaaacactttttgtgattttagtatgaaaacaacttttgtgattttgggggaaaaacgtcggtttatgattttgacgagaaaacgtgatttgaatatttaaaccaaaaagtgaagttaagtagaataatttagttttaatgtattaacacattaacatttttaataaggtttactaatataaaatgaaaaagtaaatggacttaattgggtacccatttatttgtgtgaaaccccatttaataaatgggtttagttgggttaactcatttaatcctatttaatttttttctaaatgagtttaaatgggtcaatttctcttacacaaacccattaattaaatgaggtttgcatacccatattaacatcactagttatatcatattgtatcagagttaacaaaaagaaaaaaacattatatcttagttaataataaatgagttaacaaattactaaaataaaaatccacaaactaacaaaaaatctttaccattagtatgacgttaaatcaactgtggtctttttgaagagtattttggtttggtgaaaaagtaggagactacctattatttttatagatatgagtattttgaatcgtttttcttttaggattaataattgattgtagtttccataattatggtattttatataacaagattgtataatttcttaaatcctttttaaattttgtaggaaaaagtaatcaattttgattaagaattagtagcttcaattagaattagtaaatgattttttaatttctatttttaatttaataagatacatatatttttttaaaacttatcatatttacttctctaaaatgttttagtttccttatacttattttaaaatatataatttcttacaattgtctttttatagtcttaaacttaataaaagaaaattttgttttacacgtgttaaaatctgagatcgataaaatttgcacatagcataatcaattactaactttgaaaaccgtactttatataataagttagtttccttgtaattatcttcttacattttgaaaactgtttaaatttataatttacaattatctttttgttttttaaatttaataaaacaaattttttttatttatatatgtcaaaatctgagatcgatgaagttgacacgtgttacaatcatatgagttactaacattgaaaaccatattttatataataaaatacataaataaatgttgaaaaagactgataaaagaatgacaaaccactagagaatatacattaataagaatcatgaaataagagaaacctatagtctaaacaaacaacacttcaataggaaaattcattaaaaagtggaatacgttgttgttgttgggatagatgatggatatccttcacaatgtcgaacacggcttcaggttgcgacaactttagagcattctctgacattttctttaattcctctttattgttgctaaaccaatccgccacgattttcgcagtttctttgggacttcgggtgaaaactccagccccattgtccacaacatacggcacgttgcctttttcctttgggagtcacatacaatagagttagtttatgtggccgattaatccctaaggtgaagcaaaaaaatgtatacctgtccaggaatatagtcattgaggataattgggaggccgcaaatcagtgcttccgcaatcgtacccggaccagcctgttttatgtcataaaatcttagtgctatttatatgaatgggtaggattcaaagatatgacttaccttagtgatgatacaatcacaagctcccatccatttttccatttgtgtttcaaaccctcgaacctataaacgtcacaagtatatattagttacttggtatataagtatatagtagaagtaaaaaaaaaattatattttagtttgtaccttgaccggaatcttccattcatgagatgctaatgtagaagcaaggactttgttccggccgcatatgacaatcaattgtcctattggattactttctttagagttgtataaagaatctccaagggctagagctgttttttgaaccggacccattccttcaccccctcccattaatagaaccgcaggtaaatttaagtctatttcaagttccttccttagttcattctaacaaacacacataataatagctattgttgatcttctcttgattgggaaaaaaaagatctctaaatggtatgaattggacagaatttaccttgttgagaatagtgcgagggaaagatgggcggacaggtaagccaaagacacggatttgagagtcatcaaggccgtctactaatgctctctttgcaacctctttggacggacaataacatctgctgactccatgatggaacctattacatcaaaatcgaagatttcattttgagctattaggttaatttcaatgttttaaaccctgacccggacagtgaaccggattttcttctggatcaccgattaatggggttaaccgaattagaccacaggtcaattgaataaaatttattgaatatatttaatattaatagagattatataaaataaaacaaaaataattatcttatgtttaacaaaatatgaaatcaaacagtaacaatcaaagttttcaatttaactaaaagtctaaaagactaaaaccgtaacaaatatagtaggagatcattaatgacgaaaataaattaataaacattgcgaattaaaacaactaatctcggtttcagtcactttaggcggaattgtgaagacttcaccaaaatataaaaaaatcaaatgagtttaaaaagtgaattttttttctaaaaatagctgaatagagtctaaaatgctatattttattcaaaaatcgaatatattttttaaaactcacacacggccagttcaaccggttcactgggtcgcgggttaatggcgattttttgtggatttttccgggtttaaaattgttggctatagtactaaacctaaaccgaaaaagtgtttgggttgctgattaaccgttcgaaccgaacggtttgggtcggacgtgaaaacactggttaattttaaatattattgcatataatctatattttattaaatgaaaagtcatgagagtaaacatgcaggattaatatgctaacgcgtggattaaactgattttaagtacttagtatatatagaagtaatgtcatcttaccatgtacggtggcaagtgtttagatcagtgatgaccgtaacgaaaataactttcttgtgaagtccttgccatttcattacccacaatggtatgtgttgcatcagaggatgcacgctaataataatgtccggtttgtactccattaaaccggcctctatttctctgttcaccaaaagaagaaataatctccattatattgctaattcgtaacactaagggatgataacgaaaaaagaagaaggttaacatataagtacttggcataataagcggcaagagcacttagatagcttttgtggatccatttgggagaagtaccatgaaacgcaacagaccaaagaccaacatgtttcaccatgaacttgtactgtctctccatgtcgttcaatggccatccagtgtattctttccaaacatcttttatgattatctatagttataaaaaaaatgacattagttcctagagagaatattgtaacatcaaagagtcagagctagagaaataaataatgcaaatttttaatcattattgacaaacaaaataaatggaacgtgggacaggttttaagacatagattgttgacgtcagctcgtatctccgacaccctggcaaactccaagattcatactaggctacaaaacttccaagtagatatttgtttcttttcgttttcaaattcaagacgactactgcgacaactttaatattgacggctgagatttcattagaatcagaaactcctctatgatatattataacataatctattggaaaattttgtcataatataaatacatattattcgaggtatatatttacaagctttgaaattttcaaaatgaatatttcaaaatattgttgttgttttacacagaaactaaaagataaaagtatgattaagttttgttgcttatgcaatattttttcgtttttttgtacgttatatatatggttaaggaagcatattattggctcaaccctatgcgttggattcaaggcaaagagaatgaaaatgaagatataaataaaaatattaatatttttacccgatagtcatctccgaattcgatcttgaaagcgtcgcggatggcctcggctgaagcacggtggccaccgccggtatcactcatgagaataagaacagttttgatcctctctgctcccatctgctccatctccataacttcttctttgtcttctaaccctctcttccttagacgactctccttctcataatcacttgatctctgacgatggatatactcatcttctactgttgagatgttaaaattgctatagactcgtcgaaacaccttctcagtgattgaatccgaccgtgtacgaggtgacaccactttcatcatgactatttggtgttgaagaaagaataataagaagaccgatggttgtgttttctatgtggctggttggtgatctttatgtaaaagattttaagttcttttggggttttaaattttttgtagcaaaaaaaatggaagaccaagttgcttcttttaataattgtttttaaattacttgaggaatgatgctggaattattcttttttttttttttcggttcctatagttttgcttaggtatttatatttcgtgtctttattgttttatgtggggcttaatttagtggtagagtaacaagggaatatggcagcttggagccgtcggatccgcctttggtttcggaatcttcggatatatgattcggatctttctttgcatctcaagtatatttaaaacaacttgactttttaaaaattaaaaaaaaaatatgacatggatggtcctttttgtgacataggtaaaccggtttagaatcaaaaattatctggtttgattaggtttaaatcgattcagttaaatttgagtccacttttcatattaatttaatacttgattaattgattcaagttagtttcgatttttgtttagttgttgatatgaatgtttgtaaacaaaaataggtttcagttcaaatgtctacttttgcatcaaatgtactcatatggaaaaattgtctatttgtctacgagaattatgacatcattagatattgacccgcggtacacagcgagttgattatttgcgttagaaagttaattgttgtttcaatttaatataatctatatataaataactgagcaatagttttattttttcaacttacttggtatatgtatttacttttattgatatagtagtatgttttttttacttggttatgtttagttaagataacatgtttattatacttattagtacataaaatgtgtattttatgatgcattagtacgtgttttattatatatttttctctttattacagaacattattaaaattttaatttattttaaatttgatttttggtatattactgtaactatcctaaagaaaagaatgttgttttatatgaaatagttgtacattatgttttaaatctgtggttcaattttcacaatttaatttatttggtataatataatttgaaaatctcattttatttttttagaagtagtaaaatcaagaaaacttaatactatatgaaaaatttatgtgcgataaacataattacaaatataaatttaaaaaataaatatagtgacattcaaagaaattaagactaatgtgggtataataagtctattaactattgggtattctaaaacaatatgaagcggtatcaggacatatgataaattttgtaaaatcatcgattcagttcgggcataaagtagatgaagctataaaggcagaaataaaatcgatcttgggtatacataatatcggaggcatgggttcctatctcggactacctgagagtttagggggatctaagacaaagatcttttccgttgttaaagatcgattacagtcgaataaatgggtggtcaactaaattcctatcaaaaggagggaaaaaagtgatgattaaatcagtagccgcaacattaccaacttatgtgatgtattgctttaggctcccgaaaacaattacttccaaactaacaagtgcggtcgcaggattttggtggagctcgaatggtgaatctagaggtatacactggatgacttggaacaaactgtgtactagtaaattgggaagtgactaaggttttcgggatgtagatgatttaaactctgcattattagcgaaacagttatggcgtctagtttcgtttccggactctctctttgccaaggtttttaaacgaagatattttaggaaatccaatcctctggaaaatataaaatcatactctccgtcttatggctggagaagtatttgttcagttagatctctggtttgtaaaggacttattaaaaaagtcggttcaggggcttccatctccgtttgggaggatttgtggatcccggctcaaaacccgagaccagcaaaaagtaatggtttgtggatgtcggatcttgtgctcgactcgacccgcaatttgtgggcttccagacaaggattgggcccggccttagagcccaatgaaagcccagtggttcaaaaagttgatacggaattaatttagtaacggctggatatcgacttgaatgataagcattcaaaggcccgagctgttgatccgcaacgtacgaagttaataggggcgaggtctgcggcgtgaaaccagctaatcatttaagtcatttgattcgttgtattagtataaataagagtcaattgtcatttgtaaaggggacgaaaacaccttgtactgaaactatactgaaactatactgaaatacacaaatccgtttatcatttgatcattgttcgaccgacaagacttaagatcctcacaaaaacaaccacaaaattctaattgcggattctggcatccacaatttggcgctagaaggagggtaagttaagtctttaacttcagagcaacgatcaattcaccatgagcaacaccgacggtcagagttccggcgactaaacctccaccctcgacgacatcaagcagctgcttcagcagttgtcagagaaaaccgaccggcaacagctcgcagtaacgacactctccgataagttcgtgtttttctaagaacattgcaatggccagctcgcagctttagcagcaaaccattccgagatcagatcagcgcacaatgcatacgccgagcgggttgattctctttctgcaggaacggcgcggactactggagctcgaacgcgactcaactttcagggtgtcgcaagcccaagcgtccagaattcgcaggaagcttctggccagcaatctccttcacctccagttgacgtcggggcaacgtcgacacagaatccagtcatacaatcttcaccagcaggccttgccgcagtctcagatgggacaatagctcggacgccggctccactggatcccgccatcagactcccgatttctaatccccgacaagagccaaacacagtcaactcggagctccagaaccttcaagatcaaatctgggcaatgaacgcaaaagttcatcaggctaccacgtcggcccccgaagtggaaaaagttattgaagcaacaaggagaacgcctttcacttcgagaatctcgaagcttcgtattcgcgatttccgagacttcaaacttcccggttacaacggcaagggagatccaaaagaatatctaacttctttccaggtcatcgcaggtcgggtccctcttgagccacacgaagaagatgcagggctctgcaagctattctcggaaagtttgtcaggtcccgctctcacctggttcactcagttagaagagggttcgatcgacaattttaagcaactctccactgctttcattaagcagtacgggtacttcatcaaaagcgacgtcactgaggctcagctttggaatctctctcaaggagcagacgatccactttggacctatattactgcctttaaagagatcatggtccaagtacccaacctatctgattcggcagctcaatccgccctcaagaatggtttgtggcatgaatcacgtttccgtgaatctataatagtaaaccgccccgaatcaattcaagacgcccttcatcgagcaacgaactggatcaacgccgaaaaagagcgagcttttttggctaagaaatttagcgcttcaccaaaagcttctccacctgctacttcgaagaaacctgccgagctccgaaagccagcagcaggaacttttctgtagagaaagagccgcccaaaacttccccaaaagcgtcaccgtcaaaaccgcctttctccccaaaaggcaagaatggagctctcccaagtaacaaatgggtccgagatcctaacgcttactgtgaaattcacaaaatgaatggtcatgccacaaaggactgtaaggctttgggaaggttgttggctgcaaagtttgcctcgggtgaaattcctgacattgacgtcacaaaaatcgatctggctcaaatagcatacgaggtgttagattccaaaaaatcttcaccccccaacaaaaaggaaaagagtgaaccagctcccgttgctccaaagggcccgaagaagatggtcaaagtaattatgggaggatccaagctctttcgggattctatcagcgccattaagcagcacgaaaggaaagtaatcactccgatggcgaaaaagcctaacaccaatcaagctgactggcctgaaatttcattttcggaggaagagacctgcgacttggataaacctcacgacgacgccctcgtaatatcactcgatgtggggaactgcgaagtacaaagaatcctcattgacactggaagttcagtcgatagatagccgtggttcaattatttacccatctttaaaagttcaaaatctgatagatagccggtcaaatttttggaacattgatcttttgaaagagctcattgacctagaaatgtccagctaataagtgcactgcacttgggtacgtcaacaagggatgattccctaggttagcatttcacaaaaactggaactgatacagttaaatccggctaccataaggcacagatggaaatcttgggaaacaactcctctttcattggcccagaaatcaaagctctgaaagcacaagtgtggaaagtgcaatgctcgcctaagttgcgccattttttatggcaaatattagcaggctgcgtgccagtaactgagaatttacggaaaagaggattaaattgtaattcaggatgtgtcagattggcactatagaggaaacaataaaccatactatttttcagtgtcatccggtaagacaaatatgagctctttcaaagattcctacggtcccaggtttttcccacttattaagtttatggaaatttggattttattctaaagaatccctttagaatttgattcatctgcatatccatggataatttagaatactggaaagcaagaaataaaaaagtgtttgaaaatgtggataaggacccgctagacgtgttatgtctagaagaaaaagaggctcatttatggcagttagctcaagtacagctcaatactgaaaatcaagtctcctatcgatcggaaaaccaactctgggtgagggatatctcacaagacattgtgtactctggctgtcgttgtttcgtggacggttcatggaaagaaaccgacaagttttcatgtctaggttggctttgtacttcatttaatggagggacgtcaacaatgggagctgctaatctgcgtaaaagtctttctcctctccatatcaaagtcaaagctttactctgggcaatgaagtgtatgattggagtcgacaaccaagaagtagcttttttaacaaactgttcagacctgatgaagatggtgtcttctccaaccgaatggctagcattttcagcgtatttggaggagttccagagcgagaaggaagagttcacttcttttttttatctttaatttctcgtaatgcaaatatcaaggcggataatttgacacgaaaagtttgtgttgaaccgcttcatatcacttatgtaaacatgttccctctagattggcttgtttgagtcttaaataatatctgttgaaaaaaaaaaaagtctattaactatatcatatgggtttaggataagtgggcctaatatcaaatgaagttgtaaatgtgcgggcggggggagggggggggggggttgggtttctttgagtaaaatgaacttggccgaccaaaaaataaaatatatctaattggagaaatgatctcataactccctttctgcaaacaacaaatctctcaactcctcttagtatctgtatatcactttctcttttaatgagatgtgtatagaccaatttacccctcctccttatttctctaatattcattttaaaattaaattttagaaaaaaaaattgaaaccaaaaaaaaaacggaaaacccaaaactctctctcttctcctctctctctctcctctgaagctcgagctcacccatcgctctcgtgccggaattcgatttacatcacatatccttatctccggcgagcttcgtcgacatagaaagaaaatgtatgtttctcgagctgaatagagcttaaaattgaagattagaactaaaagattttgtcaattagatttgagattaagcaaattgtgtttggtatgcacattggaagtttatgcatactgcctgggttgaatagatctgtaaatgagtaagaaatggattacaacaattgaatcatagtgaattgtagttttgaacctgtaaccattcgatttgagttcttgtcaggaaatacatctggtagaactgagtagaactgcacattattcactagtatgacttagttgcactagtattaaccatgtacatgtagtatttctttggtacaatagtattacccattttgatgtagtattattaattatacatgtattatacagatatgtgtagtatgactagttatacttgtgttacccagaactgtagtataactagtatatctgacagagtttttgtattgttgttgtaggatacaatggtggagaaggtgatcatatattttagatggaaagatcgagcgtacaacttgatgatgaatacaccaggagggaaaataactctctgcatgttagaaggtaggatttgctcgaagcttggattagatgaaagttaggttaaattgcaaatcaagtacaatgcagtgatgttgggaccaactcaagagatacacattaatgatgatgaggatgtcggtgtctatatatcttcaggtgaaatggttagtagatatcctttgactgttgaggtcatcactccactggaattgcccgaggaaggtcgtcaataaaagttctattggtaagaactatgctgatttgggttcaaatgatgatgaaatgagagataatgcaaccatcgtgatgggcgaattggagggacaaggaacataacaaaatgaggcaatagtggaggttgttgatactcaagatcctgagattggatcacgtgatgatagggatgatgatgataggggtgatgaatacgttgagccaccgcctgttgtagaatctagccagtttaagaaagaatgggaagacggtatcggtttgactttgcgacaagaatttccaagcagggcagcattgtaggaagtggtggacaaaggtacatttgctaacagttttgggtatgttattaaaaagtctgataaggagcggtatgtcctaacgtgttcaaaagtaaattgtgactggcgtatacgagctccaaatattcaagatacaagtatttactctattagaaggtacaacaagatgcatacttgtacccggattagtaagagtagtacaaggataaggaagaggaaaggtacccctgaattagtagcagcttttcttcatgatacttttcctggactgttggaaactccagctcctaaggttatcatggggcttgttcagacaaaattaggtgtgaagatatcatactccaccgcattgagagggaaaaggcaacccgtttgtgatttaaaaggtagcgcggaagatagctacaaggatatcaattgttatttgtacatgttgaagaaggtaaatgaaggtacaataacatatctgaagttggatgagggcgggaaattccaatacctattcatagctttgggagctagcattaaaggctttcaagcgatgagaaaagtgataattgtggatgcaacacatttgaagaacggatatggtggtgttctagtctttgcctcagctcaagatccaaatcgtcatcattatatcatagtggttggcgtactcgacaaagagaattatgctagttggggatggttcttcgagaagctgctaagtgttgtacccgatactcctgaattggtatttatgagtgacaaaaattcaagcctcatcaaacgcatacgtaatgtgtattctgcggctcatcacgggtattgtgtttggcatttatcccaaaatgtcaaaggtcatgccactaacatcaacaaagacgtactcgcttggaaattcatggagttaagtcggatttataccatggcagaattttagagggagtgtagaacttttaaggtgagatatcctactgcggcctattatttggaggatacaaccgtgaaaaaaatgggttaggtgttgtttcccaggggaacgatacaatttggacaccagcaactgtttggaatcgttgaattctgtttttctcaatgcaaggaagtattctttaatacccatgctagatgcgatcatggccaaaatttctgtttggtttaatgaacatcgcaaagatgccgcgttaggatctaatgataataagtttgtgcctttagtggagaactacttgcatgatttatgggttgatgctgggaactaaaagtgatagagctaaacacattccggctcgaatacaatgtccgggagtagaagggaacgaatatttggtcaacttgcatttgaaaacttgcagttgcaaggtgtttgatatccaaaagtatccaaaacgtcaaaggactcagaacaaaaggaggccgaggcagtcactgcaatggttgttatttggcacccatagtatttgcttttaatcattgtaaactttattcgcgttgtgcaactatgtaacactagactttccttcagtaatactatattttaattcactggcataaggatcatactatgatttaacaataatactgagaatacaggggaatactatgattcgacgataatactgagagtaaaggggaatactatgatttgacgataatactgagaatacaagggaatactatgatttgacgataatactgagaatacaggggaatactatgatttgacaataatactgggaatacaagtataactattgaaggatattaaaattcgaatttatgtttgtttcaaacatcaaatattaaatagaatatgtagagatggagaactcttaaaaattaattaaaatgaattcaattaggggaaaaatatttggtcaaaatacatgttaatagactctaccttacatattccttatacttttaagctcacttttgatataaactccaacttaggattgaaattttacaattttatatattgttaacatgtgattacattaaacctttagaatttaatagtgatagacttccctcgactgaacaactgaataaatcattttgaaggatatgtaatactgcctaaactggaaaacacgaaacatacaactacgtggacattttgtacaaccaaaaactaaggtacaactaacttaaataaaacggcgcacatgtctaaattactgcgcccacgtggaaatcacctttacctccaaaaattatttttctctccaatttcaatttcccctcaaatccaaacaaaattccccccaaaaccaaattctccccaaaaccaaattccccccaaaaccaaacaaatatcttctctctctctctctctctctctctctctctctctctctctctctctctctctctctctctctctctctctctctctctctctctctctctctctctctctctctctctctctctctctctctctctctctctctctctctcgtcaaaattcactctctctcaatctcaaatcattctctctctctcgaaattccttctctccaatcagctatggatcgattgtgtgagagtgacccatggtatgatgagatgaagagcgcttagaggataatgcaacaactagaagtagtcgcaatgatggaaggaattccggcaatttgtccttgtggtggatgcatccttgacattatctttgagaaagatggtgacaaaagaaaacgatactatgagtgcaccgattaaaaggtaaattaaagatatcatcaatcttgttttagaataattgattaagcaataagaattcatgttttgtagaatgatgggttacacattcggaaactttgggataaagctatggtagaagaggtgaataggttaagagagcaagttgataaccatcaccaaaagattcaaagcttggagtactctaaccaagaaatgcgttcggagttggatgagatccaaaaaatgatggggactttgtggagagtttgttgtggagagtttgttgtggagagtgaggtttgtgtgaacttaatttctgcctttgttttttaagacttttattgagtattctcttgtattcccagtattatcgttatcaagtattccattgtattctctgtattatcgttaaatcttagttttcccttgctttctcggtattattgtcaaatcatagttttcccttgtattctcggtattatcgttaaatcttagttttcccttgtattctcggtattatcttcaaatcatagtattctcttgtattctctgtattatctttaaatcttagttttcccttgtattctctgtattatcgttaaatcttagttttcccttgtattctcagtattatcgttaaatcctaacatatcaaattccaattcatatctaaattgaaatccaaaaaaaagcataccaaattcaaatccaaacaaagcaaattgaaatccaaaaccaagcataccaaattcaaatcctaaaaccaaacattccaaattcaaatcctaacaagtacaaccaagttcaaatcctaacaagtacaaccaaattcaattcttagttctccgagtggtccttcttgtgaagtttgcttccacgggttttgaaggacctccatccttctctttctggtccttctctttctctttcaggtccttctctttctcttttgggtccttgtctttcgggacaccaactttctcttgatccttctgatatagctcaaattgccttaagcttactccctcaaataagagatcgtggttagcacttaagggtcgaattccactgtgctctcaattttcacacaatagacttatgatgttatttaataagctagatgaagtaattgaatgtaaacgacaaataagcaagtaaacgagctgaagattcaaatattaaagcgtcgggtctaaggaattgtctcgggagatagataaattgtagatctagctaatattagaattgttatcgtaccgttttcgaactcaaactatgattctagagtaaccggtggcgttccgcaaaattctctatacttagagctaagaaaaccagagaagccgagaaatcctatgctaaagcatgcattgttattaagcttgattagttcacctagtatctaaaccagagaccttctatgagcctacctgttctttcttaaatgcctaggctcatctatgatagttctaataacaagtacctatggcgggcatacctattatctaatatcaagttttaggtgatcaatctaaaactagcaataagaataatcaagatgaagaactctatgaataatcctaaggggttttcgatctaccaatccatctaaatccctattgagactcccttaacccaacaaggtgattactcagacatgataatagaaacacaaatcataatctcaatagtttgcattggtgaattaagaataaaagtaaaggagttcagaatcctctctaaaaggattggattcttctctcaaaatctgtaacaatctctaaaaacaaaacttaggtctaacaatgaccaaacaattaggtatattcgtgactaaaaacgtgcagggactacttttcaaataaggaagacttcagggcttctcaaagacttggcagtaaacgagaattcccttggcagcaataagagtgtcgattgacacaggtatggtgtcgatcgacaccatcttctgaaaaacgtccttcaagatctttattgctgaaaaacatccaaaattccttattgttctccatagttcccagatgtgtaagtgtacctgaaatgactcaaaacatacgaaaaagacaagaaagactctaaaaaccattctgaaactatgttagaaatcagtaaaaacccagattatatcaacttctctttcaggacaccatcctcctcttgatcaccatctttctcttgaacaccatccttctcttttggatcaccatccttctcttggtccatctcttcttgattctgcaattgaacaaagttatatcaaaattacgtagttatactctagttatcacaatgttactcagtattacgcaattatcaatacatacctttctctcctcttctttctgctcatccttgaatgcttccaacgattcaactcttttatccaaatctgaaatcattgttataatttcattcagctggtttaccatcttcttatccatgttttcaatcatctccaccaaagaaaccaaactcaggagttcttgtccacctattgcgggaatatcctccgcacccgcaatctttggacttgcggtgatcgtcagagcttgaatatcctgctggtagagctcaacaaacctgattagacagttctctttacgacgcttcaaccaactttcaaccaccacatcagccacgtcaacgtcgtcttcttcttccttgatttttttcatgagttcgtgctcctaaattccaggtgtgatgatacaatcaatgacctgtaaagataaacagtatgaatggattattataactacatagaatagcaaacgtttcataaaacagtatatcttggacaactaatctgagttatacccaattctgcataaatggtatcaagaggaaagcctttcaaatggttcttcatgaacctcaccttgcacatcctaggacatccctgatctgctcctacaatgtcctcaataaatttttccctcaactgtgggattgcctcaaatgcaagaagctacagaataagaaaacaatttttaataaaaattagtattccaccgtatgaccagtattgcaaacaatcacctattaatataagttgtaactaataatcacctatgattcaccgtgtgtgagatggttccttacatgtaatcgaaagaatacctcccccactaaaaattcctactaaacgtgagatcactcacagccttgaggcaaaattcatccacttgaggtgtcctatccccggtcttgataggcgctatgataatgttgcttaagaaatacaagaccatcatcctcaacctttcttttgatctttcacccgccggtaccattcctatgagcttatctctcacgtcttcgcgtttcacaacagtattcttgaaatgcttcttcttgaaatccaaattccccgtatttttatacccaagtgtatagttcttccaattgaagcccgatatcaatgcgtgttccaatataccatatcggattggaacgccattgacgatgaaccacgcttctttcttcctttcaatgtgcgtcgtgcgaagaaggagcatccacatccccataagtcggtggtttgggtctcttggcatgtggaagatgtgttgcaaactcgaatggttctcaaaccatgccctctcggacgtgctcatcggaggctgcaaattctcgaatgtagtcaacacttcgtcaatatagcaccgagttgaaagcttgattttcttcacatattcggagggcgggaaatacatactcagtggtggtattgcttcggcttcctcgtcgatctcctacaacagatattcattatattactaccaatgttacctagattcatacacatagttatatcatagtaatgacagtattacccagaaatcatacacgtagttgtttcctagtattgacagtacccaaaagcgcatagttatatcctagtaatgacagtattatccataaatcatacacatagttctatcttagtactaccaatgttacccagaattcatacacatagttatatcctactaatgacagtattctccacagatcatagtattatcctgttctaccagtttcaaaccattcaaatacttgagaaatccttaacatagctgtaacacccccaaaccgttctaaaactaagaacgaatccagaagcattccgtttgatgcccgtagacgatccaaccaagttcccggaacacatccagtaccaaggtcagttcatcggcgaacatcgtttctctcgaacatggcctaaggctttttaacccgtaccgcattcgggagttgtgttagttcggacaacactaatatcagagatacacaaggctttttaagaaaactcattttattaatcttaaaatacctcaaaatacatttgtgttcggctagctaaggcctaatgctcaaaacgagtcatacaaaaaatatatctttacaaaggcaacgaactctacaccggcttccctacgtctgtgctcccctcaaaggtttctcactatggctacctgcaaaaatagagtgagggatgagcgctaatcgctcagtaagtccaggctcccctaaacatgcaatattccccacccaaaaacccaaaataacaatcaaatgcatgcaatcaacaagcaatcatgcaacagacaatcaatgcaacattcgagtatactcgattgagtatactcgacaagaaatcaaccaattacacttggaaaagtgtaatgaacacaatcaatactaagcatgcatgcataactaaactatccgagctcacacagtgttactactctaaaggcctttctcttttcagcaattctgatttcccacaaggcaatgtctccgatccttagccacaaaggctaaaaggatcacatcccttcccctttatcgtctacaagggaccaactcccttacggtataatttgtactgccccgtcgggtagcctcgattggtaacgagccagtccgagccattgggacaatcacgacatcgcttcaaaactagtcataaaaatgactaatcacgtttacttactacgagcctattgaatctcaataccactcgtaataagatctacctcacaacctaacctctcaattactacctagtatgcaaagctaattacaaacaagttaaccaagcaaatgcgaggttaacaaacaacaaccaaacaatcaaactacaatcaatcaatgataactaacaagcaatcaatcattgcgaggtcatctagagcataacgttatcactaacgtgtagccaaacctcacatcaacgactagaaatgaaacgattataacttgcatgcatcccccgataaccttgcaatcataaccgttaccaaaatagtttagcacttgccccacacagacacaatgcaacctcctaggcatttctcacaactttgtataactacttaagtaagtagttaaaaactataagcaatccttcatagatctattcttatgttctacacttagctaatagaaccaatctaagagctaaactacacaacccaatcaatcaacaattctagatctatgaacggaaagtaaacaaacaacaatcaatctggtttacacgagttctacgaactacatgtaaccacatgcaacacacttaacccaaactcaccttggcctggatgaacgagcaaactctacccttgatcgcctacatctcgatccgacttaagctttctccaacgcgtactaacgatggatctaagccgcggaccgaaaataaaacttaggaaactattctaaaaagaataaaagactaagggcggaactacttacctattacccgactaactcgactctcgactacccgaccaatgctcccgacgaccacggcttctccgagaagcttcacgacctaactagtataaatgtgattttttcgtggtttagagagcaaatggcgagctttgctatttataggggtgagaaaacgtggggagcaagtaacggaagcacgaggtggcggataaacattatctgaaaccttatccttatccaaactcatctctatccttatccaaactcatccttatccactctttgatcttatccttatcctaagcgtgtgccaacacacgcacaacacacgccaagcttgtgacggagctccttccaccacaagcacctccataacatggccgcaaaatcccgcaaacgactatacggccaaatcggaaccatacaatcttccgatttaatttacggccaaaattcaagtaacgtggcatgtcctcagccacttactctatttaaccgtttcaataaactttgataattgattaacacttcccttgatcaccactagtttgtcccagtccaagaaatatttttctcggcaaaatctagttttctcggcaaaatctagttttctccgatcaaaactggtcttcagcacttcctttaattttcttcggtagccttgatctttcccttgaccaaattgcctaaaataaaatccatccttaaaatcttcatttttatcgttaatggtttgatcgggtccttcgatcaaacgaacgataacttcctcgatagcatgtcaaccacattgccgtcatttcttgataattgttcgatcatgtcctctggatcgaactaccaatgtcctctatagcctaactgcccaatgccggtaataacggatccttaacatcctgactcttagcgatagccgataaatctgaactcactcgtgattgctcttgaaatcctttgataagcctccttttgtctatgatcacattaggcaatgctagtttacctcttataaaaaatttttttacgaaagattttgaaagtcacggtcgcacttctacgttcgcgaccttccgtccgattgctagtcatcttcaggggtattacaatagccgccggaatttccacttgattttccactgcagtctcatcatccatattctcttcggaggaggactctagcaatggaagatgttccagagatgcaagaaaacgagctcaatacaggattacaattctcgaaaagtaccaatgatttacttgaggacggcgaatgtcaagttcaagaggaactgacgttttggtacctggagaggagaatacggaaacgaatgacaggagaactgtgtggatatcaattgtgcttcaaaaggtaaatctcctgattctaaaattttgcctattgaatttgatatggttcattggggaatgaaaggtataaagctgaataaataataagaatcagaaaactaaggtagctagttttcatggaactaaaggaataaatggtagtaagaattatactatgcttgtagcttcacaaggaaaaagattattgggtaaagttctgtctattaaatctgcagatgttactaaacgaacgcgcgtcgcacttccgtcgtaaaatttgcgaaggaaagtttactcgcaaaattgcgagagaagtacgagtattttgcggcgaacaatatacaccatcgcaaatcttccgcagacacctcgcaaatctttacccttaaccctaaaatacataaaagtgttttgcgatattttattttcatttataaatgtgaatctaagtgaccatataatcacacaagtagagtatatggtaatgcacaaaaaatgttgtatatgtttcaatattaacatttcattttgaaaaagttataaacattgattcaagttatagaaaaacataagatcatcattgatgtatttggggaaaatgcacattcgaaatatatgatgagaaagtagattctaatgtagataattaacttcctaatgattcaataaatgaatctgaatgattttgagtagtgttttgttgtatttttccaaattaagattttgcgagggatttgcaagtcgttcgtagcatttccctcgtacttatttacactaaaccctaaattatttaaaatatttagtcatgtttttttgttgttgagggtcttacttgaaataggagaaaatgaatcagaaaatgaataagacatgattaacaatattaaaacatgtcttcgtgttttttttttaaaccctaatgaagactttgcgagggaattactagggaccctcgcaattcccttgcaatggttgcctcgttttaattggttgttttggttgttcctcgcaaaatcctagcaagtattgcgaaggatttgagacgtgtcaaatatctatatataggaataacctagtttgtgcggagctcaaacccagccgcacatcacgaaaaccctaatctctccgatctcttccttcgccgattgtctctctttccgatctcttccaatcgccgaatgtcttttcgattgtcttcctatctccgatctctcctctctgattcacttcacacacaccgattctctcctctttctgaagatctgaagattttttgaaaggttaatttttctttcactccgattctctcttcaaaacgctgatttgttttactctagtctgatttcgtgttttaattccatttagggtttctttagggttcaatttagggtttgatttggggtttaaaccgatttagggtttagttttatgttttctttctctgttttgtgaaagtttacgttttctttctctattactaatgtttttttcttttctcgtagatgtcttctgaaaacgactacactaggtatctatccactcaacatgtacttgttccttctgctcgtgcttccagatctcaagggaatgcatctagaaactgtgatccaccctcacctaccagtcaaaaccaacaagccggtttgtctcctccaccatccaattcaaacacgcctaatcaatctcattcagctactcaaccaccaactgcgcgtctcaacgatctaacattggatgagctcctttgtaacaccccaaacccaacatcaattgcccatcctatttgttttgtcagaaagcaaagcccatggagcccatttaaacccaagtgaagcaactccctaatgttaaagggttctgttacgtgtgttgttggttgcacatatatataggtgaatctatctcccttttctatgagccgctaaaggaaaccaaataagaatgtttagaaagcaaatccaaagcatcaacacatgagttttatagtgtggtcgttaccatattggagagagaagggagttcacaagtgaaggaaaccaaagagattcatgccaccgttcctaaaccgagcgtcacggcatcgtcttaatcttaaccctaattaaaggtcagccactaccgtttttgttgagtatgttagtcattgtggaactcttgaagaggagaagagaaagaaaagagatgaaggataactatgaggaagatgagaggaagaggagacgaaggacgatacgtggcggaggagaagagatcatcaccaccgcaaaggaaaggcattaagagatggagatttcgtttgtgacagtaaggagaagtgagatgaagcagatcctagtaaattagagaagggggctaggcaaaactagaagcatataaggaagaagatgaagagaaaatagtagtttcaagttgaggttatacaaggatgtttcccgtcataccagagagaatcagtttctaaataagacatatctgcaaagatcatgttgccatgataccctcgacatttttccaacctttgtaattgatcgttccaaataatgtataataatgagatcataggaaacattcctacccctatacactatttaaaagtcttctcaatctctcattatatatttattattattatttttttattaggggagaggaacactttctttttatcacattagtcgacttatcaggtatgaacaaggagtaaagtcctatgaacactaaccgttttgatgaggtaaaaggaagagcagtgagattagctccagcctttgtggattatgtttggaatggatgtccttaagtttattgattggttttctggattttccattagtcggattgatttcaatcggcagtacttaagcaatcctggcaataaactcgagagatagatcataatttcagacaaaagttttgactcaataaacgactatctaagttagaatgacacaactgactcataagaaaagaaaagataaagttagtaactgactcccccagacttagataacactgtccccagagttattaagctagaggaatcgaaagaaaaataatcaaaagttaaaagttagagaaacgtgagttgccacctgagagtggtgtcgatcgataccatggttgtgtcgatcgacactctggtcgtttcgcttagctttgcgaattcagctcattgttgtagagtcttggttagtgttttcacatggatcctccagttagactgttgaatcactaaaacacctatcaataggtccaacaaagcataggaaaataagtgcaacaagtttcaaaacaaataacaaatagtctgaaataaagcaaaaacaaagttagaaaacaaagcaagataaggaggatggctagtcctcatgcctagagccggaggtgggtgcgggagagcgatgatgacgacgagtgggagcaacacaaccgcagcgagaaagtgtagctatggcgttccagacgctcttgaaactgtcgacgacgtattgttgaaagacctgtagctccatcgggatgggtggaggagaaggcatcttatatggaagagcggaagaggaagatccaactctcggacccccagcaaggtcaacgacctcgtcctcggtatgtgtaggcgcagatccggaagttgcacctctctgtcgcctggtgcgtggtgcggcatgtagaagggaaggatcaggatgaaagcctatctcctcatgctctcctgtaatctctgtaagtgcgaggtaacttaatcatatgctgccatgtatcttctctgaaacaccacagtaagttgcctttaagccagtgagagttcttcaggtaagtctcatcaatagtgaatcgcgtggtgttgacctcttctccctcaaagatgatgcggaaatgctcgaatacaggagtgagaaggctgccaactctctcagatttctgccctctacctataaagggctttgtcttaagcgagaccaagtgatgagcaaacacaacaccaaagttgacatcgcggtcaccctgctcaaatctgaagctgtctggaaagaaatcatgaaaagcatgatagaacaacaacaactcagaaagtctcattttgccaggctccatcgtacacaacagtgtgctactaatcagcctaaccaaataccgcagaacagggtgacggatctctgagtgtactgcttccttggaatcataaattccattaccaaacctgcttcagaaaatctgagcatccttaaactgtctaggcaagggaaactccagtgagatcattgtcaaagccatagatgtcacacaaatctctcagtggtagactgtatacgacaccgcgaatgaagaagattagagctccttcctgagcgttgcgtttcctgtcattcacatagtaaaccttaacagaagccatgaattgtctaactagctcaggatacaaatcgtaatgcctaaaacagatggttcccaaacctatgtcatctagcagtcctaaaaagaatttctctttctgcaaacgctccatcaaaccgaaatctgcaacccgagtaggcaaaatttctacactcatccaggcattatagaacagagtatcataatcatcccaatctggagaaaaagggcgattgatatagtcacctttagtgaattctttgttgacatccttctctcaaactctttgagaaggaattctctctgttggaagctttggccatggaaatcgataaataggaggttgaggggttgcagcttgtggttgcagttgggaagggcggagacccgcgtcgaccgagaagctccggcggtggtgagcagcggcggaggaggaggatggaggaacgcttttccttgccttctttttctgcccagtcatcttgcagatcgatggaattgatacttggggaagatagaggatgaaattctaatgagtttagagcctgaaatcacaagaaacggtgaagaatcgaaggatctagagaaggattagtgatttcggcggcttgagaaagaaatgaaatgaagaagatgaagtttaggttaagtcgacactatttttttttttttttttttagatctgaataaaaatcctataaaatcaaaaatcctaagttaaaaatcaaatgaatgaaatgatgaaaaagagaaatacttactagtgggttgcctccctctaagcgcttatttatagtcaatagcttgcctctacagttgcttaatcaacaggtgggtcctgaagatccaaaggcttttctactggaatctcggcttcagcccagtagtgtttgacactctgtccattcacagtaaatggttttccattgttgtttttgagaattactgttccataaggcctaaccgagtggactgtgtagggacatgaccaacgagaagacaattttccacgaaaaattgtcaatctagaatcataaagaagtacctggtcatttggctcaaaggtctgagtgaggatcttcttgtcgtggtaagcttttgtgcgttccttgtagagcttcgagttgtcatgggcatgaatttgtatctcatcaacctcattcaactgaataagtctcctttctccaactgatttgatgtcgaaattcatcatcttgactgcccaagctactttgtgctctaattccactggaagatgacaagctttaccatatagaagatgaaaaggtgtggtcccaagcagagttttcaaagctgtcctgtaagcccacagtgcatcatctaacttgtaagaccactcctttttcgctttacccactgttttctcaagaatctctttgatttgcctgttggaaacttcaacttgaccgctcgtttgtggatggtaaggagtagcaactcgatgttgaactccatactgtaaaagcaatttcgcaagaatcttaatgaaatgcttacctacgtcactaatgactatgcgtggtactccaaaacgagggaagatgatagacttgaagagtttcatgacaaccgctgaatcgttcttcggactatctatagcttctaaccatttggagatataatccacagctactaggatgtagagattcttgttcgaaggtgggaagggtcccatgaaatctttaccccaacaattgaagacttcgacttcgaggataaatttttgaggcatctcattacgcttgctgatctttccctttctctgacaagggtaacattgcgatatgaacttctgagcatctcgaaacattgtaagccaccaaaagtctgctcgaagaactttggatactgccttgaagattacaaaatgacaaccatagctagagctctgacaatgcgatagtatatcaggaacctctgttgcagcaatgcatctcctataaactccatctgaacaatgcttatagagataaggttcatcccaataataacgcctaatctctcttaggaatctcttcttgttgtaattagtgaaattatcaggttccacatctgcaagtaggtaattaacaatatcagcataccatgggtagtccttctcgaccgctgtgacggtgcaattctcagttggtgaccaatttcttgtcgattcataagggtgtcgatcgacagttccacttcttcatcgcgcaactacgaacatcaactttctctgaaatgtgagtgtcgatcaacatagaagtggtgtcgatcgacattgaagctcgattctgcaactcataacgtttgcagtcatcttctccagctgtatcaaaagtcttggcttagcatccttcttttgcatcaaatatttcaaggcagcatgatctgtgtgaacaataaccttggatcaaccgagataagatctgaatttctcgaaagcaaacaccatagcgaacaactctttctctgtagttgcataattcctttgaccatcatcaagagttctacttgcatagtagatggcatgaagtttcttatccttcctctgtcctagaacagctccaactgcaaaatcactcgcatcacaattggtgcgctgatcaaggcttgttttatctgctaaaaggcatcatgacattcttgtgtaaactcgaatttgacttctttacaaagtaaagcagtcaatggtcttgcgattttgctgaagtctgtgaagaatctcctgtagaaaccagcatgtcgaaggaaactcctcactgccttaacattatcaggcacttgaagagttgtcataacctcaatcttagcactatcgacttctattccatgctcagaaatcttgtgtccgaaaactatcccatcctacaccataaagtgacatttctcccaattcaaaactagatgtttctcctcacatcttgccaacactttgtagagattctctaagcaatcctcaaacgatgatccataacctgaaaaatcatccatgaaaacttccatgatgtcctcaatcatgtctatgaagatagacatcatacctctctaaaatgttgcaagagcattacaaagaccaaagggcattctccaataagtaaatgtaccataggggcaggtgaaagttgttttctcctggtcatctggatgaatagggatttgaaagaatcatgagtatccatcaaggaagcaataatacttatgatttgctaacctctccaacatctgatcgataaatggtaaggggaaatggtctttcctggtagcagcattcagctttctgtaatcgatgcacatccgatggcctgtgattgtccgagtaggaatcagctcgtctttctcattcttgactactgtaacacctcccttcttaggaactacatgaactggactaatccaactgctatctgaaatcggatagataatccctgcttccaacagtttcataatctcgttcttaaccacttctttcagattcggatgaagtaaaagaatctatcaagaaggttttcccttctatgatcggtttcttgaaaaagtgttcatatcgaactgcatagtaagatcgccaacattcagccctatcttcccttgtcgaacatctatgattgctccagctgtgtgcaagaaggatctcccaaagattaatggatccttatgttctttctcataaggtaataagactacaaagtctgtaggaatcatgctctttccaatcatcacgggaacatcaataagaattccatctggaattcgggtagaatgatttgccaacacaagagtgataaaggtaggctcaagattggaatacccaagacgcagagcaactgaacgaggcatcagattcacactacaaccgcatcacataaagctcttgggaaggaatcgtgattgatggttacactaagtacaaaagttccaggatcaggtagctttcttgggattcgttcttgaatgatgtcgctgccttgctttgaaatcatcataacactgcattctttcgtcaaattcttagtgaccattgtcttaacataccttctgattgtgggagatagatgaatagcttcaactagaggcatctcaacattcagcttatcaatcatagccttgcatctgacatcatctaaggtttgtcttgactttttaggactcttgaggaaaggaattcgccgatttgctgatttggtttcagcaagaatttgcacattgtctgaacgagctgcgtgtcgatcgacaggagctgggtgtcagtcgacaccatcgggaatagtttcctcctcctccacaaaattgtcgattccactcgacaaaggaaaaacagagtcgtcaagagtagtgttgattgacaccctggtgtatcgatcgacattgattcgttttctgcaattggaaaagttgaaggctaagctgatcgtttgcgttgaagtattgggttgagctgctttccgctgcgtagtgtgactgcattgatagaagctgatgtaggtgagagattggatatatgagagcgtagattgtcaatcttgctattgagatatgtggagagagaatcatatttgctatcaagctttgttaggcctgctagaagctgcgcaagcatagactccattcttgtctctgatgagggtggaagggaggcttggataggagcagaaattgctaaaacaggagtcgctttgctcgcggtggctaacttagctaaaattcttcgttctgtgtcaaattcctgcgtcgaaagacaagttaaagcattggtgatgaggagtaatgcttcactaatggttcttgtcatgaagttacaggagcttgctgcatcgagttgattccggtatggcttgtttattcctttgtagaataggttgatgagttggctctcttggaagccatgttggggacattcacgctgataagacctaaaacggagccaagatgctctaagggactcagctggagcctgagtgaacgaagagatttgcaaacgaattgcctctatcacggatgcattgaagaagtgattcatgaatgcattctttgtattagtccaattggttccagttaacgcaaccattatgttcctctgctcgcgagagagtggaggaagagtttgcaaagaaggtaatcaactggtacaccttcggctttgatagaggaaactatgtcttcgaagacttccaaatgatcgaatggtgattcattaggagctcctctaaattttcctctagatacaagatcataataagcagggtgtattgcaaagtcttctctttcaaatggaggtagcttgaatgctgatcggttggtgtagaagagatcagttctgttaaaattgcctattgtagccgtctggttctgcagagggtgtcgatcgacaccctgatggtgttgatcgacgcagccgtgaaagtctgccattcaaacgtgattcccaatctgtaggtacctgaaacacaagagaccaacagacaaagaaacacgtgagtaggtgatagaaaagaagtatctagacttaaaaggacacctagtctaatggtgaactaaaagagaacttcggcaacgacgccaaatttgatatagctctaaatgccttaagcttactccctcaaataagagatcgtcgttggtacttaagggtcgaattccactgagctcttgatgttcacacaatagacttatgatgttatttaataagctagatgaagtaattgaatgtaaacgacaaataagcaagtaaaataggtgtagattcaaatgattaaagcgtcgggtctaaggaattgtctcgagagatagataaattgtagatctagctaatattaagattgttgtcgcaccgttctcgaactcaaactatgattcaagagtaaccggtggtgctccgcgaaactctctatacttagagctaagataaccagagaagccgagaaatcctatgctaaagcatgcattgttattaagtgatatggttcaaattacctagaactactctctcaaataagagatcaattgcagtattttaggatagaattcacggagttcttttgttcaaacaatgagttaaatgttgggattaagctagcaaggtaatagtgaaaataaaagagaacaaaataaaagacagcagattgatttggttgtgaacgattaaataaagagctaggaacagggtactctcagtaaactattggtttgtagatctaatgaaagctaagatgttatcaaaccattcttaatctcaaactctaattatggaataaccggtgggcgtgccgcgaaactccctatatctatagctaacaataacctaaatatgcattcttaacgagttcaattgttcatcttagtagataggccaattcttattacacacctatataccagactcatcaaataatagatccaactacagatacttatggcgggtatatctattgtctggattcaagatctagttaattactctagatctagcattagacataattaaagatgaagaattctatagataacctagcagagggggcaatctactaaaccatatgaatccctaatgagaaacactactcctaacaagcagactactcagacatattggatgaagcaaacaacatgattaagtgagcaaacataaacacagtaaatagagaaggagaaagaaggtatcttttcactgtatatagatgtgaatgaaactctgaataataatgaatgaattgctttatgtctcttataatagggtttgcaaagaatttgataaaagacttgataaacaaaacttaggtctaaaaacaatatatatagaccctaaaaacgtccagggactaataatgcaaatagggaagtcttatggggcaaacttgagcttctgaaaacttgaaagcgtctagggtttttgctgggccgaaacttgtgtcgatcgacaccaagagtgtgtcggtcgacactcctcgctgattcctgagccaaaatcgtccttagcttcctttaccttagcttttgctctaaaatgtctccttatctccattgttgtcccattgcatagaattcctgaaaagacactaaaaagactcgagaaataacataaagacttaaaatcctatacctaaaacatagataaaattggtgaaaatcgggttatatcaactcccccgacttagcttttcttgccttcaagcgaaacataaaagccgaacatgtggaagaggttttgaaaacaaaggaactcccaacattctctagcctattgccatgatcattcatactaagtccatatgcctaacaagtctaatcaaatcctaaccaacatgtacttctctacaagcttactcaacattctagattccatgcctaaattccacaactatacccaccaggctttcatcgatgtctcatcaaacaagccaacattcaagatccttttagactcattcctgtattatactatgataaattgaccattctttatatatttttttcttctttttcggtgttctttctctcccccaaatttattctttttagagagtaaacaaaagagaactcgcatactagatcgacaccctcggcatttttccaacctttgtaattgatcattccaaataatgtataacaatggggtcatagggaacattcctacccctatacactatctgaaagtcgtctcaatctctcattattattatttattattattttatttttttataatgggagaggaacatattctttttatcacactagtctcaatatcaggtatgaacaaggagtcaagatctatgaatactaaccgtttgaagaggtaaaaggaagagcagtgagattagctccagtcttagtggttgagttggaaactaggatatcctcaagtctgttggtttgccatctagattttccaatagtcggattgactcgaacctggagcactcatcaatcaggcaataaacatgaaaaatatagatcatgcttcctaactagactaaaaaaaacgtttttttataaataaaagcattattagtaagaacctcccccagacttaaacgacactgtccccagtggcattcaaatccagagaaagcgggaaaaataaatcaaaaataaaagaaaataaaagaaagggaaaagaaaaataaaaccagtggatttcctaccactaagtgcttgttttgagtcaatagtttgacttggcagagttcgggatgtgggtggagtggtggtggagtatttttggtgcctcctcgccttccacggcggtgtgtaaactgatctggttggagcagcttcaggtgtcgaccgacactcaggggtgtgtcgaccgacactcaggggtgtgtcgatcgacactcatctcgtcacctgcaaaaacaacaggagaaacaagctttcgaggaactctaggcttgttatctagtgaagcagtcttcgaataatctaaagaattaatcaaagataaaacaggagaagagagagaagagaacttatcacataggtcctcaattgatgtgggctgaagagaatgtgcagaatcctctgtctgtgaaactcgagggtgtcgatcgacaggggtagtggtgtcgatcgacaccgttcctctgcaaatctcattggcgagcttaacgggttggagcgttgtgtgtggctctgtggtgggagtctgatcagtctggggagttctgtctgtactggaagcaatgcaactgataggcttagtaagctctgaaccatccatgccaaactccatctccgaatcacaaaccttgagagagattcttcctctcttcacatcaaacctagcaccagctgtagctaggaatgctcttccaaggataagaggatccttgggttccttctcatagtccaagaccacgaaaccagtagggattatggagttaccaaccttaacaggaacatcttcaaggattccttcagggattctcttggaacgatccgcgaagaaaagagtgatgcgagtaggcctgtagtgagtcatgcctagtctctcagcaacaaacttggacatgaggttgatgcttgatcccagatcacacaaagagcagcggaatctgcttgtggagatagagcaatcaagaacaaagctacctggatctggaagcttctcagtggtctgaccaggagtaatggtacggatgtactcagctatgtctactctctgtgccttctccttcttggccttaggcagcatgattgcaggaaagcgtcccatatggtgtcgatcgacacaggagggtattggttgacaccatctctgcaactgcgagctccaacttgtcttcagtgtccaattcctcccacacatcatctccttctctgatcaagatggcattgcagctcttccttgggttagcatcatgattaccaggaagaaaaccctcttgtctcttgatagattgtgcagtttgagctacctatacatctagcttcttcaagtgagagctcagattgtcgatcttcccattaagatctgtgtagacagcatcaaacttgcaattaaactccacaacaagctttgtttggctctccagaatctgctcaagcattgattccattcgtgtctttgatgaggggggaggggggggggcttggtaagttgaatttccataagtcctctgaaagttgctttgaggaaaagtcttctggaaagcaggcttgggagtgtagttggaggaaccatggttccctgtaaacctgttgccactgaagttgccttgtggctgcccaaacttcctgtatccctgaccatctatgtagaaaactccttcctctgactcaggctcaggctcaatagtctcttcttcagctacaaagtggacatgctttttccctgtgagtaagttatgaactgaatccagcttagcattcacctctaccatctgatttcctaaaatagctccagcaatcttcttcctctcaaagtcggcattcttggtaccgttgctgcaagcaaggttctctatcagggctgtagcatcagctgggtaacgtgtattgaagttaccgttgcttgctgcatccagagccatctggtatctccaatcaactcctctgaagaaggtacctagaagttgtacctcactgaaaccatgatgtggacaatctcgttggtactccttgaaacgaacccaaacagccttgaaagcttcaactggaccttgtgtgaaggtagacagcttgtttctcaactcttcagacttagcatcatcgtagaaattgttcaagaatgctatcttgatgcttctccaagtcttgagcgaacctgctttaagttgtttaagccaagaagctgcttccccagcaagtgaataagggaagagtttgcacagtaggtagtcctctgaaactccattagccttgatgctcaaaacaaaatcctcaaatcgctcaatatgatcccttggctgctcatgagataagccatggaatggatgctggccaactaaagcaaagtagccaggcttcagctcataatcgttcctttggaatggtgggggtacaatcgatgatcgattaccatagaacaggtctggcctgttgaaatctccaagagtacgacgtggttccacacctctgttgtgtcgtttgacaccgattgcatccgcgtgctgctcccgatggtgtcgatcgacacctagttggtgtcgctcgacaccgagccctgctgcgtctctagcagctaattgcgcattgaggcgagcctgatcctcattggcgtcctcaggtatgatgagtccatgatcatccaatctctgaccagcctcattgtaggcctgcccatcctcatctctcaaaactccttctacatcagctttgatgactttgtcagccattgctaatttctgaattttttggttggtgcgttcaagttttcccaagtccagaacagacaagttgataagctccttctgttttgtgctccttgtttgcctaggcatacacctgaaatacagaaaagaagaaaacaagaaacgcgtgagtaacaaaatagaagtacaaactaaacaaaatctctaaacaaaactcaatgatgattcccaagaacttcggcaacggcgccaaatttgatatggttcaaattacctagaactattctctcaaataagagatcaattgcagtattttaggatcgaattcagggagttcttttgttcaaacaatgagttaaatgttgggattaagctagcaaggtaatagtgaaaataaaagagaacaaaataaaaagacaatagattgatttggttgtgaacgatttagtaaagagctaggaacaaggtattctcagtaaactattggtttgtagatctaatgaaagctaggttgttatcgaaccattcttaaactcaaactctaattatggaataacggtgggcatgccgcgaaactccctatatctatagctaccaataaccggagaagccgagaaactatcaacctaaatatgcattcttaatgagtttaattgttcatcttagtagataggccgattcttattacatacctataaacaagactcatcaaataatagatccaactacagatacctatggcgggcatatctattgtctggattcaagatctagttaattactctagatctagcattaggcataattaaagatgaagaaatctatagataacctagcaaagggggcaatctactaaaccatataaatccctaatgagaaaccctatttctaacaagcagactactcagacatattagatgaagcaagcaacatgattaagtgagcaagcataaacacagtaaatagagaaggggaaagaagggatcttttcactgtatatagatcttaatgaaactctgaataataatggatgaatagctttatgtctcttataatagggtttgccaagaacttgataaaagagttgataaacgaaacttaggtctaaaaccaatatatatagacccttaaaatgtccagggactagtaatgcaaatagggaagtcttctggataaacttgagcttctgaaaacttgaaagcgtgtagggtttttgctgggccgaaactggtgtcgatcgttagcaagagtgtgtcggtcgacactcctcgctgattcctgagccaaaatcgtccttaccttccttttccttagcttttgctccaaaatgtctccttatctccattgttgtcccactgcatagaatacctgaaaagacactaaaaagactcgagaaataacataaagacttaaaatcctatacctaaaacatagataaaatcggtgaaaatcgggttatatcattaagcttgattagttcacctacactacaagaatatcgactattcatagcataagaagatagcgtttttagtgtttatgctattgtatatgtacccaagattttatatagcgtttgtttaatttgtaaacgttatcaatacattaggcggaagaaaaatttgatacgcgggataatttggcttttatattagcaagggtagaaataaaacgctatgcattgtcgagggcgcgtaaaataaaatttgcccacttcttattatattttttcttttagattaattaataaaataaattttctcgcttctcaatttctctaatctgtcgttctagctgctcaattatcaatttctcaatttctccaaacctcaatcttgcttcgaaatctctttctttctccttcgaaatcttaatttctttctcgcattctcattatgcaaccctaatctgtcgttctagctgctggatttttcgttttgggtatatttcaaggttagatgtttggctctagctcttgcatggttctagctcttggttctaactcgaattgattgtggctctagctcttggttctaactcgaattgattttggctagatgtaagggttcatatatgtgctcttgaattggtagatattggttaactcgaattgattttcgctcttgaatagctagatgtaagggttcatatatgtgctcttgaattggtagatctagttgtatagatataaatattgatagaaggtataaatatttagggttcatatatgtgtttagattttcttaatgacttgctgttgaagaagaactgttaaatgtttgttttgattttgttgcttttgatgcttataggccttctcaaatcacattctcttatgatgtctgctgtcaaaatgtttgttctcttttaagtctaattgattcttcctaatttttgcagggaactctttggatttttggaaaacgttttggatggtgagtgctttcttcttctctgcatcagtattgagtgaaacgatttacgtatatatgtttatctgatcattggaatttattatcattgcatacatatttatccttggctgtggagctttggtgaaagatttgttattttaacatggaaagtcttgggtttggcttccgaggtatggttttcattgctaatttcctttattttgttgagtaagattgaaagtgaaattacacgggtatggatttatttgttatttcttcaactgacagggctagtgtagaatatcagcgaggggtaactagttttgtacatgcatcatcaatgagactgggtaatcctagtgccatgttgtgtccctgcatagactgtcgcaatttgtgccatcaaccggtagatctagttttggatcatctagtgattaggggtacggactagaaatacaagaggaatgcttgttggagtttacttggggatgtaaggcctgataagccatctgagaatctgaactctgtttttgaagtttatgatttgattagaacagctttctttgatagtgaaagcaatgcacagacccatagccacagtgaagattcaagagatgagattgatagtaaagaagaatatgagtttaggaaaaactagaagatgctgaaactccactatattctggctgtctcaacttcaccaaggtgtctgcgcttatggggctttacagaattaaagttaagagtgggatgtcggagaattattttgatcagttattgacaatagtggcttccatgcttccaacggataatgttctcccgaggtcaacaaatgagatgaagagtatcttgaagatgtttggttttggatatgatatgattcatgcttgtaagaatgactacattctttaccgaaaggaatacaaggacatggaaagctgtccacggtgtagtgtttcaagatgggaaagggataaacatagtggtgaggaaaagaaagggatcccagctaaagtacttagatacttttcaatcaaagacagatttaggaggatatttagatccaaaaggatagctgaagaggtgcgttggcattcagacaatgctagttcagatggaagaatgcgtcatccggttgactcaataacttgggccactgtgaataacaaatggccagagttctcctctgatccaagaaacctccgcctcggactttcaacatatggaatgaagttattctcgatcgagaataccaagtatagcacatcgccagttctattggtcaactacaacatggagccaacaaagtgtatgaagtcagagaatataatgttgactttattgattccagggccaactgcaccaagcaacaatattgacgtctatctagcacctttgatagatgatcttaatgatctgtggaatgaaggtattatcgtttatgactcatttctaaaagagaattttacactgaaggtaatgttgctgtggagtatcactgattatccagctttggggacattagttgggtataaagtgaaagggaaacaagcgtgtgttgtgtgtggaaaagatacaccttttatgttataacagatgtgagcaagataacaaaaatataaagaacacgacactgatttaacgtggttcaccaacactttttgttggctacatccacgggcaaagagacagattttattactggagaattacagaaatcagaatacatggaggttaggttaagaatagtacttatacaaaagaaaccctaattaacactttgttggctccacttggagccttatgactcgttagaggccagatgcttcttcagaagccagatgctctatcgagccaaactgctccacctagagcatgatgcctcgtcagaggccagatgcttcttcagaagtcggatgctccactgagccagatgcttctgcagaaaccggatgctcaacagagccagatgcttctatagaggccgaatgctctattgatccagatccttctccagaagccatatactccattgagacagatgtctgttactctgacaagccaaacgcttcatcagaagctagaggcgttgtagagctagatgctctgttgagccagatgctctaccgaatcggatgctctatcgagagccgaatgcctcttcagaggccagatgtccctccacggacctagcaccccatcaggggcctgttcgcccttcagggcgattaacagcttgagatattcagcaagtctaaacaatgtttaaacttgttctgaggaaaccggcttagtgaacatatctgtagggttatcagcagtcactaccttcttcacttgaatcctcttctcatttctcagaaaatgatatctcacatcaatatgcttggtcctctcatgatggacctgatccttggctaaacaaatcgcactcaaactgtcacagtacactgtagcctaatcttaatgcaaacccgtatcactgaccaatcctttcagccaaataccctctttaggaacgtctgtcaaagccatgtactctgcttctgttgttgacagcggcacagttgcctgcagagttgcttttcagctccatatatgaagagcgtgctgcttcttgctccattcatgagccttttgcttcagcaaccagaatgcctctcaaaggccagattgctccagtcaggagtctgctgcttctcaaacagccataatgtcttttggagaccagattctttgtcacaagccagatttctccatcctgagccacatgcctgttcacaggctagaatgctccaatgggaaagatgctcaataaagagccagattcacttttagagacctgatgtcttgtacggaaatgtctccaccatcaggggtcttatgcctcttttaaaaaagactgatgtctcgcttgagacctgctaccccatcaggggtttaatacctctcagaggcctgttgtcgctcaagggacctgctgctttgtcaggagcctgatgcctctaagaggcttgacgtccctcgagggacctgctgctccggcaaaagcctgatgcctgacgtccctttagggacctgctgctccgtcaggagcctgatgcctctcagaggcctgacatcccttgagggacctgctgctccacctggagcttgatgcctctcagaggcctgatgtcccttcagcagtcagatcaccctccttggcgactaaccgcttgtgatgactagatgacacgttagtatccacctcttctccaaactgtaatgcatactcagttgtatcttctaaaccgtatctcagaggtggtcgaacatctatcctcctcgtacggtttagaacgatattgtatggtatactctctgatggtgtagattctgtttgggtaggttctgtcagacaaacttctatgtatagttctagattttcttcgtgttgctgcttcaaatcctcttgttgatcaacttttagctccacctgtttgtcaaaactatcactatctatggctgttgcagcccaaaatcttctttccaaaccagcacttgaaagcatacaccctgctctctccaacaatgtctgattcacctattcagctacacaatcctgttctggtgtatctctgactgtgtgatgtcgagaaacctctttttccttacataacatcatgaactctgatgaataacttttcagaccattgtatatctgcagccttttctggccacacagaatttgtacccctctttcactcatatgaccaagctcactcctattcttgtaaaactcttcagatgcactgtttcttaaacctatcactgtaaacccttgtatgatgtacaaggtaccacgtttgacaccctccatattcacatcagacccttcacagactttctgaattctgcctccaacagaaaatttgaaacctctgctatcaaatagactcactgatatcaaattattctccactaacggaacatgtctgacatcgttcaatgtgtagaggctaccatcatgtgtcctgatctttattaagctgattccaacaacatagcttataaaattgtgtgcaatcttcacgcaaccgtcttctacttctgtatatattgagaaccactctctccttggacacatatggttagacactccaatatcaagaacccacacattagacatatgtgtgtttccatcgttaaatagagcaaaatcctcttcagagttagtgtcatcttctgttacaacaacaaaatcatattgtttctcaaaaacaatagtatttccagtaattacagttatcacctgacttgggacccatagaaaacagctttatgtttacgttcttctttctttttcctagtccattgctgccactacctgcctgatcacaagcttgatcatctgtaattgattcaggtgcctgatacatatcaggccagatgcccaacatataccacatgtccgagacaaaccagatgccccataagggccagatatccaatacagacaagatgcccaacaagggccatctatctaacacgggccagatgctcaacatggatttgctgcctatcataggcctgaaggtccactggaccaaaacacccaccgagccagatgtccactagaccagatgccctaccttggacctgaaactgaaactgcttctcccagaaatcttgtcgatcttcacatttatcgcagacatcttctcacagattacaaacgcggaattcctagaacctgattctgcacaatacttcttctacatggattttgcacgaaccttcttctacacagatctacacaaacttttttcaacccgaaaatcgcacgaaacgcagaaaaggaaaccttgtgctctgacacgaattttgcatggatctcaaactgcacaaaattccatgcttccaacggataatgttctcccgagatcaacaaatgagatgaagagtttcttgaagatgtttggttttggatatgatatgattcatgcttgtaagaatgactacattctttaccggaaggaatacaaggacatggaaagctgtccacggtgtagtgtttcaagatgggaaagggataaacatagtagtgaggaaaagaaagggatcccagctaaagtacttagatactttccaatcaaagacagatttaggcggatgtttagatccaaaaggatagctgaagaggtgcgttggcattcagacaatgctagttcggatggaagaatgcgtcattcggttgactcaataacttgggccactgtgaataacaaatggccagagttctcctctgatccaagaaacctgcgcctcggactttcaacaaatggaatgaatccattcttgatccagaatatcaagtatagcacatcaccagttctattggtcaactacaacatggagccaacaaagtgtatgaagtcagagaatataatgttgacgttattgattctggggccaactgcaccaagcaacaatattgacgtctatctagcacctttgatagatgatcttaatgatctgtggaatgaaggtattatcgtttatgactcatttctaaaagagaattttacactgaaggcaatgttgctgtggagtatcactgattatccagctttggggacattagctgggtgtaaagtgaaagggaaacaagcgtgtgttgtgtgtggaaaagatacaccttttatgttataacagatgtgagcaagataacaaaaacgtaaagaacacgacgacacagatttaacgtggttcaccaacactttctgatggctacatccacgggcaaagagacagattttattactggagaattacagaaatcagaatacatggaggttaggttaagaagagtacttatacaaaagaaaccctaattaaccctaaactgattgggcctaaagttaagggcccaatccaattcaagtcatatctaacattttaggtggttgaaatttagtcgaaaacatgtgtatttaggcaatagaaagaggctgaggcctgtgcatccgtatggaagaagaaagaaatgttttgacaacacattagaagaagggtttgctagcagaattcaaagtggagttgaaatatatgagttacttaaggacttcagaaatgagtttgggaaacctttagggaaaaacagcaaacaaaaaagaacaattgtctgtgacgatgaggtgatttcagatgatgataatgatgaagacaatggtacttggaggtggaagaaaaagtccattctcttcgagttagcttattggaaggtatgtgtaatgtataaattatctatatcataactccagttttaattatatttgtaactagatttctaacttagtcgtctaacttgtgtatcaggatatgccggttaggcacaacattgacgttatgcatgtggagaagaatgtctctgatgctatattgtctattttgatgcaatctcctaagtcaaaatatggattaaaggccagaaaagatttggaagatatggggatccgagggaacttacacattcagatgaaagggaagaaatcttacttacctctagctacttgttggctgtcaaaagaagagaaaaagagattttgcaagaggctgagtttgttcaaaggacctgatggttattgtgcaaatcttgcaaactctgtgttcgttgatcctcccataatagatggattaaaatatcacgatcaccatgtgcttctgcaaaacctcctaccatttgctttgcgaggcttgcttccaagtggacctaggcttgtagtgactagattgtgcagtttctttagaagattgtggtaggagttcttgaccctgagaagctaatatcattagaggatgagtgtgtagagacactgtgcgaactagagagatattttcctccatctctttttgatataatgtttcatctacccttacatctagcaagggagacacgtttgggtggaccggtccatttcagatggatgtacccctttgaaaggtactctatttttaaattctgataacttttaataattcatcaatttagatactcttgcagtggtctaacagattgcaaacttgaccaataggtacatgaaaacgcttaagtcatatgtaaagaactatgcaagaccagaagcgtgtatggctgaaggatatatggcaggtgaatgtattgcattctgcttagagttcttacagaattctgtaccagttcaagagaatgtaaaccgaaatgaagatgttgagttatctgcaaccattcttgaaggcagaccattgcaaaaaggtaggcaagttattcttactgataaagaacgagagatagcccatcgatatgttttaatgaacatggcagtgatgaatccatatgtagagtaagttcacctttgagaacttttactaaatcgattgtgaagtatatgaaattaacttgatatcttttgattgttaggatgcatatggaagaattgcaagctaatgatatccgatgtggaaaaaatgagactcttctgtggaaatttcacacagccagattctcattgtggataaaagaacaaggttattgataattctatttttctatgtattgaatcagatactaacttagttagaaatgcataagtctaacttggtattttttactgatgtgtcattagatacctagtaattcccacgagcattcaactaagttgagatagttggctcatggaccaaggcatatagctcagtcctataaaggatatgtcattaatgggcaccgctttcacactgaggatgtaatgcgtaagactcaaaacagtggcgtcacatatgaagctttcagcatgtgtagatctagtgccagagatactaggcatatcgcaagcatggttgtgttctatggagttatccaagagataatcttgttggattatcatatgtttcaggttccaatattcaagtgtaagtgggccaacaaaggaaatggtgtaagagaagatgaaggttttacactagtgaatgtgaatgttaaccaatctgggtatagagaagatccatatattttggcatcacaagcgaaacaggttttctactctaaagaagatgattcatcagcttagtctgtagttatgagggcacctcctagagggtatcacgagttagaaacaaaagaggagtttgttgcaccttattctgttcctgaagtagaagatttagggaaccaatcttctgatgatgagagtttttatgttagaaatgattgtgaaggagttatagtaatggagtgatagagttttgcaacaagttaaagggtaggcaagttattctgtctgataaagctttgaataatatacagagttttgtttcaggtgtacgacaaggctccctacagtagatgcaagcaacaacatgcgcagtaaaaggaaacaaggaattagccctgtgacattagagcaagctgaagaagacagtactaatcatattccaggggaaaatgtcgatcaataaactatccagccatcaactgtagcagatgaaacacaagaagcaaatgtcaaatcaaggaaaatcagaagaccaacaaagatgcgtggagttgcaaaacaccatgatgataaagttgatgttgaattcactgctttaggtgaacctgttgggaaagggtctgtaacactttcatcgtttcttggtcctctagtcagggagcatgtacctgtactcctagatgattggaggaaacttgatgatcaaaccaaagacagactttgggaggagattaaggtacttcatcttttgtttatagagtattccatcttaagttattataaagtaatgtttgcatttgaaaaatattacaggcaaggttcaatttaaatgatggatagcaaaaagattctgtgtttaagcacatggattgtttgtggcggtcttccaagtccaagcttttaactaaagtacgaaagatgggcaagacacaattacaaagtttgaaaccaaagaacatccaatctgttgcagcatggaaaaattggatgaagaataagactagcgcataatttaaggttgtataggtttagattttgttctatagtcatgtgtctttctgattttttttaacgcactgataaataggattgcattctgtaggctaaaagtgacaagtttagagaactgaggaaggcacaaattgatagtaggattttactcaattaatcctaaaacactatcttgtcgttgtagtattttaggatgtcaatccaatccggtgtgatgcaaacagatgagatatgatcagaaaactctaagtcaagccaagcagaaagttggttggttctaacagtcctaatatgcaataacagaaatgaaatgaaactaaaagcagaaatggcaatagcaggcaagtgaatgacaaagcagaaatgataacaggcaaatggataaacgattcctaaggatgtggtaatcgaatagtgtggtctacttaatctattcaggcggttgacaaaacttcacagaagctatccctagacaacaagttcaacaacagattaattcactctcgtgatagaaatcctcaagcaaagctagacactgacctaaatccctttagcgatctctaactaagcaggcattaccgaatcaacatgttaaagttaataccctctctacagctaatcccttggggtagagtcagatatctctggaattaataggatccaacgcccattaaatgccttctgagcgctggacgtctggactcatactccacattagctagtgaaataagcaataagcgcaactaatccagaagggattctagaactctaaactcaaccacctaaaacgaccaagtaaaccacaactattctatcacatcctcagaaatacagttcactactcagacataatcaaagacaataacaaagcaacaactgaaaacatgataacagaaatgacgaaagacttaaacgaaaactgaatatcaaatacttgaaagcgaaactacaaagtcgcaggagaaacactgcggctatcaaagttgcgaaaatgtaaaagcgagataataatggataatagcggataataacggatgccctagggaaaaccctaagaggcagtttatataagcgagaaatgaaacaaataaggaaactaaatatatagcaaatcttcacgtcatgatcctgcgaccgaatatgtcattggcatctgacgggcagaaataagcttcctagtgatcgagtatgttattgatcaaactgggcttcaggggctccgtcttgcgatcgagtgagatgcagtgaattcgagattgaatggtccagcgaccctgtgatcgagtgcgatcgagtggatgtcatgaggtggtgatcgagtggtttcttcggcttctcttctcttctttgttctcagcttgtctggttgagtgcataatgagcagataggcttcctggtgatcgagtggtgatcgagtggttctgatggggtgattcctccggcttcgcgattgagtgaaactgagctgcttgcttctccgaggttgcgatagagtgatttgccctggcagggcttcgaggctgcaatagagtacttttgctgaaggcgtcattgggcattctgacttcaggttctgtttttcctctgtttgaactccaaaagcatccaaagtacctgaaaacaaccaaatatgccatgcacatgcaatcctaatgcaaaatcgtcctaagtatgtaaaacacactaaaacgactcctaatgagatgaaatgtggatgaaacaatgacaaaatggtgaagaatgaatgcctaaatcatgcaaattatagacatatcaactcccccaaacttagtctttgcttgccctcaagcaaacaagaagacataagcggaaggagaggtttgaagttggggattcagaaccaaagcatgagatatgacaattaagatcaatgtaccagctaacagttctaagatgcgaggtgatcaacttctacttaaaaactttagccatgctctgttatgatccaaacctacactcaaatgcacaatgcgtcaagatcaaccaatccctttaacattcattaagttcaaaaacatgaatcaagatatgcatcgctagtgaactcatttggctaatgacaggttatgagacaaagatggtccctttttagtggttcagattttaatagcaggggactctcaatgaaaaaggactgagctttagaagaatgctaaaggtaagtgccaacctatgcatacaagaatagcaccctatctacccaatgacataaaccgtgaataacaagtagatggtcctatctctaaacccaatgatgatcctaagtctacccttttgcactaaaggcatgtttcgatttttttcttggatcaatgtttccttttcttttctttggctcttgttcttaaggagacgcttttcttaaactctatgagtctagtctagtgaattgggtttttcttaaactcttatggctcttatcattttttttttatttttctgtttttgttgccatctattttttttagagcatatcttaacaattctaggcttcccaaacattcactagaccacaatataattttcagcttccttctcctaaagactctaacccatttttttttttttttttccttttcacactcaatctcaatccccaaataagttcccacctactcctaccaagtccgaaaacgcggattggaaccacatgagatactactcttgtcggctccaacctaacacgttctaccaagctcaatcctgaaaaaaggcctcatgctctcacaaaataacatggcttgaaagaagggctggttaagggtggggaaactactccaataatagaagcagctacttggattaacaagagtggtgaataagtgaaagaaaatccagatatgtattctatccacgagttcaaaaacgatgcaaacatgataattataagtcagattcaagttcaaattgacagggaaaggtgtcatgacatgcatcgagtggtttctatagaacatggtgcggttttacttcaaagtcattcaaatgccttagagaactaataactcattttagtgaatcatcatgcttacaaggctatttcctcattctcccctatgcatatgcaacaatcgtatatgaaacactctagactcgattctaaatgtaatgcaactaaatgatcactctgtttttgtggaattcattttcaaaaaatttcaaatttttttgtttttttctatgacttagatgatatgcagactgaaatgatattcacaaaaaaataagtcaaatacgtcttgaaccctcccccaaacttaaattacacagtcccttgtgtaatcaaaatttgtgaaagaattcaagataaacacagaaacaaaaacaaaagcggtatttacaaagggttttggtgttttacctcagtagaatggcctggagatgtagccatccatattcgcttgagtgtactccgcaggcatggccggttcttgatgtggctccgccatctcctcgtcattaagctcgatcgcaacccgagcaggttgtagagcatgacactcatgtgttctccagcccgacattatccggcctttgcttgatgaatgtacagttctagcactcttcctcctcttgttttccattggctcatgagacggggaacttgcggaacggtggggtccctatgtttataggtgaattgccttggcggagcaatgtcatggtggctggatgacatgtcttcaggcgggttgtcattgaagtcatgtcgggcgttttcacttctccttgtgattgagtggtttgggaattccactaggagaccacttgattacaccattgccatgttgcgatcgagtggtgtcgttgagaaagatgttgtcccaaaaccactagatcgcactctcgagcttttactctcgtcttgcgatagagtaattcatccaaaatttgaaatgttttatttgaacactcggttgcatccctgttgttgccccagctgttattcatttcctgagaatcaaaaacaaaaccaaaacaaatcaaaagtaacaaaaataaaaactatatacaaggataggcatgagacttcctcccaagtgagcttgttttaagtctctagcttgactcctcacactcattaggctaaaggagggtgatagagtagaattgacgtctcctctccttccttagtagatacaacatcaaattcagcatgctctcgtgacaagtctgtaattgagtactcaatgaccctttcttggtaagctcctttttcatcatctggatagtcgtcttttctagactgttttgatgtgaattcacatccttcttttctaaccataggaataacttcatcatttgggacgtccttgatgtcgagtggagcttggttggctttcccatggagctctttgacttgatccttcggctctttcacagtgtgtgttagctctcttatagctctgtcgtgccattttgacctctccttgagttctaaccaatcatttgatgccctcacgcttgacactagtcgagtatcagttgagccttcctcgtccaatgtaacatcctctgtttctaacgcaatgacaccttaaagatctctgatcctggtacttcgttgtgtgagtctaatgacatctcatagctcaaggtctcactggagagaaatccagcttcactacttttggttaaagtagtttgaaggtgatctctgtcaacaatctcctctagcagttcattacctagctgatccatttcctcaactaagaaggtttgtccttctattgttggcttcttcatagcgtccctgatgtcaaacttcattttgacatcctctcccagattaagattaatttttccttgcttaacatctattactgctccaactgaagccaagaaaggtcttcctaagatcagaggatccttagattcttcatccatctcaagcacaacaaaatcagtaggcgcctctactctattaatcattactggcacatcctctaaaaggccaaaaggtctctttgaagtcctatcagcaagaatcaaggttagatcacaaggcttgttttgaacgaatcccagcttctttacaacagagagtggcattaagctgactgaggctcctagatcacatagacaattgttgaaagtcaattgcctaatagagcatggtagagtaaaagatcctggatcttccaacttttcttgaacaatcttcttctgagtgattgcactgcactcatgacttaacaccaccattccttggacttctttgatcctttctgtaatcaggtctttcacgtacttgtgctcgtcaggtattaacgcgagacagtccactaaagggatatcctttatgtgtttttataggagggctctgtattttgcaaccagaactttcttgaaacgaccagggaatggaagcgaaactacaaagtcgcaggagaaacactgcggctatcaaagttgcgaaaatgtaaaagcgagataataatggataatagcgaataatatcggatgctctagggaaaaccctaagaggcagtttatataagcgagaaatgaaacaaataatgaaactaaatatatagcgaatcttcacgtcatgatcctgcgaccgaatatgtcattggcatctgaccggcagaaatgagcttcctagtgatcgagtttgtcattgatcaaactgggcttcaggggctccgtcttgcgatcgagtgagatgcagtgaagtcgagattgaatggtccagcgaccctgtgatcgagtgcgatcgagtggatgtcataaggtggtgatcgagtggtttcttcggcttctcttctcttctttgttctcagcttgtctggttgagtgcagaatgagcagataggcttcctggtgatcgagtggtgatcgagtggttctgatggggtgattcctccggcttcgcgattgagtgaaactgagctgcttgcttctccgaggttgcgatagagtgatttgccctggtagggctccgaggctgcgatagagtacttttgctgaaggcgtcattgggcattctgacttcaggttctgtttttcctctgtttgaactccaaaagcatccaaagtacctgaaaataaccaaatatgccgtgcacatgcaatcctaatgcaaaatcgtcctaagtatgtaaaacacattaaaacgactcctaatgagatgaaatgtggatgaaacaatgacaaagtggtgaagaatgaatgcctaaatcatgcaaattatagacatatcacaaattctacacaccaccagcagaaaaggaatgatgagacttggtcatgagatggtacgtgtgatttacaatttatatttggttatttcaaatattaaacaatgtttgctgcttgtagaggatcaagagttctgagcttagtaaagtgactaggagtaaaatatgggtagcaagacatactcattcagatgggcgacctgttagacatgaatttgcagatactattgtaagtgaaatgggatcatcaagaacaaataatgtagaatcgctttgattagattatctatgttattctaattgttttgaaataactgtatcaggaacaaatcaaatatattgatagtgaaatggcatcttcagatactattagcattagcaacgatgctgtaagtcaagtgttaggaaaaggcaagtaaggaagagtgagaggaatgggcagaggggttactgctaccaagcgagcgttccttcaagctagagacgctcatgtacaaaagcttgaagcacaacaagcgatattgatcaacaggataaatgatttgcaaaatgaagtgtgtggcttagctaaaggaaataaggttagttaattttcactcatgtgattgattgagcaagctaatttgtatgttattactaattctttgtcttcttgtgagaatagtctgatgatgtttctatatcggagacaagcaaagttgtaactagatgtcaactactggattggtgttcaaatgaagatatcattgtcggggaaggagagttttgctcggctgaacgaacatacaagattggtcgcattccgcttaaaaatgcagccgttgttattgtcaactttgtatcaaaagaagatgcaccagtctggaggccaacagcaacaattttctcacttggaaatgctatgggcactaaaattccatggccatctaataaaatcattgtggacaatgctgtgaactctccaactgagaatcacactgctgggtcatcggtaatcattttttttatcttattattaactaagttgaattttatgcttgatcttattctaaagagataacttattcatgacataggcaccacctgatagaatcctcatctttgattggaatgtggaggatctaatagttgctgagggccatttgatttcatctgatccaaaagaactgcttgccaacaatattcctctaggtcccaatgctgcactcgttaaagttgacaagatttttcataaagatgcttatttgtggagacctactagtgaaatgatattgatgggtgatgcacttcatgagcttatcccatggcctattcagaggatagggtatagtaacccatctaccctatcacctaaagaatcatcacctgcggtaacacttctgttcccgtaatggttaaatatttttgttattgtttttgttgaacatccttttaaagtgcaagttgtgagtggcagagtgcaagttgcagcatggccaaaaccacaaagtcaaatgaccaaagaaagcgcttgttgttagattgcaatggctctggagaaatcgttgcagaaggcagaatatgttcaactaatccggaagataaggtacatttcgtccctttaggacctgatgctagcaaggtatgggtacaagttttaaagatcggaagtgcgaaagtgtggagaccaaattcagaggttcattttgttggtgatgctttgggaactacagtcgcttggccaaatgatagacttagatttatgtgatattgttgttagctttgagatgtgttgtttgctgaaattaagatgtgtttaagaacgtggaaatattgttctaagatattgttaagatgttgttttctttgaggtgaagtttgtttgagatattgttttctaataatatttgttttcagtttgaatcaaaacagtgataaatttcaaaacaaattacaaattttataataactaaagaaaaataacatttagccaacgcaatcttaaaatatattaatgcaattacaaaatgctgttatatacgaattaatagcatcagacaaatgctattgtatatgttttaatagaccctaaataaacgctattaatgtaaatcaaaccatagcagacattaaaaccactatattatgtgtctgaccttttatcgcggctgatgatagagcgtttcttaaacagctatcgtattaattgatagcgttttccgtacgctaataataactgtttttcttgtagtactagtatctaaaccatagcccttctatgagtctacatgttatttcttaaatgcctaggttcatctttgatagttctaataacaagtacctatggcgggcatacttattatctaatgtcaagttctaggtgatcaatctaaaactagcaataagaataatcaagatgaagaactctaagaataatcctaaggcgttttcgatctactaatccatgtaaatctctattgagactccctaaacccaacaaggtgattactcagacatgataatagaaacacaaatcataatctcaacagtttgcattgatgaattaataataaaagtaaaggagttcaaaatcctctctaaaaggattggattcttctctcaaaatgtgtaacaatctctaaaaacaaaacttaggtctaatactgaccaaacaattaggtatattcgtgactaaaaacgtgtagggactactttcaaataaggaagacttcggtaaagttgtttagcttgtttagatctacattttggtatgattttagtaatttttgggtttgtgttctttagaatgttgcttgagtagtgattagggttcttgaggatggattagattagggtaatctctaggttagttaggtggttagtgtttaggttagtactttgctggattcgcttggcccctatgcggttttcgctggctaatgtggagattcgatcatagacgtccagcgtccaaaagacgttcaaatggatgtctgatctacgaattccagagatttgtagactcgaccaagagatttgcttgtctgcttattggttttggtagatcgtttcttaaaccctgctctgctatgtttcataaatgagagtagagattaggaagtggtagagttatgggggtctctttcatgagagtggattgacccggtttttgaatctatcgtcaagggtacctccctttcgcctattagccatttgatgaaccctagagttgcccttatcaatgaatccatctttaggacttctattagatttatttgtatcccctgttgattgcacttttatttacctgttatttgtatctcctatttgtatcccctattgattgtattttagttcttaattttgtcacctgttggttctactcgacccaatgatcgagtacggctcttaaagttctcatttttacttgtttgaatcctgacctaggattgttactagaaacccaccatcatcataatctggcttgacttagttgcttctgtacacatcttaattgctagcaatacagtggactggattgacaccccctatatagcatcgacatgtttgtgttttaggggaattgaactgaatcacacattcaacataagcaggcctaaaaaacatgcttatcagactggctatcgcttccacccactttgacacatagtccactgctaccagtatgtacttgtttccataagaagatggaaatggacccatgaaatcaattccccacacatcaaaaatttcaacttccaagatcgaattttgaggcatctcattccttctgctgatgttccctcttctctgacatgattcacattttgagacaaattcctgagcatccttaaacattatcggccaccataaacctgcttgcaggatttttgacactgtcttgaaagttgcaaagtggccaccataggcagacccgtggcaatacagtaggatgccttcggtttcttcttatgagacgcatcgcctgtagatcttatctttacagagtgtgtagagataagattcgtcccattagaaatggttaatgtccttgaagaacttcttcttctcatagcttgacagattcggaggctcttcaccaccaaacaagtatttgacgtgatcagcataccacataagcttgtcttctactgcacatacttgatcgagtgatttattaatttgagcactctcgttaagttgttgaatcgccattagctgttcttctggcatggagtcgtcaataggtacctcgtcttcaattctcatcctagacagatggtcagctacaccattttcaattcccttcttatcaactatctccatgtcaaactcttggagcaataagatccatctcaacagcctgggtttggtatccttcttcgcatatatatgcctcagagcagcatgatcagtgtagactgtcaccttagaacccaccaagtagcttctaaatttctcgaatgcgaataccacagcgagtaattctttctcagtggttgcataccttacttgtgtatcatccatagttccgctggcataatagataacatgtagcttcctgtcaatcttctgccctagaactgctcctacagcgtagtctgaatcatcacacatgatttcaaatggatagtccctgttaggagcttggactatcggagcagagaccaaagcttccttggttgacttaaaagctgttagacattcttcttcaaatatgaattctgcttctttgcacaacagtctagtgagtggtctagcgagcttggagaagtctttgatgaatcttctgtaaaagcctgcatgcccaagaaaactcctgatgtccttcccagtctttggtggctgtaattgcatcataacatcgaccttagccttattaacttgtacccccttctttgagattttgtgccccaagacaattccttctctgaccatgaagtggaatttctccgagttcagtatcagattggtttcctcacacctattcgagtgaaagtgcataaatggaccagtttactctatcacacagtctcattgttaatagcagggtgtgatcgagtagaatggttgaaaacaggaaaatactaaaattcaatagcaagtgaatgaagaaggtaagtaaacagagaaatcaattagatgagaaactcctaaggatggggtaatcgaatagtgtggtctccctaatcaattcagtagattaacaaatctcaattaagctatccctagacaacaggttcaataacaggttcaacaacagattaatccattcgcgtgatagaaatcctcaagcatagctagacactgacctaattcccattagcgatctctaactaagcaggcaataagaactgactgttaaagccaataactgttctaaacggtcaatcccttgggataaagacgattatcaatggaattagtagatccaacgttccattaaacgccttttgagcgctggaatgtctgggatcggattccagttgatcagaaaggaataagctgtaaacacaactaatccataagggattcaataaatctacacttaaccaacagattcgaccaagggttccacaactactctatcccatcctcagaaatcctaatcactcctcagacaacatgcttaaagacaataatatagaaacgactgaagattgcatacctaaaagattaaagggaatgaaacaaagatgaacaagcaaatgaaagcaaaatctgaataacttagaagaaaaatcaaaatacaaagttgaaggaatcaaaagcgactctgaataagttgcagaaaatctctgtaaaagggtttgtaagtctccgggtgtctagggcaaaacccttagaggcttatttatactaaaaaacgataaggataagaaagcgggcttcgagcccactaaacggcccatggacgatatgatcaagagtgtcggctcaaagcaggcttcctaatgggcttcaaagtgggcttcgattgggccttctcttctcttcttttttcttcctcaggttgtctggttgaatgcggattgatcaaagggtcgaggtggtggtcgagtaggttggtagacagaatggtctgggctgcttcttggcctttgtgatcgaggatgtgtgtgagctatcaggatggactggttcttctcctccgcgatcgagtatactggtggactagcaaagtggattgcctggtcgcctctgcgatcgagtagaattgtcaggaatggactgcttcctctcctctgcgatcgagtaaaagtgtcttgatggactgctgagctgactgcttccctctctgttactggtgatctagtcctagactcgactaaagatgcaaaatgtacaaaaataatgatgaatgttatgaaagatggatgaaactagactcaaaatggtgataaaagaatgtgtaaaacatgcaaattatagacatatcatggctcttcatacccgagaacttttggcgttgctctacacatcttaattttcttgacacatatctatctgaaaacttcacttcagatgtaacccatttgaacaacgcttttttccctctggagtcaatcgaaacttcggaaccggtaattttccatctcgtgttatatgcaagtccgatctgttgcatatctctaccaaatcgaaccttgttatcatgctatctttagtttttccctgcacattcagaagcgtaatcatgaaattatcgaagaaatttttctcgatgtgcatcacatcaaggtgatggcgcaagaggagattttttcaatatgggagttgccagaagatactctgtttgtgccaattgtgggcacttctatatctgtcaggcatattcgccggagtgtgccagttacacccacgtttacatgtttcctaagcaccataataatcgatattttcaaacaaatcatttctagaaagataaactggtgggggaagacgcacaattttattcttcctaattaattttttgtttttccgatacggatgatgcatggaaagatactgacgatgacaatcaaaccaacatgatttccgcccatgctttagcttaaacgcttcagtccgatccatacaacatggacacgataatcttccatgtgttgtccacccaaataacattccatatgcaggaaagtcactaatcgtcgacattagcattgctagcatattgaaattctgcttactcgagtaatcaaacatcaggacatcttcgtaccacaaattcttcagctcatgaatcaacggttgcaagaagacatcgagtgctcgcttcggatgcttagggcctggcactagaatacttaagaacagaaattcgctttgcatacacatatctggaggaagattgtatggtgtcacgataaccggccataaaaaatattgcctcccagacatacacatttctacactcactagcaaagtttgaatatatcgtttgaaagtgtttccacgcctatgcatcagatgggtgagtaacttcaccatttactgttgaatgttcagcatgccatctcattttcgctgcagttctttctgattggtataagcgtttcaatctatctgttattgacaagtaccacatacgtttatatggtactcgcgtccttcctccagtaggctgatatctcggcttctcacaaaactgacattcttgcagattttcatcatctttccagaaaatcatgcaacagtcaatgcatacatcaatcatttctgatggtaacccaagacttgaaaccaacttctgtatttcatagtaactctcagccgatatattatctgcttgtaaatattctttaataagttcagcccaagaatccttgcaattttcacttaagttattatcagctgtaattgtcatcatcctagatgccaaagataacttagattgcccttctctacatctctcgtagatgggttgattagcagcatctaacatatcataaaagcgttgtgcatctacgttggtttctacaataatattttcactaaatgcagcagtactttcgtgaaatgcatctgtaaccatatcatgaaatctattttcatggttatacccttgatcaaattcttgatgatgaccataatttttataataatcaataggttcaacaacaccataattcatattactacggtccgcactatctctacaaccttccccatgacgcaaccataaaaaagagtttggcataaatcctctattatatagatgcttcttcacttattaaattccaaatatttatcgttgaaacacttacatttgttgcttggtacatgaaacctcgcaatccatcggtaaactccttcgtgacatcaccggtaactgggtctctatgattatacatccattgtcgcaatgaatatatatcatgttctccaccacttcaaaacatttttttttccatatcttatttttttttttgtgtttgtttgtgtttttttttttgtttttttgagttgtgattttctatcaactaacatttgatatttatagagaaaaaacaaaaaacattgcgaaggaattc

SEQ ID NO: 204 - DNA, 117945 bp, Arabidopsis thaliana
gaattcattgataagggcaactctagggttcatcagatggctaataggtgaaaggtagatacccttgacgatagattcaaaaactaggtcaatccactgtcgtgacagagactcccataactctaccacttcctaatctcaaaagtcgttgataaaacatagcggagcaaggtttaagaaacaatctaccaaagccaataagcagacaagataatgtcttggtcgagtctacaaaactctggaattcgtagatcatacatccatttgaacctcttttggacgctggacatatatgatcgaatctccacattagctagcgaaaaccgcataggggccaagcgaatccagaagggttttaacctaatcttaaccacctggctaacctagagattaccctaatctaatccatcattaagaaccctaatcactactcaagcaacattctcaaaaacacgaacccataaattactgaaatcatatcaaaatgtagatctaaacaagctaaacaactttacttaaacaactaaatgcaaaaatgaaatagattaagagtaattaagttttgaagattcataaacacaaagaaaaactaaaggataaaagctggatcctaaggacaaaccccaaagtgatctatttatactaaaatgttgaaaaccctagattcactagaggactagagacttgaggcggtttgggcaaatgctcgatcttggggatcgagtaatgagggtgctgcaaagtcggcgcctttgtgtctatgctctgagtgatcaatttgatcgagtagatgcttcttcctctcctatccgtatgctcaaatgtctggttgagtggggaatgaggaggatccgaagacgctttgatagatcaacaattcttgtagagttggtcacccttggtcgagtaaatgggtcgagtagaggatcgagtaggaggggcgaatagatcaatctgctgcttcatctgaagctgccttgatcgagtaagagggtcgagtacactgcagcctcctctatagctgccaggatcgagtaaagaggtcgagtgaattgatgtctcttatgtagttgcctggatcgagtagagacctttttagctccttctgcacctgaaaacacaccaaaacatgcaatgcgtatgcaagatgatcatagatgcctaagtatgtaaaataagctaaaatggtgcaaaatgatatgatacaaaaaatgcacagctaaatgatgataaaaatatgcctaaaatgagtaaaatacagtgttattagggagacgagtacttttcttttttacattggtcgaagtatcaggtatgaacaaggagtcaagtcctacgaacactaactgttttgaagaggtaaaaggaagagcagtgagattggctctagccttttggattatgttggaaaactggatgtccttaattttatcagtttgccttctggatttttcattagtcggactaaatcgaatttgtagtacttaatcaatccagacaataaactcgaaagaaagatcataatttgagacaaaagttttgactcaataaaacaactctctaataaaaacaacacaaccaactcttaagaaaagaaaaaatgaagttagtaactgactcaccagacttagataacactgtcccctgagctatcaagctagagaaatcaaaagaaaaatagtcaaaagtgaaaagttagagaaacgtaatttgccaccttgtttgtgaagcggtgtcgatcgacactctagtcgtttctattgtgctttgctaattcagctcggcattgcagagcttaggttagtattttcacatggatcctctagctgaactgttaaatcactaaaacacacatcaataggtccaaaaaagcataagatgataagtgcaacaagtttcgaatcaaacaaccaatcgtctcaaaggaaagaaaaactaagtcagagtacaaagtagagatagggaggatggctaatcctcatgcttagaaccaaaagtaggtgctggagagtgacgacagcgacgagtaggatcaacacaaccgcatcaagaaactgtagctattgtgttccaaatgctcttgaagatgtcaactacgtactgttgaaagttcgctggctccatcgggataagagcaggagtaagcagctgataaggtaaggctgaagaagaggacccaaattgaagacccctagaaggatcaacaaacgcatcctctatcggtgtaggcgcggatcatgtggttgtacctctctatttcctagtgcgtggtgcagcttgcagtagtgaaggttcaggatgaaagccaagctcctctggctctcatgtgatatttgtaagtgcacgacagggtaactgaatcatatggctccctgtgcaatctctgaaacaccaaaccaaactgcccttaagccagtgagtactcttcaaataagcctcatccatggtggctctcttggtcacaatcttctccccctcaacactaatgtgaaaatgctcaaagataggagtgaggagactaccaatctgctcagtcttcttccatgtgcatgtaaagggtttggtcttaagagagaccaagtgatgcgcgaaaacagccccaaagttgacattgcggtccacttcctccatcctcaaagtgtcaggaaagaagtcacgaacaacatgataaagtagcaagaacttagaaagcctcatcttccaatgctccatcttacacaaaaatgtgttgctaatcagtctagccaaatacctcagaacatgctaacaaatccttgaatgtacaacatccttggaatcataaattccattgccaaattcgctccaaaatatttgagcatctgcaaactgtccaggaagcgaaacatgagaagtatcattctcaaaaccatagatgtcacacaaatccctgagcggtaaaatttatctgataccacgaatgaagaaaataagggctccttcctaagcatcgcgcaccctatcatttacataggaaaccctaacagaagccataaactgccacactagctcaggatacaagtcatactacctagtacaaattgttcccaaacctatatactctagcaatcctaaaacagatttctctatcttcaagcgacgcatcaaatcaaaatccgcaaaccgtataggtaggttatccacattcttccaagcattgtaaaacaatgtatcataatcatcccaatctggagaaaaatgacgattgacaaagtcacctttagtgaattcccggttgatatcctcctcccaaactcgttgagaagcaatccactcattatccaattttggccaaaggtcaaaagatgggaccgtgggcagctgcagagggggaatccgacggtgggggagaagcgccggcggtggtggtgcgcggccgtggctgagaggaagtcaatgatagtcaatgatcatccaatctctgaccagcctcattgtaggctttcccattttcatctcttaaaactccttcctcatcaagtctgatgattctgtcagccattgctaatctctgagtttttcggtttgtgcgctcaagttttcctaagtcaagaacagacaagttaatcagctccttctgttgtgtgcttcttttttgcataggcatacacctgaaacacagaaaagaagaaaccaagaaattcgtgagtaacaaaagaaaagtaaaaactagacgaaatctctaaactaaactcaatggtgattcccaaaaaccttggcaacggcgctaaatttgatatggttcaaattgccttaaagctattctctcaaataagagatcggttgcagtatttaagggttgaatttcctctaagttcttttgttcacacaatgaattaaatgtcaagattaagctagaagagtgtgagtaaaaataagagaaaacaaagtaatcaaatcgcagattgaaggttgtgaaacaataaaataaagagttaggagtagggtattctgaggaaattattagttagtagatctaatggaaactaggttgttatcgaaccattcttaaactcaaattctaattatggaataaccggtggcgttccgcaaaactccctatgcctatagctaagaataaccggagaagccgagagatcttatacctagacatgcattctaaacgagttcaattgttcaccttagtcgataggccgattcttattacacacctataaataaggctcatcaaataatagatccaactacagatacctatgacggatatatctattgtctggattcaagttttagttaattactctagatctagcattaaaaacaattaaagatgaagaaattctacagataacctagcaaagggggcgatctaataaaccatatgaatccctaatgagaaagcctaaccctaacaatcaaactactcatacttggtgattgaaacaagcaacatagttgagtaagaaagcataaacacaacaaataagaatagagtatgaaaggatctcttcactgtattgaaaactgaatgaatcactgaaaacaggggatgaatagcttatgtctctctttgaaaacttgataaaaagcttgataggtctaaacaatgacctctaaaactatatatatgacctaataaacattcaaggactaataatgcaaataggagtgtgttgttctttacaataagaaatagatcataactcgtgctatacatcacgggcattaatattttgtttgaataatattgaatagttagtttgaattacataagttagagtataatgtaaaagttatgccataatatgtttcaaatttattactattcgaatataatgctgcttagattgtctatgaataaaattatcatatttatattaaatatatcataaatgttttggcgcaatttagaattattctgagtattgtgtcttggttttacatgtaggcctaattgggtcaaattagtgatatataggccctataaaacttgacatgtgttatttaattattttgaaatttaacaaagaaaaaagagaaaactttaaaattgacagaacatttaacgaagaagacagacttccctacgattgcggcttcttacaatcatgtaagattgggcaaaatctgcaaagaagaaccaattatatgttgatgggagctaagatctattcatacgataaatcatcaatatctttattgattaggtaggagttgtttgtacgaaattgtaaatcgaagaacatcctccatttcttcatatcgtgcgaagcaatggaattgaaatttctaatataaggtaataagaaactgattttttcgtttatctggttttgaattgatttattttgttgatatattgattggtgattgaatcgtcatttttagggaataagaggaatacgattatgaatctgaatgagcaattatccaattgatctattgttatgagttttgggacggaaacaaagatattagcgttttgatttgtaatctgctatgttgtctgatctatttttgatataaatttcgaaagggaggctagcttgatgatagacggaccaaaaaggaatatgtaaatccaagaagggattgttgccacaatgaagaaaacatctgaatttggtcgcccttatacatgaaagctaagtagtatattatctattgcagtttgagaatccattagctctatttaaatatgaaaaagctacttatattttgtaaaaaataaatgtttaacttgttaaattttcaagtaagttaatatatgaacaactctaatatgattacaaatttatatgcaggtttgcaactactatagcttttgaatttctgtaaatctatctaagaaggacaaacaaaccttgaagtataaggcgacatcaacatctttattaatatgtgtataaaggttagcacttgattcctacaatcttatattctaatgacatgttgactacatcatttgtatatagttttgcaatacttcaagttagttatgttaagaacaactctaatctgattacaaattcatatgcaggttagcgtctgcctatagcttttgaattagtctatatcaatctaagaaggacaaactacccatgaagtatcaagcgacatcaacatctgtattaataagtatgtaaaggttagcacctgatctcctaaaatcttatattcttaggacttgttgactgcatcatttgtttatttaggtaaaatattcaatctcatattcgagtattagacattttcagagtaataaagaaatgaaaaaaccataagagtttctttcgaactataacatagtaaagaaaatgcagttgagttttttacaacctcttattccatttaacacgtcctgacaatccttgagcatctttattccttgatttgatgcaactaaaccagtagaacataaaatttgtaaaataacttaacttcatcaatgccaaatattacttttagtgtaatcctattaaaaactgaaaacgttggtgatttcttaacttattaatccggttgaataggaatcccatcagattctttccatgattctcttagtgtaggttttgaaacacttctttagaaacaacatttattgtttttctgcggtttacctttcttgtctgttataataatcttcaaaagtgatataagtggaagattaataatcgtatacatattatagtcattaaaatggtggctataaaaaacttcatactttttttttgtatgtcactctagagattgtcacgtatagttgctcatgtgaaaacacaggcctaggtaaataaagtccaacagagtctagtatccgaccttgactcttgtttagtcatggcaaaagctacagatagaggaaattgcctacgcctcattttgaaaggtaatctcgtatctgatggtgtgatgagcataggaatcaaaacaatcttaccaactctattacctgtaataaatctagcttgaattacaatatctgccatttatgtgacatgtaatttcgtcccaacgcataaacctttattaggatccatgtttcttagcaacatgactagacaaccaactttcaaacgcaagcaatggtttggaaaccaagaaactttaacaatgtttaaaatcagctgaacaagcagcattattcgtagatcttgtgtcagcaatgtctatactatcttagcttaggtagattctttcttcacctacaaacaaaatgcaaataaatataattttagcataaagctgttttgagattaattaatttcggcgaaacaacaatagtgtattcttaaagttcactaaccttctaacatactcatcatatgctcgtttatggagttaacatcctcattagtaggcaaagatttgctcttccttaaaagaattttgggtctttctcctccataaaagtatttccataattcttttagagagagttgaataaactacatatacgtagaaatataagttgaaatgagaaagtagagatctttcacatttatgttgattacttttaaggtaatattttgaaaacattaaacgtacagtagactaaagatatattgaataacaaatatttttttttaagttttttaaatgactcaaaattggacggtagagatgaatctcacgactatcattcttcttgtaaacaacaacctatcatcttatttcctttaaatagagggttatatttacgctcttcttcacgctcaagtattacattactcattatagttttgctaattcaaccacttcccattatttttctctaaattcgctccttctctcctgcttcctgttttctcatctccttcaatccttgttttttttatagaattatagatctcatttctcagtttgttaatgaaagtacatgttcatttgatttgctgtttcactcattatcaattttgaaataacaaatcaaatcagcacgtaccttaacaaatcgagaaataagatcttgaattttacaaagaacaaggactggagaaagagagaacacaagaaacatgagacagaaaaagaattaagaagaaaattacaaacggaaaacggttgaagtagcaaactataatggtttatgtgatatttgagagtgaagaagggagtaaagataaatcctctatttttaggcaattaggatatatgatgtgttgttgtttacaagaagaatgatagattcatctataccatccaattttgagtcatttaaaaatcttagatttttttccttaccattcaatgtaacattgactaccaattaatgttgtcatatttttgcctgaaaaaataattaacataaatgtaaaatatctttactttcctattttaattattattgtttattcacactatctttaaaaggttatatacacccaaaattacccatgaatattgtattacatcctatgacttattttttaaaaaagtattaagtaataagtttgtcattttaaaaaacatatacatataggggtgtcaaaatgggtaacctaactcaactaaactcattatccaatgagtttagagttaaatgagttgggtcaaccaatgaactcatttattttgattggttgaatggttaaaagagtttaccatttaagtaatgatttaattaataattactataaaacaatagttaataatttttattatcatcaattcatcatcgattcggggggatgtagtgaattaaaattgaagacgaatgagacggaggaggtgagtgggctatggtcgctgctagatgaattgtggattgccaggcttacgtgtcgatattggacatggtggccttagccatggtctgtaggagacaccagtttgtggtagactcccatatggtcaggacattgaaattttggatgggtaacgtcgagccatgtttgtacgtatatatgcagatgcatcaaaatccaagcccatggtggttcgtccaccacccccatgcaacgtctgctcaaaccggtccaatcgagcttgtgtcctttccttgaatcaggattatgtttcgtgaggtaggattgcggaatctacattatttgtggactcatgaacggcaaacccacatcggaagtcctttattcgactgtatacaacacacaatgcaccgccttacccccatgaagatggcttgaagccgagcatcgacaagcttggtagacggcaagaagatatacgtgtttggaaggtactgggaatgttgttgctgattcctcaaactgtgtagaggtttttgatatgaaacccgaacttgggacttgttgtctgtgttaacgcccaagatgccccacaaaatccaacatgatgtggtggtacataacgacacgtatgttcacgcggtggatgaggatggtcaaatctttttcttctcaacaagttgttgtttctttgtgacaaccggatcaaaagagttttatttgaggcattattctgccaagatatcggcgggaaaatactgtggcgttttccagaggagactgtttggaaggaattcaagggtttgaaagagccgtagaagcaacactctgaatgggattattggtggtggttcttttgatatcattaaactttgcgccttctttgttgagaggctggccatcttctggaagcccaccagcctgatgcattttggagatttggtatgccaagctttccctgaccagacgccatggactcgagggatggggtgaggtttcagtgaacattgagcggttaggttgtttttattgttatatagtggtggcggtcttaacttgttatatgctgattttatctatgcctgaatcattcattgtttttattttttatatcttgtcttttctactagtgtgaaatttttacccttttctagtactctggaatctttaaaatatttttctcattgaacacataatagatttcaacatgcaacttatccaagtactctttatttcataatcttgaatacatcaacaagcaaagtactcaatgtgagatacagaaactttgttcacatccgtcagactgtcactcccaaacatagtctcatgtcaactagtttccactcaccatttgcataaccttcttatcaagcatttaattctcatctaagttattgcaagcatttaattccatcactatttgagtgcacaacaactactaaagagaaactaaaacaagcatttgaaagcaaattttgttaaaacaagtatgaacaaagaaagcctcgatagaatacaccaaaatctattgctagtgctaaaaggaatcaaaacatttctaagccaaaagaaaacaagaaactgctttctactctaataattcttcaaatgatcattcgaactaacttcttttgtgacacattgacccaacaagtgagatcggaatatgccaaaatattttgaataaactgttctaatatggaattgtttcttaatagattgtacgtttagtagttgataaaaaaaccagatttattaatatatatttgcctggctcatacaatgctaattgatggagagaagaagtctcagacaaaatcgaagtatatgagaagctgcatagattatactccctctatttatttttgtttgattttttaaaaaatatatttttttcaaaaagattgattatttaggttttctatacaacatttattagttattattgatgaattataaaccttaataaaaatgattgaatatcattggtttaaagttataggaaattgtaaaacacaaaaaaaataatacatttgaaatcaactttaatatgttttcttaatatgtgtatttttcctaaaaaatcaaacaaaaaggaacagatggagtaatttctaacccttttgatagaagaggagaacaatgtgtctgccactaccatgtcttagctcggacactaataaccaagtttgaccaccaaacgcatattcacacagagtaaggttagttcaagaacacttcagggaagctgaattctgggaactcatctgaagtaaaatgtagtataatggtctaatgaatgacaatacggtgttgctaacatgatagataggttaaactaaaacaggcattggcttttagtgcattggcttttagttcctccaacttactcttttgatccagccttgaatgtgtagtttcctaattcgtctcttctcaagcttgtatttgaaaatccaagatttgaatcctttcatcttcttcttcttcgtttccagtctacctttaagtggagacatttgatcgaacaccttttgtgcagaacaatatttggttatactagtcacttgttgaattctctcaacttgacaaatcatccatcataatgttcttttgaattttcaatgacatcaccacatgtgctaagttgtccaacactaaatttacagcccaaagttccatgctctacacaagtttaagaacaccaatccaaagcccacataagagaatacactaaaattgtcatgttggtttacgaatggttcaatctcgtggtttaggattgaaattgggttatgtggcgagaagatgggttgtgctttcatttcaaagcccaagcccagttacagttggctcaaaatagctcgatgcagaggataaaacagaggagattggcggacttgaagccgtgtggaacgaaagaatacttgttacagattcagtatagtgagaagaagagtacaaaaagatttcaaatggtttacgactggttcagtctcatggttagtcttcggtttattactttatttacagatttggtatagtgagctttaaccgggaaacattaggaacatgttattgctctcgtttagtgaaatcttttaccaacaagaaaaagaaaatcagaaaaagttggaaaaaaggaaatcagtaaaagttggaaaaatgtattgtgttatccgcataaaaacaaattataatcatacttttcgcttataaaaaaacataaccctacacttgagacttctccgcaatttctatttctcaaaaatctcttacgactactgcgatcatctctctttctctaattccaatttctaacgattgatgcgatcatctctctttctctgaatttgttgtcttgattcactcaaataatggaaaccaaagaatcagtcaacgccgatcttgatgtaacgactatgtctcttcctccatcttcaggcttcttaaacgagttgttaatcatttgacctagagaagtcgaggaaattatcacagacgaaaacggtcataatgtaacgagtcttggatcttacccggatactcctccttccaacccatttatttttctcaaattccaacacttcaaagcaaactaaatctatgaccttttccatcctcatctccatgattatgtcttgtccaaacaaatatctgaccggattgttgttaaagcacaacagctaagaagtcatcaaagttctgatcacttgcccttattcctgggagtctctgtcatattacacgcaaggtctacaaagtcgtgtcttgcaactgtgctccatcgacaacagatttggtggacaaagagacagaagaagatgaaatcgagacttgtgcgatttgtttggaggacatgttggagtcgggattcgatgctaaacaaatctaccgtatgtataattgttggcatatgtttcatgaaggatgtgtaatggagcggttgaatcgacaaaagaactcatgccctctctctcgccaacctgtttaccaataacaagagtctaattagggtttcaaaacttgttttgttttgcagttgtatttgattgtaattagggtttcgatttgtgtttttttttgtgtagttgtagacttgtaatctgaaaaatgaaattttttgttaataacgaaacataaaaaacaaataaattagactaagcaaaatcaaaataatattaaataaattatataaaattaggaagaagaaaatggatgtcttgttgaaagaaatagatgatcttatataataagagaggatgacaattaggttaaaattttgaaatcttcttttaaactttgagagcaatcctaaaacaattaaatgaaattttttaaaaattttaaatataaatttataaaatatgcttgttttaagcgattataatatcacatttaggaagtataataacagatttgatatcatatttgaatacttaatcaatcatcaatcatattaaatacacgtaattataaatttgtggaatatgcttgttttaatcgattataatatcaaatttaggaagtataatcagagttttgctatcatatttgaatactcaatgaatcatatttaatacacgtaaatagatcaaattaaataagatccataaataattttgtatatttatattataatttattttcaaatcagaaattattttcgtaaatttaatatttatataacagatttgtcagatttgattaggaaatgtttgaaaaaaaaatatgattgcattagtaatcttttcaaatataataaatattgtaaacctctatgatataagagtataatttgttttccaaattgaaactcacataattctgtgttatattgaataaggaaataaataaagattttctcccaaaaatcttgctgtaggattttatttattttgaaaacaatcaacaactactattaattgtaatggatggctaagattagaagttatgacccgttatttttaaaagtcgggtcaaatggatccgagtctttttcaacggattttttttatgacataaaatttttaacccaatggcaaacttgttatttctttcaactttttgcccacttcacttaacgtacttctcaaatagtagtattgatttattatgacaaattttaataaatatttttctttagaaaaaatagaagtaaaagtaaatttacatgcactgttgttttggagggaggagatgaaacttcgggatgagttgaacctgtttttgtggaagaatttgtgttcgtcgacaaaaagagacatatctataatcattaaaatcaaaataattttccttcaacaaatttgataagcttttaactatttatttttattttattaattaaaagatttcaagtatatatattcaagtacaaaatatatttaatatatataaacattattttataaaataactaagaaatgaaatgaaacattacaaaattgaaattagttacataattaatggacatgtaattagttacataattaacggacatgtataatttagacaaacaaagttaaatggattacaaagtagcgaataatattaatttaactaatacatgcaaactccatgatttaaatttgtcttaacaattgctatgttaattaacgatcattctttctttacaaattaatgaaacacataacctattactataataaaatttgaatttaaaatcacaaatttatcgatattgaatcaaataatctcttttcaatgattagaaactaaaaataaagaaatatatatatatatatatatatatatatatatatagatgtgatgaaatataagattctacaaagatatagtataattattaaataatagttataagtatatattaaataaactagtaatacaagaatgttataattaattagtactatataaacaagagagagaaccattgtggtgacgtttatttagcataaatagaaggaaattaatgagatacctagaagtaattaccttaaatgtacgtagaagtagttagaaaggattgaagatagtttaggaaaaaaaaagtttttgttttgcgatacgtaagagagctaggtatatctatactatataaaagttgtagttatttgtttctaaaatcgtctatataggatttagaatgaccaatcgagaactgtcacttcaataattaacatatttaacatctaattaattaacatttttgaaaataatgattactttctattttaaaataagaaaaaaaggaaaataaccattactaaatttaatttttttctttcttttacagatattaaatttaaacttataaaaaaaggaagctatataattataattatgtaatattacccttatatgattttacacaactaatccagagccgccacatcataaattaacatatttaaatttaattaattaatatattaaaatatatttaaccaagattgtttttttaaataaaatttgatgcaatttaatctaattaattaaaattaccaaaatttgaaattactttatacattaaaaaatctatactatagaaaagtcgaggttatttacttcttagagaattttaaacaacgaattgcggttgaacatgtcattaattagcatttttagccattatgttacaagtttcaatttttaaattttaacaaaattctatattaagatatttatgaaaaggaaaaaaatatatgaaaaacaaatgtataattattattaaaataaagaaatattaatctcattgttagtctcacaatgttagtttccaaataaattaaggaaaaattctaattctaaaatattatagataattagaattggaaaaaaaaatcaaatattaacaaaaataaagtaatgaacaaagttttccgaaagtttgaaaatttaaagtttaaacaaaaaggaaaagcttaatgaagtaaaagaaaatttgttcttaacaaccaaagaaactagtaaagtcctaaataataaagcaatggtgtctatataaataaatatctattgatcattgatagtcgatcaaagatttattctggaattcaaacaaataatttattgacttaactaaactacttctcgacgagctttaaaaaagcttttactaacaaggaaagtaagatatattcaaagaaaaaaatatagagcatgtgaaaagtttagaagatagtacacgtacttcttagacaaaatcataagatgatggaaagagacagcataggaaagaagtatgtgaaagattttttcataagaaagtaaggtgaagagtgattaaattctgtttggtatgtgaagcgttaaagcaacaaggggcgtggtttgatggtggtgttcttaattgtatcaatatgaataagttcccaaagatataagatgatgtctttagtctaggaagagtgaaggtgaagagaatttaaaatgcaacatgaaaggagagaagagatagagttaattaagaactaatttagaagttaaaaccttttattagaataatagaaacaatctacatatacatttttgcatccattttgtgaaataaatcttggagttgggacttatttacaatggctgccactggcatttattatttagttttacaaaattttaaaagatattaaccaaacgatattttgcctaatttatttctaaaaatctttacacaatctttccatatatcttcaaaaataaaattccgtgaattttactccacaaaatatgcataaatccgatttatagcaaatatttatattaacattttgcatagtaacaaaaatactaatttataataatgaaaataatcacatacaaaatcatatacacctatagaaaaagaactatatctatgtgatttaagccgttgctttatttaaataaaacaaaaacacaaaagcttgaaatcatatactttgtatgataaatttaaaatctatattagtagtagaaattaaaatcattcaagaaaccggatgagatcctaaaattattatatttataacaataattatttattttcttggattttataatactaatatttagctaacgagataatatagacgggtttatatgggatgacgggttttgatcgatattaataaagaaaggtatatcacggatgaaatcgtaaaatttacaattaaaatacaattttacaacctcaaacacaaaaaaaccatacaatataaacaaaacatataacttgaaattaaaaaaatttagatataaaaaatcgacctacggtatactgcggataaaatattcaaaattttaaaatccacaatacatcgttacttaaaaaaatatatgttttcgtatctatacttcaaaaattgaaacctaaacaatagtaatcatgtactaaataatacagagattgatatctacatttaaaaatacaaattaatatgatatatcttcaattactctttaaaaaaataacattatatttttgtaaaaaatatagccatgcggtacaccgcgggttaaattctagtatagaacaaaaaaaaattcatagaaattcaaacgaagagtttattgacgtgacttagctacctctcgacgaggttgaaaaacatttactaataaggaaatgaatggacttttgaagaagaaatatgaagcatgtgaaaattttagaaggtagggcacatattgcatagacaaaatcataagagtatggaaagagacaccctatgaaagaacaaaacaaataaaacgagtgtttgcaaaaagatagaaagagtgatagctctctggaaaaagttgtgaagacaaaattttttatacaattgaaaagaatgtgagaaaaatatgagttgttaaaaagaaagtgtaacacccaaaattaaaagaaaatataggatcagattttgggataaattgatcattttgaaactgtctgatttcaggaagatttcttagaaactcgaaagtctggacaaaatctgtaaacaaagaaaaatcagaggactaaagtgcaaaaacgtgaaaaaggagagaaattcgagtttatcttttccgaaactgaagggaagtttttggcaattcaaaaattgaattatcttttaagaccagtatcaacatgcgactctgatttagctagctctattgagcaatctgtggcggccggcatcgccaacagatgtattctgtattctgttagtctgttagtggtattgaggtcggttaatgccgtggattgtacttccttatcaccttgataggggccagcattcctatagagtatattatgtaaatattctgttagtatatggtttgggtcaaccaatgctggggttgtaccattccgacatgcattgctggaaatctggtcgttctgttctgatgttaatattctgttctgctgatattattctgttatgctgatttgataatataatttggatagtataagctctgatgtgtttactttatttcaaattaattaaattgaaatttatgtctattagtacatacacgtgaatattattctgtacgggatcagaccgtgttggtacttgttcgtcgggtttgtagtctcactgggcaattttttgctcatataagttgtgattccgtgcagaggacattgaggaggtggagcgtgcaactgaggtttaaagtttttagttcaatcgtaaagcgagacttgatagaattttcttgatttaaataattttgttttcgacatttggagtttttatgaatttttaaacattaaacattattgaattttagtatttttattacattagttttagtaatactttcaaaattctaccgaattttggggtgttacagaaagtatagataagcttatgaatttatttgtgtatagtatcttattttaagaaaagatatactaactaatccagtgaatataaacgaaaatcaatagtgaatttgttgataccaaaatgagagagtcgtcaaaattcttcctcgtacaataatttatttcatgagatccaatcaaaatatcttacgtaaaaagacgtgatcatccaaactatcaaaacgtttacaacatttatcataatataagcaaaaaaaaatgttcttttgatgttgtaaaacctaaaagttgtattagagttatttgtagttatttattaaaattgaattatctgctacggtaattttataactcaagaaatttaaattattaacaataagtagacatattaaaacttctatctcaaaatattcagtaaatatttttaatcacactaaagtttattaaaagttctaaaaatagacccacgcgtagcgtgagttcatgacctattataggaaaaacttatacattaaaaacaaataaaaaaaaaagaaaacatgtatttattactcattagtgtttttatactataccgcaggtaaaagcatgagtatcatttcgaaacgcggttcactatatttatctatctaaaaatttgcttttttctttttcttttttttcaaaaaacgcaaagtactgttatttatcttgattagtgataaagtgccgtttttcaataaaaaaatttaaattccaccaattaaatgctaccaatcaatacattaatcattccttgttccaaggtatttatgaattatttgagactactaatttaaagtttcactctcgtaattgtaacaaattctagggaaaaaaaccccattcaagattcactagaaaatttcatcaatcttttcaaacacgacaatgtaattaggcttaattaccaatcaactcatcaaatatgaagggaatttaagactaattactaatcaatcatcaatttttagttttctgatataggaaaggagggctaagaagagtagacacgtggacagtggtgattataagaatgaatcaacggctgagatgaagttatcaaagatggttgggtttaaaggaagctgaagatcagaattggatttttttatttttttttattttagtcgtgaataattgttgaagttagttgttcttccctctttgaggtttctaggttttgagtaatatgattcatcctctgtgaagaacattgctcttgcaaggtggatctagtgattcccctgttttatgaacattggatcacattgttatctttttcatattaatcggaagtgtttttgggttgtttgatcgattgttgtggttgattaacagatcgtgatttgtctttatcaaaggtatcagagcttcgtttttcctcggaatcaatggcaaaatcaagatcgatcgacatgaagatagctgatctgcttgcgacttttcgcttgcacgcaaagtcaaaggaaattcatgtagatcaaattgcagagctaaagcagttaagagagacttacaatattgttgagtatcacaaaaagtttgagctgcgtagcacaagagtgaatctgacagaatattacttggttagaatctatttggatggtctacaaatagatactcaagtgaatgttaaaatgtttcagcctcaaacgattcaacaatgtttctcaattggaagattatatgagtatgcacatcatagaagcagcattgataacgttgggatccttacactgaagagagatagtgaactaaaagctgaggaggataacgaagaagaaggaattgaggttaagatggaatcggttgtctgagaagacaatttagtacatggagcaatcatggaagaggaatcgagttcacagtttcaggtaccaatttcagattctgagactttgaggaatattgaacttggggaagaaaattcaaagttggaaactctagaggatgcggtgatgaatgagaaggagaatctagagcaagatggggttcaaaagtacgttaatatgaattttgaggttgatggtgatgttgagaggagtaaggaagtgttaagtagcacaaaacattgttgtacacgccaactgtttggtaaaaaatatcaggcgaaagatagatcgaaattgaagaaaaggagaaaaggcttgaagtcttggatgtttaaatataaacaagagaacgagagactatggagactactcaatcatgcgttatccttcccaaatttgtgtggtcgtaggtttgatacgcttggaacaacaaaaaaggtaaagttgcttggtggaagtgataatgtctatgtcaagaattctgtgagcttaatcgttgttggagaagtttatgaagcttatgagtttggtaggacgtttcgaaataaagaaaaaacatgaacgaagaagaaaacaaaaagggtcaaatcttggatgttcaaattcagaaataagaagagtgatccaagtcatggagaacaatctgtgtatgataagattataatggtaaaggaacagatgttgcaaaccagtttggttattcacaaactcataagaaacaaaaagaccaagttttccaagcggtggtggtttaagtacaaatctgtgaaagaaggtatgaagagactacacattgagttgagttctaagtacaagtttgaagttggagagtggtttaaaaatgggaacatgaatatgagattgtttgtacagatcaaacatgcatcacaagctcttttaagaagatacgacttgcaaaggaagatgcagaaactgaagtgtcccaaatcctggaaatttaaatttaaaagcagttcggtggaatgcaaattgaagtgtggtaaatcttggaactttcatgaccaaatcagactgatacagggtgaattagtggagacggggagactgtctaagctgagattgaagaaacatcacttgttacaatggttatggaagagctggtgtcctatagtgctttatgaatattttgtttgggaacatagtgacaaatggaagcagcccttaagcagtaggttattggtttattaccatgtgtggtatcgttggaaggctcggtgttcgataaatattgaccatgagttagaagtggctgcttactatgaacaactacatgttttcgatggtgtagttgtgaatgtgttgcttcagcattcaacggatctctttattagattgcagagtacgaagaaacacaggaaatgtcctaagtcttggatgttcaatttcagaaaactaagaaaaagaaagaagaagactacccaaccgcttgttctgatcgttacttaattggaaaacaaaaagaaatggagaaagatgagggttaagaaacgtgacaatctctcttggaaagaagctgcaaggactatgatacacaaccacaaagcttatgaagaggtccaaagtttgttgtggttctggttaagtgatcaaatatggatgatgctgagactgcttgggcggtttgtatgctttgttgcagcaatagctttatatcaaccatgtgggcatggttttttgggaaggaaggatttgatataggaaaagggctaagaagagtagacacgtgaacagtgttgattaaaagaatgaatcaacgactgagataaagttaccaaagatggttgggtttaaaggaagctgaagatcagagttgagtttaatcgtgaataattgttgaagttagttgttcttccctctttgaggtttctgggttttgggtaatatgattcatcctctgtgaagaacattgttcttgcaaggtggatctagtgattcccttgttttatgaacattggatcacattgttatctttttcatattaatcggaagtgtttttgggttgtttgatcgattgttgtggttgattaacagatcgtgatttgtttttatcattttcacaatctaccctagatccaccaaagaacataaaactcggtaaacaaacctgttgccacaaccacaatccacaatccagaatccacaatcagagaatttaagtccagcaagccagaaatgggccaactatttaacggaccttatatatatgggcctaggttagtccaatcacaagaacaaaagcatgaggatgatacagagatcactttgtatcgaagaaatgttgagaagaaaaccaacaaaaatccaactcaaaatcgaagaccgtgaagagcttgaacaatcccgcaaatctcaaccatccaccaccacaaccaccgcaccatcttcctcctccgccgcctcctctctccaccacctcatagacccaaaacacaaaaacccttcctccaaatccgaccgaatcggtctctcttaaaacactccatggaagtcgaagtcaagctccgtctcctaaccgccgctgctcatctccgtctcaccactctcctcactccataccacctcaaaacccttcaccaacgcaacaccttcttcgacacacccaaaaacgacctctctctccgccgcgccgtcctccgtctccgcttccttcaaaacgccgccgtttccgcggcttctccttctccgccgcgttgtatcgtctctcttaaagcgaagccaactctagctaatgggattagtcgtgtggaggaagatgaagaggagattgagtattggattggtaaagaatgtgttgagtcaccggctaagctctcagatattggatctagggttttgaaaagggttaaagaggaatatgggtttaatgactttttagggtttgtttgtttaggtggctttgagaatgttaggaatgtttatgagtggagaggtgttaaacttgaggttgatgagactaagtatgattttgggaattgttatgagattgaatgtgagacagaggaaccagagcgtgttaagacaatgattgaggagtttcttacagaggagaagattgagttttcgaattccgacatgacaaagtttgctgttttccggtcaggaaaacttccttgacaatgtaagtctttcttaatctctgtggttagcttgtttggttgttgtaaattcatcagtaaagttataagtactttttctttctgaagtcaagataagtttttgaagacatggtttctgttagattatagtatagaatcttcctttgtatagatgggtctaaaacatttcaatatgatgtcttattgttagtttgcttgttggtctgaatgacaaaagttttcaccttgatgtagagactttgggtgaatatactattctgattccttgatatatgtcatagacacattactcttctatcaatatgtattgctaaatatcttcatatggattctttgaagagactcatacaattttggttttatcttgtttgggtccataaatctaatcttgtttggttttatctcttctctcaatatgtattgctaaataaatatcttcatatcttcatatggatgctttaaagagactcatacaatttactgtgatgtgtattgaataggtgggagaaacggtggctctaattagaagagtggtttcttggttcagggattttggtcatcagcattggtcaagtgatattgattgcaagaaagtttactattgaactagatgatctcagtttgtactatttttctttaggccttgtccatctttgactctttaagtactggttcatgagccttggtattattttggaattgttttttttgtaaattttatcttttaccaaaaaattacatccatctgactacaaacatgaacacgagagagaacctaatgtggagacaaatgaagggtttttataggacccgtggttggaagggagaggagtcagtttgtgatagtctgagctgcttcaagtctaagagaagttgtagaggcatgattgatggtgaagatctgtgtgttccgttaccgtattagtagaaccctcacctttgtattctggcattggacaatgagaccaacatgcaatggtttgactaaccattgccattcattggaggagaatgaccaaagctagtggaaaaagggagccaaatcttgtgggagaatttgcattcgaagaatagatgtgatgtgaacagactcaactcgcaatagtctgtttcatgaaggattcagagcaaaatcgtgaatacgaagcaatgcatatgttcccgaccttgacttttctaatggtttcttttgtttatttcatttgtcatgttacaacatatatcccgtggaagaccataagggattacaaaagtattatggttctttgtttgttttgtcatctacttttcaaccttctatcgaaccatgcaaattggcagtttatgaggatttatatctaaacattttaactcacttaaatatcgtaaaattcgagcaagttttctgtttactaaacttctattaaaataaaaaaaaattgattggttactcaattcgaatgatatttttttcataaacaacataatagtctcttaaacaaaataatcgaaattaaccagtctacatagactttttctttgtttggttgatagcaaaaactccattatattaagttatcagaaaaaaactttcttctaaagagaaccaatcggaaaaacttgtattttcttttctaggaaactaggtggtgaaaccattaaaccttttagaatctaatatactttcttgagttcttgtataacacttttgcgtactcagttaaataattattggaagggaatgcaatcccctaattgagtattcctcccacttcatgtcaatgcaaataatcttgtgtgatttgtaaccacaattgacggagttgttgtcaagctcttgctataatagcgaataggttttttcttttgggtttatttctcttattgcacgagcttttgtacaaccacaagattgtatctctatacgttaagtactaaacagctgcaacaatgacaagacaaactgcaatggcaaccaagaaactgccaagctcaacaaacattcatgcctctatccgtagacagatgtagaagagaggaagagaagagaccacattctaaacatagaagatagctaaaatccacatcgaaaaatcacacaagacaacaaatagtaacaacagagaagataaaagttcaataagaggacgataagataagttttcctacactacttaaaccaacacagagcatcctcttcaagtctttaagccatttttaaaccacaaacactcatgaactcatcatcatcattttctcttcttcgatggcggctggcgaacatcatcatcatcttcctcatcatcgtcttcttcctcatcttcattgtcctcatcctcgtcatcattatcaccctcctcatcatcgtcatcttcatcatcgcttcctcctccaccattggtcacaggatcatcctctggatcagcttcttcttctccttcatccccttcaccccctgagaaatcttcatcattagcatcatcctcatcatcgtcgtcctcatcagcgtcttcatcatcgtcgtcatcgtcactgtcactagcatctttgttttcctcaatacggcttcctcttttgtaaccctccttgacagacaacctagagcaaagataaattttagattagtccatttagacacaactcttgcgcctcgacaatagaaagcgaaagaaaacgaaaggcgtgcccgtcctcacctctggtcaacagcaaccaaacctatcagtaatgattctgcctgaaatgatcaccaagaatgctagttaaaataggaagacagaaactaaacatctgaatgtgacaaagatatgatgcattgatgcaagattcgtttaaaatagaaagcaaataacaacaaccaccaacacaatgtattaaatctaaacttgcaaagagaaacttttgattgtgtgtagctctataacccaacttcaagaacacattacaaagaaacacacaatcaatgcacaataaataaacagcaattagcaaaaccgacaaaataaaactgaccaattaacaaaaagagaggcactagacattgtttctaagctctattcaacttcattaacaacaaatggcaaaacccacaaaagataagtgaccagtcaacaaaaaagagtgacactggacattgttcctaagctacaattcaacttcattgttcaaagacttatctagagccattaacacataagactatagtcaaacatagctatattcaaacaatcaaactatcaaatacaaatctagaacacaaaaacagaaatctgaatttacaaatctataaactttggactaagacaattccaacagaacataactacacgacagctaagaaaaactacaaatacaatccaaacagagaaacacgaagctaacaatgcaaatctagaccacagaaatcaagaagactgataaaaaactgttctttaccacaaggagaagacaagccagattctttccgacgaggaggagaaaagactcagtgacagagcaagcccatgtctcctgtctctgcgtcttcattgacccaacagcaaccacttccatatctactcaaaattgaacacaaaaacagtcttgtaagagatgagaagacagaaagtgttcaactttcctactggagaccaagagacagggagagagaataagaggagagaacctgagtagcttatgtgtctagatccggtcaaggtaaaccctagattttggtacgactagggttttttggtctatgaggtaagatttgatttatagacagattaattgctatgtcgaccgatgatagcaaatttttgattggtcaattttctttatggtttaagggaataaattaaaatataatttaggttttttttgggagaaattaaaaataaactttaatttaatgtgaaagactcttaagtttatacaagatatttataattttattatagtttcatataagattttaattattgtaaaaatttgtattcatatattaagttcaaaaccaaaattattatgaacaaataccaaaacttaagtttttggttaaatctttattgtatttattaccattaaatttttgtttttctatttcttattaataatttttatttgtgcaaacttttaacgtccatcattactaataatagaccctagagctattataatttaactgttgaaaaatagataaatagatataaaaaaaattaattggtgaaattagatatattatcttatatttttgaagtatttatgatagattttgtctaatatatgatttcaattcaaaaccaattggtaatgattggagagacattaacacttttatataatattctactttttttctatcttttcaacatgagatcgttcttcaatacgtcttattgagatagctttaatgtcaggggagtctatttttgccaaattctaaccccatatctccccactataaacagaaattaatattgatttaattttaagtggggattttaccaatataccccaatcgaaatctaacttttacagagaaaacatggatctattcgaacctacacccgacccatctctcccaaacggatactcaagtttcgataattggatttcaattttcgaggggactcttcgatttctcaaactctctgttctcaacgaagaaccctaatctgctcttcttattcttctcattcttctacgcgtaattgctaagtgttcttggagaatttgatttcgaaagcaaatgaaattttttgagtttcgtttctcttttgtaaccttcattttctcgtttcaaataatgcctctaaagaaaactgggttaaagaggaagagaggagtaacaaacgacgccaattgatggaggaacaaaggtaacgacagagcagccatcctcgacggaggagccatcctcgacggaggaaaataaggtaatttagaggcaatggaagaagagaagtctgacaagaatgaggaggaaaagtctgagaaaaatgaggaagaagagagtgaagaagaagagaaagaagaagggaatgacgatgtaggagagtcctcctccgatgatagtagtagaaccttggacagagagtcctcctccgatgagagtatggaggatgagattgcagtgcaaaatgcggcaaaaaatgctacggtaagtatttgaatggtgtgaaactggtagaacagtataaaactatgatttctgggtaatactgttattgtggatgtcggaatccgcaattaggaatttgtggatgttgcgaggaccttaaacattgttagtcgagctaagactaaatcggacaatatttcagttaatcggaatttttttgtatattaatttttctgtcccctttacaaatttcgatctcgctctctttatacaacaagacctaataaatgaatacaacaatcacgccgcgaataatgcctcatcaatgcttacgtttcgtatcaacacttcgcgcattcacgtcgcctcatttattttgttgattctgcgttacttaacgctcaaaatactttcacacaggccgggcctcgaatgggccctcgaagcccacttcgctattgacagactcaggcccatctcctggtccagaacttcgagcccattgattgatgatgatggatctcgggtcggggcaaactaacgagatccgacatccacaatttgccccccaagtcttcgaaaaagagaaatgaattcgaaaacttaaattgacttcatctcgcaatcccaccaattacgggatcagttcgggattccttttccttaaccgcatatgctcgaggtaaaataggaaacaaaatcccgtgactttccaaatttcatcgggaagagtgtgacgtttcgtgatcctacggtttttccttttcccgctcattcgtccactatttaatcgaatcaacccctcgtcttcttcactttcatttataagttccagcgactcgtctttaagtttttccaagtaaattctctttattccctctctgcttttgcttctattctttagacgttaggaatcgtgccggaatttttagtttagaatcgcttagggtttgaacggactgttcctcggtcaaaaattcttaccgattcatagattttcaacgttgattccgaaggtttcgccgctcgccaccgttactctctctctacgccacggttctcgttaacgccgccgacggtgctgcctcttatatcccagatctcgacggagattgtctttgtgttcttgaaacgttgaagaagatcttcatcgtgttcttgaatttctctgaaccgagtagtctccgaagaaaattagccgcgaggtattctctattgggggtcagttcgggacttataaaacttcgctttcaacctcgagtagactcaccttactcagaggggcccatcagatcttgccgcaaatcaaattgatatcccccgaactgacagacgctcccgaatctccccctgctggacacacttgtgcattcaaaattttcttctcggagtgcggtctctacttcccacttccttatatcctcatcgagttcatgcatgagtttcgagtagcattgcctcagctttacccaaacgttattcgaaccatcttgagtcttctcactctggcagaagaagatgaatttcttctttcgctttccgacctccttcaattatacgctgtgaagaaaggtcgcacttcgggaaccttcttcttatcgccttggaaaggtttccttgtgtttgaggatttcccagagaaagatgaacactggagaaaatcttttttctttttccagtaaatgagctcacctttggagacatgaccgacttatttgtttctgaatgggccaccagagctggtagacagcgaacctaggaagattttaattctgaacttgttaaagatctcaacttttgtttcacgaactgatcaatgttttatctttcttcgcagctcgagttgagaaaacccctatttcgaagaccttcgccgcccacttctccagtttctgtcgacaagacttaggttgggaagttcttacaaacgacaggattcaagcatcagggcgaagactttgctctaggattgatcttgcttcttcttcacccccgttcaaaccccgaatattctccgaagcagaaatggcctcctcctcttaccgtgctgagaagaagatggagagagaaagggcaaggtggtaatgcctggaactcttgaggacagcaagcttcgtgctcttgacaaagccaagcatcctcagaacgaggatgacaccggagctcgtcaaaaagctcccgcttcatccggaaaaggtccagagatctccacttcggaggcaagaactccgagcaagaatgctgccaatgctcccagcaaggaccccgcgagatgggatgttgataaaaagaggaagcactcggagaccgaggcccactctccaactcgctcttctcgtgcccgaactgaggtgaaggatgctggtccgaaccaacagaaggggagtaacaagaaaggagactcgcaagatctcgtcgttctctcctccagggagtctgcgtcccgcaacttgcagcgtcgcggcacacttcctttgcctggtaaacttgtttccctagtcgttatccttaattgttttgaaaaatccttactcatgtatcttttgaactgtctcagctcctccgatgcacttcgctgatatgcttaggacacttgttcacctcggagcaaccattccgcctctaacggaactcaaggcaaccaacaaggagaactacctcctcttcgcggagaagcttaacgaggtaaataattttgttctattagagaataagttcatctctcgccgagctcatactcaaaatatgcttttattactaggttgttcaagagttcaactatgccttcatcagttacgaggaccagctctccgagaaggacaaggagattgagagtttttagcataacgaggatgaaaatgctcgtatggtggatgaggctaatagcgtactcagccgcatgagagccgcggaagctagggttcagactctcgagatttctaacactgacctctccgcgaaactcaaatcgggcaagaacgcctatctgacggccattgataatgaaaaccgatcaagggccgaactccttgcttgtgaagagaggttgaagaagctcgaggaaggtcaggccgtgatgctccatgctgcgagacaagaggagagaagaaaaatctgggctcaatttatcgacttctcctcgaaatacgggaacttctacaccgaatctgatgaagtcaaggctgctaagatccaagctgcggaggttaaagcgaaccgggagctcctcgaagagatcgaaaaaggggagatccccaacatagctgaagaactcgaatcggttcgtgcggatgagattacattcgcacagaaggctgctaaaccaaagactccacgtcttgacctcgttgagctcacttcgctcctggtggataccccaccggaagtggttgcagactccaatgctttggatgaagtgttgatcatcaacgagcagggaaccaacaaggacacaacctccaaaccagctatcgtcgccatgttccccgttgatgttgagaagaactccgaagtggcggagtaaaattgattatgtttgaatcggggtggtattggtctgtggtgaccccccgttttgtttcaaaacttttttacttttgtttttgttttaaagttgttggccgaggaggccttaactctatatttttaacttatttaaggtcgtagagaccgttttatgtttacttggtttaatttttcgaattgcgagatagactcggttttagtgtttgccggaaaataactaagtggattcccatttacgagttatcctcggtttactttagaagatcagttaagaccgcgaggactaaattagtttttagctcgggtatctccgaagtgaaggtgagatttgttgaaaatatgcccggttcatttcggaaataaaagacgaaagatttcgtatacgagataaaactcagttttattgatttgaatattatagagactgaacccgaagtgcgggctgcctacgtacccaaaggtagggatcaagtcttacgtagttcaaattacaaaagtgcattaaatgtaaaaacgtttgaggtgagcggcgttccacgctctgcgaactgttttgccttccatgtttatgagacaatctccgttccggactatgtgagtgattttgtaaggaccttcccagctgatccccaattttccggctcctttttccgctgtgttttgatggatccgacgtagaaccaaagttccaacatcgaatgatctgctccggacatttgaattataatattgagctgcggcgttatgatagttctgcatccgaactagcgctcgatttcggcgctcatcgatagtatcaatcacgtcgaccatcattttgttgttcgcagcttcattcttgggatttcggatcctcctcgtccttgggactttgatttcagcagggataactgcttccactccgtgaacgagagcgaaaggagtttcaacggtagctcttcttggagttgtgcggattgcccataatacgtttggcaactctcagaaccaagctcccttatattcacttagctttttcttgaggtttgaaatgatcgttttattcattgcctcggcctcaccattcccttgcggatagcgaggtgttgatcgattgaggcggatttgccattccgcgtaaaaagctttgaactgctcggagatgaactgaggcccattgtcggtaactatttcgtacggcaaaccgtgcctacagatgatttctttccaaatgaagtggcggacttgtacttgagttatataggagtaggctgcagcttcaacccacttcgagaagtaggaatctgactcctcgagttgaaacgtggagtggtccaacgatgtccatagaccatttcatgaacggtaaggggctgataccaaagtgaaaagttctgcgggctacaggatgtacggtgcatgcttctgacactgctcacatcgatgtgcatatgcttcgcaatccgctaccattgtgggccagaaataaccgtatttttttaatttaaaggctaaagaacgacctccggagtgatttccacaagttccatcatggatttcttttataactgtccgggtctgttctccgaagatacaaatagcatccggagccgaaatgattcttctgtacagaatgtcatctgctaagcagaaacgtgcacaagtggccttcaacttccgagcctcccatttgtcggtgggaagtactccgttgaagatatagttccggattggttctctccaatctgccccccagtcgtgaggtagattgtactccgttgaatcttcgtcagctacaagcgggacagcttctggaatctcgtcttcgtcgtgaagttgttgcagctcgggattgtttgcttgcacctcgagttgcctacgcatggctcgagtaacaaagtttatttcctcaattcggatattgggttgagctattgtttcaacagagattatccttctgacagttatttcgggtgtagaagccaacgcggctaaggcatcagcagctgagttttctgcacgaggcactttgatcagttcgaacttctcaaacttttctgcgagctcccgaagcagatccaagtaagcttccatgcgattgtcttttgcctcgtaatcaccagaatactaacttgcgacgagttgtgaatcgcaatgagcgaggcgaagtcaagctaacaaagactcatattctgcttcgttattggaggcgttgaaagcgagtcggaaagactgttcgagaattttgcctgaaggagatttgaggcgaactccggctccggacccgtgttttgaagaggcaccgtccacatgaagaattcaaggttgacttgggacgtcagatgcagtagtagccaacgggagctcgatcaggaaatccgcgagaacttgagacttcaagcttgttcgtgcatggaactcgagattaaactcactcagctcgattgcccacttcgccaatcttcccgactggtttggactatgaaggatggtccgaagtggcagggaagttaaaaccacaattggatgagattggaagtatggtcttagcttccgagctgcggttacgaccgctaaggccaatttctccatcattggataccttgtttctacatcggagaaagacttactaacgtaaaagataggtcgttcatcactccgctcaactcgcaccaaaacgccacttattgcattttctgagacggaaatataaagaaatagccgctctccaaactcaggctttgcgagaaccagtggttcagaaagataactttttagttgtctaaatgcctcttcgcaacgttcatcccaaacgaaccccttattcactttccgaagtaacgtacagaaggggagacatttatctgtagaccgtgatatgaacctattcaacgcggcgactcggactgttaaagctgaacttctcttatcgtgcgaagtgaagacattgataagaacgcatttatttgcctcggatttgcttcgattccccgctcagtgacaatatacccgaggaactcccgcgaagggacagcgaaagtgcacttcaaaggattcagcttcattccgaactcgttgagaatatcgaaacactgttgaaaatgatcgaggtgcgaagcggaaaaggctgtcttaaccaacatatcgtcgatataaacttccatggttttcccgaggagatctttgaacattatgttcactaaaagctggtaggttgcacccacgttttttagtccgaagggcataactttgtagtaatacgtcccgcgctcggtgatgaaagatgttttttcctggtcatctggattcatcatgatttgattgtacccagaaaatgcatccataaaagagagcatctcttgccctgtagttgactctataggtcgatcaatgtgagggagcggaaagcaatcttttgggcaagctttattgaggtcagtaaagtccacacaaacgcgccacttgccattgtttttcttgactactacggatttgcgagccagtccggatacttaacttctcgaattaaacctgctttgagaagtctaacaactttgacgtttacagcttctgcacgatctggcccatgcttctgacgtttctgtttgaccggtttaaaggttggatctacgttcagctcgtgtgagattacctctgtactaattccggtcatttctctgatagtccaggcaaaagtacttttattcttctcgagaaattgaatcagttcacgtcggaagttttggcctaggttggcctaatgttaacagagttgggaatttgacacactgatgataagttgatgggacggccttcatctcgtaatgccacggagatcatcttaacaactcgtatgcggctggtcggtcgaatactgtgaattcgatcatcttaacaactccttgtgcagtgccggggagcgttactgtgccaagtgacattgaagtctcgcctgtgaaggagacgagtgggcttggggcaactcttatatcattttttgagatccccattcgcacgagggtatcgagaaaaatcaggtccactgagcttccggtaacgatgagtactctttgcactttgcagtttgctatatccaacgtaattacaaaggcatcatcgtgaggtttgtccaagtagctggtctcttcctcggaaaaggaaatttcgggctagtcagctcggcttgcttttgtttttttcgccaccggagcaactgctttcctctcgtgctgcttaatcaaactgatagagtcacgaaaatgtttcgatcatcccataatcactttgaccattttcttagggcctttggaggtttcaggagtagattcacttttttgcttcttgttcggggggggggggaagttttttcggactccaacgcttcatatgctgcttgtgcctgctcgattgttgtgacatcaacttcgtgaatttcccccgatgcgtacttggcagccaaaagtcttcccagagctttgcatgccttggtggcgtgaccattcattttgtgaatatcacaataagcgtttgggtctctgatccatttcttactcggaaatgccccgttgttgcccttcggagagaaaggcggtttagatggagaagcttttggagaggcctttggcgactcttttttaccgagaaagttccttctgcgggtttttggagttcggccgttttttttgaaatagggggaggagaagactttggtgtagcattaaaatttttagctagaagagctcgctcctctttagcagttatccagttcgttgctcgatggagagcatcttgaattgtttcgggtcagtttactgttaacgccttgcggaaacgcgattcatgccccaatccattttttaaggcggactgagcggctgagtcggatagattaggcacttggaccataatttccttgaacgcagtgatgtatgtctgaagtggctcgtcagactgagagaggttccaaagctgggcctcactgacgtcatttttgatgaagtatccatattgtttaatgaaagtggtggagagctgtttgaagtagtcgattgaaccttcttctacctaggtaaaccaggtgagagctggtcctgacaagttttctgaaaagagcttgcacagtccagcgtcttcttcatgcggctcgagaggtacccgtccggcaataacctgaaaagaggtcaagtgctccttaggatctcccttgtcgttgtagctcgggagcttaaaatctcggaagtcacgaatgcgaagtctcgagatccttggagtgaacagagtcctgcgggttgtttcgattactctatcaacctcgggggccgcggtggtaggtcgataaacctttgtattcatggcccaaatttggtctttgagaatctgaagctcattgctgacaacatcaggctcctaggggattctgaggtcgggtgcttgagagagggctcccctcgaaacaatgatggagtccgggcggcaactccatccacatgaatgtcgggatttgtcggggtagtcagaacaacctggttttggttcgaggtggttccaatttcgattggagagacgcgaggcaactgaggtggcggagtctgctgatttgcccccgcctgcgaagtttggatgcttggactaatgcctccttgaaaatcgaggcgtgctcgaactcagcggtgcgcgatactccggcggacagaaagtcaactcgatccgtgtatgcgttgtgagctgtcatgatttaagaatgactgtcggtgagcgctgcgagctgccgccgcactgctcctgaaaagaaacgaacttatcagataaagaagttattgcggtctgctgtcgctccgtcttgtcggagagctcctgaagcagcttcttgatatcgtcaagggtggaggcttggtcgtcggaactttggttgtcgtcagtgctcatgatgatttaaccgaagctctgaagtaaaagatttaaatgccctccttctagtgctaaattgtggatgtcggaatccgcaattaggaatttgtggatgttgcgaggaccttaaaccttgttagtcgagctaagactaaatcggataatatttcagttaatcggaattcttttgtatattaatttttctgtcccctttacaaatttcgatctcgctctatttatacaacaagacctaataattgcgaagtaaatgaatacaataatcacgccgcgaatcatgcctcatcaatgcttacgtttcgtatcaatacttcgcgcattcacgtcgcctcatttatttccttgattctccgttacgtaacgctcaaaatactttcacacaggccgggcctcgaatgggccctcgaaccccacttcgctattgacagactcaggcccatttccaggtctagaacttcgagcccattgattgatgatgatggatctcgggtcggggcaaacagacgagatctgacatccacagtcactattaggatataattgttgatcgataattgagtttaggatgtctagtaattatgtatgttaagtcaaagtgtgtgtttggttaaagagtcgtgtctgttatgtttaggcagttatgtcttaagggacacaagaaaaaagagttgcatctcttaactttcaaacccgattgaagtctatttaaacataagttgtattactgaaacacaagttgttcagtttgtcttttctattgaataaaatagaagtttcttttgattcaagttacttattgattgattttctctctgttttactttgtttctgttttgagacttaagtttctaacatggtatcagagctctattgattcaagggccaatccgagtacaaagacaagaaaaattcagacaaaagttctattaaaaacctgagatcatggatgcaacaataaatcaagtgattcccatattcgatggggataattattctttctggcggattaagatgaagaccatcttaagaacacagaagttgtggaaagtggtggagtctagtgttcgaagtatgctgatgcaacgatatcacagtacataagccgttcaattgaaaaccaaatgggaggattcatcatcaaaggatttgatggcgctgcaactcttgcaaactgccgtcacggatcagatttttcctcggatagcaccagcagccacatcaaaggatgtttggaatgcattggagtcataatttgaaggttctccagaagtacgcttgatcaacttgcagtcgtttaggagggattatgaaaacttaaagatgaatgaaggagacatcatcaagtttttcactaacaagttaattgatttggcaaatcagttaagagttcatggagaagagaagacaggttatcaaattgttcagaaggtccttatttctcttcccgaaagatttgacagcatagtgctgtaatggagcaaacgaaggatctgacatcgttgccggtaacagagttgataggaactctgaaggcacatgaaaagtgtgtgtcgtctcgtaatgaaagcatgaccgaaggagcattgcatgttttatcacgagaaggaaaagtcgttgtacgacgaggagaaatgaagagtaattggcgtgacaacaaaggcaaaaaatggtgtggattttgtaagaaggaaaaccacatggaatcgaattgctggagaaagccaaagacggatcccagcaaagattcaaaggaaagttaaaactgtggccaggttggacattttcaagagagagtcgttcaaagaagtatgaacgggcacatatgagcgttgaagatgaagaaattgaagatcatatgctatttagtgcaacagaagatgcatcgacaatcaccaaagaagatgtgtggtcagtggttgcacaaatcatattgacgagagaagagagatacttctcaaaacttgataaaagcatcaaggttccaatcaaagttggaaacagagaagtcgttatgattgccggtaaaggagacattacggtctgcacaagcttcagaaagaaagtgataaggaatgtatttttggtgtcgggactagagaagaatctgctcagtgttccgcaaattatatctgtcggatatagtgttttgtttgagaacaagtgttgcaccaacttggatcgtacgggaaagaagatcatggaaatacagagggtaaataaaagttttccaatcagatggaattcttcacaagaaagtgagttggtgactagtgaagaggaaggaatggagttatggcatcgaagactaggccatgtggggaattcaaggatggaacaaatgcacaacaagaagatggtagatggttttccaaatttccatgtaaacaaagaaatatgtggagtatgcaaacttggaaagcaagtacgagaagcgtttccaacggagtctcaaacaaagacaaaggagaaacttgaaattgttcataccaatgtttgtggcccaatgcaaacagagtctcttaatggaagcatatacttcttgttgttagtagatgactatactcatatggcgtggatatactttcttaaacaaaagtctgaagttttttcagtgtttaagaagtccaaggccttggtggagacgcagtcgggtaaaaagatcaaaaggcttcgatctgatggtggtggtgaatttacttcaagcggattcaatgagttttgtgatcaagaagggatcgagagacaagtaactgtgccatatactcaccgcagcaaaatggtgttacaaaacgtatgaactgatccttgatggagatggcacgaaccttgcttgttgaccaaggtcttcctcacaagctatggatagaggcattatatatgtcaaattatctgcaaaatcctttccctacaaaggcaatagaagatgatgtcacaccgatcgaaaagtggagtggtcataaaccaacagttgaacacttgaaggtttttgggagtatatgttacatacatataccgaaggagaagagaaggaagctagacgaaaaggcaatgagagtaattttcattggctacagcaacaaatccaagggatatagagtactcctacttgataaggagagagttgagatatctagagatgtggcgtttgaagaaggaaataagtgggattgggtaagacaagttgaagtcaagaagaactgcagtacacccacaagtgtttctcaatcacaagaagaacaaagtcaaagcatctcaagttcggttttgtctcagcttcatgatgaagatatcagtcaagtaggagaaaaatcgtcgacaccaccaaagaaatacaagacaatggttatggagattgctccaatggtggatctcgacgaaacagaagcatgttttgtagtctctgaagaacctcattcctacggtgacacatgggtagttaaagaatggcgagatgctataattaagaaatcgagatgattgacaaaaacagaacgtggtcactcatggagaaaccagaaaataaaaacgtcattagcgtgaagtggatatatcgtatgcaaactgatgcaaatggagttccattcaagtataaagcaaggttggtcgcaagtgggttttctcaagaatatggtgttgattatctagagacatttgcacccgtctcaagacatgacacaattcgagtcgttcttgctctagcagcacaaatgaagtggaagctttatcaaatggatgtaaagtcggcatttctaaatggagaactaaaagaggagatttatgtcgcacaaccacctggattcatcgttaaaggcgaagaagaaaatgttctaaggctaagaaaagccttatatggcttaaagcaaacccctcaggcttcgtatgagaaaatcaacattcaaaaaatcgctaggcgctagttggacgctcgagatgggcctagcgcctagcgaaataatcagagatttaacgggatttactcaggattagtttttcgagcaattttaatattttttaaatatttctagtgtgatgataaaaaagtattttaaaatttataaataattttgcaaaattatttcatatcaaattgacattcatcctaaatacatattcaaaatacaaattaaagttccaacatgatatacaaaaaatagtatcgtcttgatcttgagacacacaaaaaacagagaaatgtcacaaaacagagtgaagactacttcttcctcgtttgatttcttcaatgatcaagtaattagcatatgttggacttcttgtttagttaggacttcttgattatctgcaaatgatcaaacgtcaaacaattgatcaaatgtcaaacaattgatcaaacgtcagacaattcatcaagtattcaaacaaaggacaatagaaagtagaaacagcaagatagatattcaaactatcactgtagaaaacaacaagtaatcaacactacaagaaatatgggtattgatagcacaaaagtatagcgtaattttcgtaaatgctataatagatttttttctggaaatgagactatataaaagctgttttaaaatgctaaaccgaaatatatctatgcgggaagctaaaaatcagttttccgccaacacttaagcctaaaaatcaattaagcgccattaaaaaaaataattccccaacacttagaacaaaaaaacttttgtgaaactcaaaagtcagaaaacacatagatcagttcttcgagctctccgccgactagctctccgccgacgagctctccggattcatcgactagctctccgccgagttcctcgtcgcatccgcatctgacaatcttcagccccaacccaatatcggtatgaatatttacccgacgatgtctgttaattcgattctcaattagggttcatccaatttacaatttccggtcctttgcaattagggttctttggatttagggtatgaataagggatgtttgctaatttcagttctatgtatttcagatcttgctaaggacatatctaattcaacgctttctttcaaaggtttgtctaagacttgtgttagatttcttatctctttgatttagtaaacaaaaactttagtgcgaatgtgattgtttcttgtgtgttactgtctgattcatgcttatacatgttcattgtcttttctttcttatacctgtaaacaacgcttgtctgattcattttctttcttatacatgttatgtgttgctgtctgattcatgcttgttttgggatactgtttgaacggttcgaaataagggtaacatataaaaatgctcgataagtcatgggttaatctctgcaggtatgtcttttaagatatataagttatatagtgtgagtggtttatgtgtttcttacttacttaatcctcgtttacttgccatgtactgaagaattgaccctgcctatgagaatggtgcattgaaatttgtaaatgaggttactgctgcgtcaggaggaactaggttggtaatatgcccatgtacagactgttggaatgtagatcgtcatttaggcagtgaagtagtgtatcatctagttactagctactagtaaattaatagtagcaacgaaatattgttacgaaagaaaatattatgatgcataacatatgctactatatacaataatatagcaaacatccaatgctatataaattataaatagcgaaaaattgtgctaccagaaaatcattaatatcaaaataaagacgctattatatagggacatttaatagcttggtcaaaaaacgctattatatatgacaagtctaagatagctcaggcaaagacagcgattatgaatccgccatctaaacgatattgtagcgttttcggtgtgttaagagtgcccatatttcttgtagtgaaaacaacaataaaaacaaaccttagtaacccatttggtgtgccacacaaaactcaggattttcataaaacacgtcaggttcaaattcaatgtgaagcattacttcatattcatcctcagattcaaaatcatcatcataaagctctcttacccttggagattgggtattaggtacgacaccaacatcagtagcttggtcttcttgatgttgttccacaatccaatcttcgacggtttcttcattaccatcatctataatcacatctattgctttttctttaatttttttgtgcttgttaaaaagtcttgcattaaattggacataaacaaggctgtttagatgattgacatctaatctattccttttcttagtgtggatctgcaattcaagaagagatattaaaacaggagctggaacataaatagttatacaaaaacagagattaaaatgttgaaataagcactaagaacacagatttaaagaccaactgcttcaaaactgctccaagttctttcacaacaagaagagctagaggtcaatgcaaggattcttgttgctagcttttgcaatgtaggtacatgacatccatatgttgtccaccaattccctaaatttacaatataagatatctcatagaagaacagatcttatacaaagacataaatatcaaacaagaacaattaaattcaattaagaagacaaacctggatcaaatgcttcatcattttgttcacatcctcttaattcaattgaaaaattctccgagaattgacgcatactttctccaacatggttttcaaagaaacatgaatgatgcagctcgatttctatgtgatgaagaaagacaaagatattctggtcgtgagtctgtacgttgatgatatcatagtcaccggcaacaatacgcaactcatcgacaaattcaaagaagaaatgaagatggagtttgagatgacagacatggaaatgttaaattactttctgggcatggagataattcaagatgaacaaggagtctttctttcacaagaaaaatgcgcatgtaaacttagtgagaagtttgatatgaaatgaagcaaaagtgtaagcacaccacttacaccacacggcaaggaccttgaaaatagtgaagaatatggtgagccaacaaaatatcgaagcattattggtggattactatatctatgtgcatcaagaccagatctgatgtttgcaagttcgtatctctcacgatacatgtcgaggccgcttaataagcacaatcagaaagctaagagggttctaaggtacgtcaatggtacgtctcgctatggcgttcagtttttaagtgtcaaaaatcctgagttgcacgaatattgagatagtgattggggaggttcaaatgaagacaagaagagcacatccgggtacgtcttctctctaggatctacaatgttttgttggcaatcaagcaaacaacaaacagtggtgcaatcaacagtggaagcagagtatatcgcaatttgtgcagcagcaaatcaagcaatttggttacaaagacttccggaggacattggttttgattctcaagaaggagttccaatttactgcgacaacaagtcggcaattgctattgggaagaatccagtacaacattgaagaacaaaggatattgagatcaagtaccatttcgttcaagaagcagaacacaaaggtcttatcaaactcaagtattgtgaaggtaaagtttaacttgctcacttgcttaccaaagcacttaacaacaaaaggtttgaagaagtaaggaggagacttggagtgagaccaaaactcaattaaggaggagtgttgatcgataattcagcttaggatgtctagtaattatgtatgttaagtcaaaggtgtgtgtttggttaaagagtcgtgtctgttatgtttaggcagttatgtcttaagggacacaagaaagaagagttgcatctcttaactttcaaacccgattgaagtctatttaaacataagttgtattaccgaaacacaagttgttcattttgtcttttctattgaataaaacagaagttccttgtcattcaagttacgtattgatcacgatcaatatgaagttgattttctctctgttttactctgtttctgttttggagacttaagtttctaacaataactatgtgtatgaattcagggtaacattggtagtattaagatacaactaaatatatgatttgtgggtaatactgtcattactaggatgtaattgtgtgtatgaattcagggtaacattggtagtaataagatacaaataagtgtatgatatcttggtaatattgtcatcactaggatataactatgtgtatgaattcagggtagcatgggtagtaataggatacaactatggcccacatctccgtccaataatactttgtaaccaattcatgtaattccatacctcgagttcttgctgtatctctctcgaaggaaatgaaagcgactaatgcgtgaatacaaagatacttttggatatcgaacaccttgcaactgcatgttttcaagagcaagttgaccaaaaatctatcccttcatctcccgtgacattgtattcaagctgaatgtgtttagctccgtcacttttagtttctccgggtcaacctataaatcatgcaagtagttctccactaaaggcacgaagttattgtaagcagatcatgacgcgacgtcttttcgatgttcaatattccgaatatttgaagctcgtatacgtcaatcacaattttctttagaacatgttaggacataccgctccttatcagactttttaaaaacataaccaaaactgttagcaaatacacatttgtccaccacttcctgcaataccgtcttgcttggaaattcttttcgtaaattcaaaccaataccgtcttcccattcttttatcaactgaccagattttacaacaggcggtgactcaacgtattcatcactcctatcatcacattcatcacgttatccaatctcaggatcttgagtatcatcaacctccactattgcctcatttggttcttttccttgttcctcacattcgcccatcacgatggcagcatcatctctcatttcatcctcatttgaatcaagtttagcatatttcttaccaacataacttttattgaggagctccactctcgacagttgctcgggcaattctgatggagtgatgacgtccacattagaaacatatctacagttatttctacctgaagatatatagacaccgacatccccatcatcactaatgtaaatctcttaagttggtcttaacaacactgcattgtacttcatttgcaatttaaccttattttcatctaatccaagcttcgtgcatatcctaccttctaacatggagagagttatcttatcctctgatgtattcatcatcaagctatatattcgacctttccatttaaaatatatgattatgttctccatcattgtatcctgcaaaaatagtacaaaaactctggtagttatagcactaaaagaatacagccgatttgcgaagcaaatatttctcgcaatattgcgacaaatttgtgagtcatttgcaagacgagtaccatacctcgccaatcactcgcaacattgcgagaaaattttctctcgcaaatcaactgtattcttttgcgagggaaacaaaaacttactacaaaaagcaatctatttactacaaaaaaaaaaaaatcttaacaaaaactttttcttacaaaaaaaaaattgttggggtggagagcatcatgagatatatacattgcgaagatggatgtacagtcatagagatcaggcgagcgatgatgtgacgagacagttttatgaaggattgcgcggatttatgtttcaagagacaaaccaaccattgtcttcttgtaaccgctgattcatgaattgaagaatttgtgctatgaaggtgttcatatgtttgattactagagtaaacaaaatttcaatatgcgggcagtattaatgtggacgattagtgacttctttgcatatgaaatgttatcggggtggagaacgtacgaaagattatcgtgtccttatcgtatgaatcttaccgattcatttcagctaaagaatagaagaaaatcatgttgttttgattgtcactgtcgatttcttcccatgcatcatccgtatcgtcaaaacaataagttgcttaagacgaataaagttgtccacattttcctacaatcatatgttccggtaataatttgctcgaacaaatcgattattatggtgctcaagaaacaagtaaaagtgggataattggcacactctagagaacatgccagatggatatactagcactcacaattggcacaaacaaagtatcttctggcaactcccatattggaaggatcttctcttgcggcaaaactttgatgtgatgcacatcgaaatttttttttccgataattacatgaatacgcttttgaatgtgcaggacaaaataaaaaatagtttaaaatcaaggttggacttggcagaaatatgcaatagactttacttgcatattcacgagatggcaaattaccggttgcaaagttttgattgtctcctgaggcaaagaaggcgttcgagtgggttactacaacagaagttaagtttccagatggatatgtgtcaaaaaatttaagatgcgtcgagcaaggtcaaaacatttctggcatgaaaagacacgattgtcatgtattcatgcaacggttactgtcatttgtgttacttgagttgctatcaacaaatattcatgaagcaattgcaggtaacaattacatttataattgaatatatatttttaactaaattatatacgtatgtttcatttctcccttgtaacgttacttacattgataatttaatatgtttatgtatggctggcattagagcattttttagggacctttgtacaagaacattgacacctgatggcatacaacaattacacgataatatcccggtgttgatctgtaacttggagaaaatattccctcctgccttttttgacgtgatgaaacatttaccaattcatctaccacatgaaccatctcttggtgggatagtgcaattccgatggatatatccttttgagcgctctatgaaggctcttaaaggaaatactaaaaatattccttttactaaatccagtcatgttttacatccctatagtcattccctaattataatttagaggtattcataccctcctcttcttaaggtaaatctagatttgggataaaagacatgtaatatataaatgccttagcatgtgtcatgtaaggtaatgaaagaattagattacttttttgaggcctcaagcgtagtgtattggacagattatgaaaaaggatattgggttttatacatgaatcacagactactacgattttccaaacaataaccaacttcttaaggtaaacacggattttggataaaaaacatgcaatatataaatgccttagcatgtgtcatgtaaggtaataaaagaaataaattactttttcggaggcctcatgcgtagtgtaatgaaatggttatgaaaaaggagattgtaatctactcccctcacttatttacttctctaactagactgtgttcttcgcatggtccacatcgtcagttaacacgttattcctgttccacagcgcatgacataatcgtgccacgtacaaaatgcccatataaaggtttgctgcatattttatcaaatagcatggtatacatcgaataaaccactacaagaaattgagatattaatagcggtataatataacgtttaatgcatttttgctataaatgacatacccttcaactttagataacgttcgctaaagtgtaaacgttatatttggttggttgaatattagttttaaaaactctttttagaaatgtaaaagatatagcactaatacattttgaatcgctgtggattgtttgagggaaaaaataatttatttgcacattaagtactttaacaaaaaaaaaaaaagttgctatcaaatttttattcttcctctcaatctccgtctctctcttactccattgtttcacttctcaagcttttttctcactatctatgtccatctctccatacttgtcaccaatttgccaaattcagaaccatgcttctcctccgacgaaattcttaacccatatccaaaaccagatgagtcatcttcttcctcttctccacccaaaaaaaccctaaaaacacaccttcagtaaatacagtagaaaaacaagggcaattagattcttaaatcatgttgttgctctccctttcactgtctattgcaaaatcaagccctagccaccgttgaagcaagtgagacatgggctcactcaaggtatgcaagaagaactgtcttagattcaaatgaaccattatattgttttgctgaatcgatttacagatctattgttgcaaactagttacagatctgtgttatagatctgttgttgcgaactagttacagatcttgcgaactaattacagatctagatctgtgttatatatctgttactgcgaacttgttagcctaatgattttgattgattttcgtgaaccatatgtgcgtacaagtatgtatcggagctatggaggaagatgatgtctgaagtctttaccaaaacaattatggtcaagacatttccccgccgtcgctgactctacctccgtcgcacttggaagccaatcaagttcttatgctccactacaaggtatgtttctcgtgctttgttcttccatgcttgaacttggaatctggagatattaaaaatcattttctgaaacaagggtctaagtagtcgcaattgatgttactcttgctagcgattacctttggccatggcagattgtcaaaagagaggaaaaggttagtgtcgctatttcgaaacatgatttcttttctttttttctcttcaattagttgttgaagcttaaagctttattcactccttgctaacgcagttcaaaacactggagtatcaacaacaaaatagactatcctcctgataagactttggtgcattagagtttagacgggttggttgcaagagtgtgtttgacgatcaaatattatctatttgggtccacggtctaggtccatattgggagtgattgaaaatggattttacgtcatcaaacctctaatgccaatccttggtgacctggatacgtgagggtaatgatctccttgcttttaagtctctttgttactcatacaattaaaattacgtctttttgtcaactacatcgaaataaaacttggagctctctttttttttttttttgtgtgtgtttttgatctagtatgtgtccatgtgttttattatccagtaaattcgttaaataaatgtaactcattttcatatctttatacacttagtttagttctctctttagctaggatatatgttacatggaacagtggcttcatttcctctctgattacgatgatgttctttttggtttcagatcttaactcgattaccaaccttgcttctacttctcttgcaattgatcaaatcgacattactcttttcaatttaatttgttgagcagtgaggctatatcattggaaaggcttcaagaagaacttgaagaatgtgagagtgatgaggtaatagaatttagatccaagggaatgatgtcctctctatcttgtttgtgtgttgatgatgacggagaagaagtttcaaagattggaggtcaaaagagtgtaaagaattcacaagctttaaatacaagagttgtatgaaactatcttttaatttgtacttttactttgtaatatataggtcttttgtatcaggatttcatataaattaataaaatatatttttcttttttaatattgtcaaattatccaaaacttttaaaagaaaatttagggaacaattacagaaattgttacacatataaaacaattaataacaaagtataattgctattgtaaaatatacaattgcataaaacaaagcgctatatttgaagaaaatacggtagcaatactaaaaaccgctatcaaaagtctctgacctataatgacaggcgatgatagagcgcttgttaaaacgctatagtatcgttagatagcgttattcggccgctaaggataaccaatatacttgtagtgaacgtaacttaaaatttcattacatcatcagcaggaggtgttgtatatcgcgtcttggtcatgggttataggttgtgttatataagcaaggggaagtccatcaaggatgaaattatatgtaaacggaagggtgacttggttttatgtatatagtagcaattcaatgttgcgattagggtggcgcctaaacgctacatacaaaatgcaatcaaggacccatgatattaagtaaagacgtgaatgtttaattatgagtacgtgttgtcgtttaaaacaatatagacacacttttgaaaaaaataacacataaaccaacaaagttataactacaattgtggtctaattatatttcaaactaaatcaaatgtgacagatatcagtaacatttgctgtcattaattccaaaaaaaaatgaaatacttccaagtaaattagccttttttctctaccgatgctattatatagaaaaccatgcagttggatttaattctgtgatgttatatcgtacaacatgctataaattttgggaaaataaaatctaatggatatctacaaaaaaatttgtccatctattcctttttattgtagattagtcaaataggtttttcaaaaaaaaaactaagtcttatttacccttattttattttataattaaaaaaaactataatttcctaatctatttacacaaaagaaatagttgttttaagtaaaattttgagaacctaaaaatcctctaaatgtattagagaaatagtggatattaatcaagaaaaaacaagaacgtaagactttataaaagacaagaacatatacaacatatagaacatagcatgataaaataaaatgctatgatttctcccttcacctacaagaaatcaaacactagttctggtttctgcaaacatgtcatctacgaagcaagcaaagggaagaaaaataaaggggaagcaaaagatcgagatgaagaaggtggagaactatggagataggatgattacgttctcataacgtaaagccggaattttcaagaaaatgaacgagctcgtagcaatgtgtgacgttgaagtggctttcttgattttctctcaaccgaagaagccctatacattcgcacatccgtctatgaaggaagtggctgaccggttaaagaacccttcgagacaagaaccattagagaaagacaatacccgacccctcgtcgaagcttataagaaacaaaggttccatgacctcataaagaaaatggaggcgctcgaagaggagcttgcgatggatctagagaagttgaaactgttgaaggaatcgagaaatgaaaagaagttagacaaaatgtggtggaactttccttcagaaggtttgagcgtgaaagagctgcaagaaaggcaccaagcgatgctcgagttacgtgataacttatcataacttaactccacatcgattgtattctcttctattctatagtcttttttgaccatcagcttaagcacttcgaaagttgtagtcaattccaaaaacagcaatctcccacgatatttttcatgaacaataaatctccactccgtgttatcatacaatctccacatactactcctcacatagatatgcataatgaaaaacagaacacgagatggaaaagaaagaacgtgaagaagaagagaataataggacacaaatcgactagggcacgtttgtttacaatttatttttttgggcgtttttttttttgtattctaaaacaattagaatttgttttctaaatccagtaaaaattgtaatcttaacagaaaatatattattaaaacaaaatatttaataaatatttacagtagaaaacgttttctaagaaaatttcacttttagaatttatattctaaccaaatttagaattttgtttctaaactatttagaattcctagatatagaaagtgaatctttgaatacaatttcatatatagtttagaacttgaaggatattttagaatacatgttatacaatttttagatattgaatatcctattttctaatatttttataaagaaaaatagtctaaatatcgtagaatatgtacaaaatattggaatagaaattctaaaccaagtagatcactagaaatcgttatctaagaaatttagacaaaactttatctataaaaaatcaacttttttcaactaaataacaatttttttttacaaatcaactatattcttgtagatctacatgttatcaaggttaaacctttaaaaaatgcttaaaatatagagtagggatattttagtccaaattggcattctccaaaaaaaaggtgtatatggacaaatgtttttgtaagactcttttttagatttaattttctcataatttttttttacataggattcctctttcacttgaactattttaatagaaaccaataagtacgttcgcaccacacatttccacctaccaccaaccccccataaatgagtgtatacataaactaacattattgtcctatttatacatggttttttacatctcctccatctataataaacgtcatcggccctatatatacatgcttgcaagggttgaaataagacagtatagacaaaattatgtactcatgcgggtcggtagactgttcattaaacaatttgaagacgcaaaggaggcaaacaacccaaaagcgcattactaagaaggtctaagttaggcgtgttgggaaaaagatttagtcatggccaaaaaacacattttcaaaactatggacgactctgtatttgcaactcttgagcgaatggcggtgcataatggtacaacttaagtacaaacatggaatgaggcagtgcctccatgttcattgatctacaacatatataataggtgcgaagagtgctacatattctgctgttccaaagaattttgtcggcggtgttatatgctacaagtttcagaacatgttgttttcaggtattacatgttgtgtgtctactgtgttattagctgaagaagagtgtcaccaaacgggcaacacgtaaaaataacatgatgttcttgtatatttcatgttgtatgtcggctgtgttaatgttgttaagtctaatgtatgaatgtttctttaatattttaaaaatattaaaatagtttcgtttgcatctttacccacgacgaagtcgtaattatcaaataagcctctaaatttaatgcatagatatgtaaacaaaacctgtcatcaaattaaaatgtatggtataaattaaaatatcatttacttgttgtattatatgttgtatgtctattgtgttaatgttgttatgtctaatgtatgaatgtttctttaatattttaaaattcttaaaataattattgcatctttacccacgacgaagtcgtaattatcaaataagctttcaaatttaatgcatatatataacaaaacatatcatcaaattaaaatgcatgctacaaatttaaatatcatttacttaatatataaacatacacaacacagctacatggaaagaacattaggttcccaacattgaggtgtctgaaatattacacaatgaggtgctagccgaataacatacttaaatgcagtgtcagaccgtcccattagctaactcatatgcagaaataaaatactttttggcagcagacaccacatcaacatgcttcacttccttgagtgactgaattccaccatagacatgcacttcaattaaatgagcggcaaaaactctcaaatcttattgtgtgtcaatgagaaacggaatgtaggccctttcaaaacctctaagtgtgcattctattagatcgtgatcaaaccaatacatccctttcttagtagtcttcaagaatttggggtagtgcttgcattattcaaacacaaatgttgaatcaatgaatgctacatcctgctgattttctatgatattttttgcgcgcctagcgatccttatgcagtttatgaagatgtccataacctgtaaaagagcaatggaggttcgatgttgaaggccaaacattggtttgtcaagcaaaatccaaaataatctatgtatacatatatttatcataccaatgtcagcacgactgctttcaattcaacaatatcccggagttcagttgagaaaaaggtccgatctgcccaaaatcaatgtccctaatacaaaccgatgcataggttataattaatgtaagttctggatacataaaaaacgaaatacgaaaggggggaatataatacctagacattgcatatatgcggcttatcttaaaattgcggctaacataatgtccaaaagtaacagacctactactggtaaggatgacattactgttacatgttggagctctaaaaaatcccttggagccaaagctactccgtccacctgtcatcatcctataactgccgcatatgtgtcatcacgggcgaatgaaacatatactagctgactcgcccttgttaccactatataagctcgatcggcctaaagaattttgtagggggagaaagagagagaaccgaaaggtcgtcatgttattgagtgatcgtatgtaatcgagaaaacctgccaagaaatagttgaaaagaagtgtaatcatcaaaggagctcggtccgtatcatcgcaaacaccttgttggaaactggagtgagttccggatatggtttggttgtatgattatactatttcattcattgattggttttatgaattacatgagtattgattaatagtgtgaatgatagatttaggccgcatatgtgatcttttagattcttatgcttaaaagcttatgtttgggaggttatgttgagtaaagatattgatgattctatgtgtttgattaaccatatgtttcataatatcttaaaatcttgggtcttggtatgtggtccttgtggtaggaggtagagaccataagtgtatcaagatcgtgatatgtctaacctcctttgttggtgtaggtaaaattaatcctaagaccactctctcaaataaagaggttagttgaagcacttagggatcaaattcataaagttctcggatcacacagtagactaatggctatcgaagtaacctaagtaaaatagtaaagaaaataaaaagagacaaaagtaagcaatagcaatagattatatggaagtaaaatcaaataataaaaacgttagatttagtgatattctcagtaatagatgactaacagatctagctacgattaggattgttatcgaaccgttcttaaactcaaatcactaatataaagtaaccggtgatgtcccgtgctactcactatgcctagagctaaagatccccagtgatgtgccgatgaatacctaattctaaacatgcattattataaagtttgattagttcactaagtatctaaaccagagcccttctatgagcctacatgttcgtttcttaaatacttaggcccatctatgatagttctggtaacaggtacctatggtggttatacctaatatttaatatcaagttctaggtggccaatctagaactagcattaagaataatcaagatgaagaactctaaagatatcctaacaggtgggcgatctactaatcatttataaccctaatgagaaaccctaaacctaacaagaagactactcagacatgatgaatgaagcaaacaacatgattagaatagaacttataagtgcatttgcatgattttttaggtgtgtttttggtgtgggtgtttgaaggcaacatatcaggccctataaaacttattaagattggagtcataagtgcatttgcatgattttgtagttgcttcggcgaactatctttcgttgctattatgtgatgcgtgctttgtgttagaattacgggacgaggaaactaatatctattgcagggaatcccgaactcacttagtaatcttagattactcatgattctacttgttttgcaggaaatccatagaggggaatagagggcatggtggacgataggaaacctagtgtaaatttgtgccttttgtaaaacaaatttgtttatattatgtactgtgcttttgggcactatgcattggccataagaactttataaatgttttggtaacatgttgtaaaatatgataaggttcaaattatcctaagaactactttctcaaataagagatcaattgcagtatttaaggatcgatttccacaaagttcttttgttcaaacaatgagttgaatgtcgaaattaagctagcgggtgatgattgaaataaaaagagaacaaagtaaaaagacataagattgactggttgtaaatgatatgtcctggtttttattgatttctaacatagtttcagaatggtttttagagtctttctagtctttttcgtatgttttgagtcatttcaggtacacttacacatctgggagctatggagcacaataaggaattttggaagcttttcatcaataaaaatcttgaaggacgtttttcaaaagatggtgtcgatagacaccacacctgtgtcgatcgacactcttattgctgccaagggtattctcatttactgccaagtctttgagaagccctgaagcattccttattggcaaagtagtccctgcacgtttttagactcgaatatacctaattgtttggtcattgttagacctaagttttgttttagagattgttacacatttggagagaagaatccaatccttttagagaggattctgaactcctttacttttattcttaatacatcaatgcaaactattcagattatgatttgtgtttctattatcatgtctgagtaatcaccttgttggtttagggagtctcaatagatatttagatggattagtagatcgaaaaccccttaggatcattcttagagttctttatcttgattattcttattgctagttttagattgatcacctagaacttgatattagatgataggtatgcccatcataggtacttgttataggaactatcatagatgagcctaggcatttaagaaagaacaggtaggctcatagaagggctctggtttagatactaggtgaactaatcaagtttaataacaacgaatgctttagcataggatttctcggctcttctggttatcttagctcttagtatagagagtttcgcggaacgtcaccggttactctagaatcatagtttgagttcgagaacgatgcgataacaatcctaatattagctagatctacaatttatctatctcccgagacaattccttagacctaacgctttaatcacttgaatctacaactcgtttacttgcttatttgtcttttacattcatttactttctctagcttatttaaaaacatcataagtctattgtgtgaacatcgagagctcagtggaattcgacccttaagtgctaacgacgatctcttatttgagggagtaagcttaaggcaatttaagtctatcccttaagttctcttttagttcaccattagactaggtgtcattttaagtctagatacttcttttctatcacctaatcatgtgtttctttgtcttttggtctcttgtgtttcaggtaccttcacattgagaattacgtttcaatggcagatttttatgataatgtcgaccgacaccatctgcgtgtcgatcgacaccctccgcagaaccagacggctacaataggcgattttaacagaattgatctcttctacaccaaccgatcaacattcaagctacctccatttgaaagagaagactttgctatacaccctgcctattatgatcttgtatctagaggaaagtttagaggagctcccgatgaatcaccattagatcatttggaagtcttcaaagacatcgtttcctctatcaaagcagaaggtgtaccagctaattaccttatttgcaaactcttcccccactctctcgcgagcagaggaacatcatggttgcgtcaactggaaccaggttcattaaccaattggactgatacaaagaatgcattcatgaatcacttcttcgatgaatctgtgacagaggctattcgtttgcaaatctcttcattcactcaggctccagccgagtcccttcgagcatcttggctccgtttcaggtcttatcatcgtgaatgtccccaacatggcttccaagagagccaactcatcaacctattctacaaaggaatagacaagccataccggagttaactcgatgcagcaagctactgtaacttcatgacaagaaccactagtgaagcattactcctcatcaccaatgctttaacttgtatttcgacacaggaagttgacacagaacaaagaatttcagctgagatagccaccgcgaacaaagagactcctgtttcagcaatttctactcctatccaagccccccctccaccctcatcagagaccagaatggagtctatgattgcgcagcttcttgcaagcctaacaaagcttgatagcaaatatgattctctctccacagatctcaatagcaagattgacaatctaagccctcatatatccaatttctcacctacatcagcttctatcaatgtagtcacactacgtagcagaaagcagctcaacccaatacttcagcgcgaacgatcagctcagccttcatcttttccagttgcagaaaaagactcagtgtcgatcgatacaccagggtgtcgatcgacaccagttactcttgacgcctctgtttttcctttgtcgagtggaattgacaattttgcggaggaggaggaaactattcatgatggtgtcgatcgacacccaagtcctgtcgatcgacactcagctcgttcagacaatgtgcaaattccagctgaaaccaaatcggcgaattgccttccccaagagtcctaaaaagtcaagacaagccttatatgatgtcaaatgcaaagctatgattgataagctgattgttgaaatgcctctagttgaagctattcatctatctcccacaatcagaaggtaagttaagacaatggtcactaagaatttgtcgaaagaatgctgtgttatgatgatttcagagcagggcagcgacatcattcaggaacgaatcccaagaaacctgcctgattctggaacctttgtactaagtgtcaccatcaatcatgattccttcccaagagctttatgtgatctcggttctagtgtgaatctgatgcctcgttcagttactatgcgtcttgggtattccaatcttgagcttacctttattactattttcttggcagatcgttctacccgaattccaaatggatttcttattgaagttcccgtgatggtaggaaagagcatgagtcctacagaccttgtagtcttacattatgagaaggaacctaaggatccattaatccttgggagatccttcttgcacacagctggagcaatcatagatgttcgacaagggaggatagggctgaatgttggcaatcttactatgcagttcgatatgaacactttggtcaagaaaccgatcatagaagggaaaaccttcttgatagattctttgacttcttcagcttcagacagtatttcggagatggaattagaagacccagtagagcgagttttggtctcttccgtagaagatagtgcagatatgcatagtgaaacttctacatatactaagttgctagatgagaccgaacatgtgatgcaacttacgattgaagaaactcttccatctgtgactccaacgccgactactaattcagattgggatccagcaaaggctcctaatatcgacttgaaaccacttccagcagggctaaggtacgtttttcttggtgaaaattctttttatcatgttattgtgaatgcttctcttaatcccgtagagctcacctaattgctaagcaagctgcgcaatcatcgcaaagctcttagctattctcttgatgacattgcaggtatatccccggatgtatttatgcataggatccaccttgaggatgagtctaagtcttcagttgaacatcagagaagactgaatctaatccaaaagaagcggttaagaaagagattattaagctattggaagcaggtattatctattcgatttcagacagcagttgggttagtccagttcatgtagttcctaagaaggaaggtgttacagaagtcaagaatgagatagacgagctgattcctactcggacaatcacaggccattggatgtgcatcgattacagaaagctgaatgctgctaccaggaaagaccatttccccttaccatttatcgatcacatgttggagaggttagcaaatcataaatactattgcttccttgatggatactcaggattctttcagatcctgattcatccagatgacaggagaagtaaactttcacctgcccctatggtacagttgcttatcggagaatgcccttcggtctttgtaatgctcctgcaacatttcagagaggtatgatgtcaatctttacagacatgattgaggatatcatggaggttttcatggatgatttttcagtttatggatcattgtttgaggattgcttagagaatctctacaaagtgctggcaagatgtgaggagaaacatctagttttgaattgggagaaatgtcactttagggtgcaagatgggatagttctcggacataggatttctgagtatggtatagaagccgatagagctaagattgaggttatgacaagtcttcaagcgcttgataatcttaaagcagtgaggagtttccttggacatgctggtttctacaggagattcatcaaagacttcagcaaaatcgcaagaccattgacttccttactctgtaaagaagtcaaattcgagtttacacaagagtgtcatgatgcctttcagcaaataaaacaagccttgatcagcgcaccaattgttcagccaccagattgggatctaccttttgaggtaatgtgtgatgcgagtgattttgcagttggagctgttctaggacagaggaaggataagaaacttcatgccatctactatgcaagtagaactcttgatgatgctaaaaggaattatgcaactacagagaaggagttcttagctgtggtgtttgctttcgagaaattcagatcttatctcgttggattgaaggttattgttcacacagatcatgctgccttaaagtatttgatgcaaaacaaggatgctaaaccaagacttttgcgatggattttgcttcttcaagaatttgacatcgaggttagagataagaaaggagttgagaagtgtgtagcagatcatttgtcacgcattaggattgatgatgatgttcctattaacgatttcttacctgaagagaacatatacatgatagatacagctgaagaatacgactgcaaatgtgataagttacagaatcgagtttcattgtcgatcgacaccccttctatgtcgatcgacactcacatttcagaggaagttgatattcgtagttggggaatggtgtcgatcgacaccactggaactgtcgatcgacacccttccgaatcgacaagaaattggtcaccaactgagaattgcgccgtcacagcattagagaaggactacccatggtatgctgatattgttatttacctaggtgcagatgtggaacttgataatttcatagattacaacaagaagagattcctaagagagattaggcgatattattgggataaaccttatctccctataagcattgttctgatggagtttataggagagatgcattgctgcaacagaggttcctgatatactatcacattgtcccagctctggcttatttttatataaagtaaacaaatatgtcatggttgcagaagtctatacatcgcatataagctttaagaatattgtggcataactatcgaggtgacgcaggacctaaaagatcgaatggaacaatacatagacaaataaatcccgtatgaattttaagtcattccgttcacttaaggtaaaaagtatttcggcattccaagggaagtagactactcaagaatttgacatttttttttgtcatggtggtcattttgcaaccttcaagacagtatccaaagttcttcaagcaggcttttggtggcctacaatgtttcgggatgctcagaaattcatatcgcaagtgacccttgtcagagaaggggaaaaataagcaactgtaatgagatgcctcaaaaatttatcctcgaagtgaaagtcttcgattgttggggtataaatttcatgggacccatcccaccttccaacaagaatctctacatcctagtagttgtggattatgtctccaaatgggtagaagctatagctagtccgaagaacgattcagcggttgtcatgaaactcttcaagtgtatcatcttccctcattttggagtgccacgcatagtcattagtgacggaggtaagcatttcattaacaagattcttacgaaattgcttttacagtatggagttcagcatcgagttgctactccctaccatccacaaacgagcggtcaagttgaagtttccaacaggcaaatcaaagagattctcgagaaaacagtgggtaaagcgaaaaaggagtgatcttacaagttagatgatgcactgtgggcttaccggacagctttcaaaactccgcttgggaccacaccttttcatcttctatatggtaaagcttgtcatcttccagtggaattagagcacaaagcagcttggacagtcaagatgttgaatttcgacatcaaatcagctggagaaaggagacttattcagttgaatgagcttgatgagatacaaattcatgcctatgacaactcaaagctctacaaagaacgcacaaaagcttaccacgacaagaaaatcctcactcggacttttgagcctaaggaccaggtacttctttatgattctagattgacaatatttcttggaaaattgtcttctcgttggtcaagtccctccacagtccactcggttaggccatatggaaaaccatttgctgtgaatggacagagagtcaaacactactgggctgaagccgagattccagtagaaaagcctttggatcttcaagacccaacttttgattaagcaactacagagtcaagctattgactataaacaagcgcttagtgggaggcaacctacaagatttttattcagaaaaaaaaaaaaacgcgagagaccaagcccttcaaaggtagagggaagaaatcagagagagttggcagtcttctcattcccatatttgagcattttcgcatcagatttgagggagaagaggtcaacaccacgaggttcactatggatgagagttatcttaagaactctcactggctgaaaggcagcttcctttggtgtttcagagacgagacatggcgccatatgattcagttaccttgccccgcacttacagagattacaggcgagcatgaggagctcagttttcgtcctgatccttcccttctgcatgcagcaccacgcaccaggcgacaaagaggttcagcttcaggatttgcgcctacacagaccaaggacgagttcattgaccctgctgggggtccgacagttggatctttctcctccgctcttccatatcacctgccttctcgtcctcctatcccgatggagccacgggtctttcagcagtatgccgttgacagcttcaagagcgtctggaacgccatagttacactctctcgctgcggttgtgttgctacaactcgtcgtcgctctcccgcacccacctccggctcagagcatgaggactagccatcctccttatcttgctttgttttctgacttcgttttttctttatttcagactatttgttattttttttggacttgttgcacttattttcctatgctttgttggaactattgatgtgtgttttagtgatttaagagtttaactggaagatccatgtgaaaacactaaccaaggctctacaacaatgagctgaattcgcaaagctaagcgaaatgactagagtgttgatcgacaccactctcaggtggcaactcacgtttctctaacttttaacttttgattatttttctttcgattcctctagcttaataactctggggacaatgttatctaagtctgggggagtcagttactaacttcatcttttcttttcttttcttatgagtcagttgtgtcattctaacttagatagtcgttttattgagtcaaaacttttgtctgaaattatgatctatctctcgagtttattgcctggattgcttaagtactgcaaattcaaatcaatccgactaatggaaaatccataaagccaatcaacaaacttaaggacatccattcccaacataatccacaaaggccggagctaatctcactgctcttccttttacctcatcaaaacggttagtgtgcataggacttgactccttgttcatacctgataagtcgtctaatgtgataaaaagaaagtgttcctctcccctaataaaaaataaataaaaataattagagattgagaagactttcaaatagtgtataggggtaggaatgtttcctatgacctcattattatacattatttggaatgatcaattacaaaggttggaaaatgccgacggtgtcaatccagtatgcgagttcccctttgtttactctctaaaaagaataagtctcggggagagaaagaacaccaaagagaaaaaaatatatatataaagaatggtcgatttatcatggtatagtacaggaatgagtctagaaggttcttaaacattaacttgattgatgagacgcagcgatgatagcctagtggatatagttgagtgctttggtatggaatctaggatgttgtgtgggctagaggagaattacatggtggtcacgatttgattagaactatttagtgcgtggatttggtttgtataatcaaggtaataagctagagagattgggagtttctatgtttttcaaacctctttcacagattcaaccttttgttttgctttgggggcaagcaaaacctaagtctgggggagttgatatgtcctggtttttattgatttctaacatagtttcataatggtttttagagtctttctagtttatttcgtatgttttgagtcattccacatctaggagctatggagcacaataaggaattttggaagctgttcagcaataaagatcttgaaggacgttttccagaagatggtgtcgatcgataccacacctgtgtcgatcgacactcttattgctgccaagggtattctcgtttactgccaagtctttgagaagccttgaagtcttccttatttgcaaagtagtccctgcacgtttttagactcgaatatacctaattgtttggtcattgttagacctaagttttgttttagagattgttacacatttggatagaagaatccaatccttttagagaggattctgaactcctttacttttattcttaagtcatcaatgcaaactattcagattatgatttgtgtttctattatcatgtttgagtaatcaccttgttaggtttagggagtctcaatatggatttagatggataagtagatcgaaaaccgcttaggatcaattttagagttcttcatcttgattattcttattgctagttttagattgatcacctagaacttgatattagatgataggtatgcccgccataggtacttgttataggaactatcatagatgagcctaggcatttaagaaagaacaggtaggctcatagaagggctctggtttagatactaggtgaactaatcaagtttaataacaacgaatgctttagcataggatttctcggctcctctggttatcttagctcttagtatcgagagtttagcggaacgtcaccggttactctagaatcatagtttgagttcgagaacgatgcgataacaatcctaatattagctagatctacaatttatctatctcccgagacaattccttagacctgacgctttaatcacttgaatctacaactcgtttacttgcttatttgtcttttacattcatttactttctctagcttatttaaaaacatcatacgtctattgtgtgaacatcgagagctcaatggaattcgacccttaagtgctaacgacgatctcttatttgagggagtaagcttaaggcaatttaagtctatcccttaagttctcttttagttcaccattagactaggtgtcattttaagtctagatacttcttttctatcacctaatcatgtgtttctttgtcttttggtctcttgtgtttcaggtaccttcacattgagaattacgtttcaatggcagatttttaacctaaacgtgtattctaaacgagttcgattgttcaccttagtagataggctgatttttattacacacctataaaccaggctcatcaaataatagatccaactacagatacctatggtgggcatatctattgtctagattcaagatctagttaattactctagatctagcattaagtataatcaaagatgaagaattctacagataacctagcaaagggatctactaaaccatatgaattcctaatgagaaaccctattcctaacaagcaaactactcaaacatattgaatgaaactagaaacatgattgagttagaaagcataaacacagcaaataagataagagtaggaacggatctcttcattgtattgacaactgaatgaatctctgaatacaatggatgaatagcttatgtcttgaaaatagagattacaaagaacttgataaaagaaacttaggtctaaacaataacctctaaaactatatataagccctataaaacgtcaagggactaataatgcaaatagggaagtcttctggggcaaatttccacttctgtaaatttgaaagcgtcatggactttactgggccgaaactggtgtcgatcgacactctctctgaatccggaatccgaaatcgtccttagatcctttttccttagcttttgctccaaaatgtctcctcatctccattgttgtcccaatgcataaaatacctgaaaaggcactaaaaagactcgagaaataacataaagactcaaaatcctatacctaaaacatagataaaatcagtaaaaatagagatatatccactccccaagacttaacttttgcttgtccttaagcaaaacacaaaagccgaacccgtggaagaggttttgaaaacaaaggaactcccaacattctctagcttattgccatgatcatcaaaactaaatccacatgcctaacaagtctaatcaaatcctaaccaacatgtacttctctgcaagcttacacaacattctagatttcatacctaagtttcacaactatatccactagcctttcatcgttgtgtctcatcaaacaagctaacattcaagattcttctagacttattcttgtactataccatgataagtggaccattctgtatattttttttctttggtattctttctctccccagacttattctttttagagagtaaacaaaggggaactcgcatactggatcgacaccctcgacattttttcaacctttgtaattgatcattccaaataatgtatactaatggggtcataagaaacattcctacccctatacactatccgaaaatcctgtcaatctctcattttctttttatttttataagggaagaggaacacattctttctttatcacattggtctcaatatcaggtatgaacaatgagtcaagatctatgaatactaaccgtttgaagaggtaaaaggaagagcagtgagattagcttcagccttagtggttgtgttggatactaggatatcctcaagtctgttggtttaccatctagattttccaatagtcagattgagtagtcgaacctgcagcactcatcaatcaggcaataatcaagagaaatatagatcatgattcataactaaacaaaacaaaaggtttttgttttctttttagtttttaaggagaaaatgagtcaattaacccaaaaatgaaaaataataagaatcaaaaataaaagcaatattagtaagaacctcctccaaacttaaacgacattgtccccagtggcattcaaatccgaagaaagcgggaaaaataaaagaaaataaaagaaaggaaaagaagaatcaaaccagtgggttgcctcccactaagcgcatgttttgagtcaatagcttgactttgcggagttcatgatgtgggtggaatggtggaggattgctgctgcctccgcgccatccaaggcggtgtgtaaactgaaccagtctgggcagctgcaggtgtcgatcgacactcactggtgtgtcgatcgacactcttctcatcacctgcaagaacaacacgagaaacaagctttcgaggaactctaggcttgttaacatgtgaagcaggcttcaaagaatctaaagaattaatcgaaggtaagcgggagaaatgatagaagagaacttatcacataaggcctcaagaagtgtgggctgaagagattgtgcaaaaccctctatctgtgaatcttgagggtgtcgatcgacaagagttgtggtgtcgatcgacaccgttgatttgcaactctcattggcgagtgttgtgtgtggctctttttggggattctgagcagtatgaggaggtatgtttgtgctagaggcaatactactgatagtcttagtgaactcttaaccatccatgccaaactacatctccaaatcacaaacttttagagagtcctacctttcttcacagcaatcctagcaccagttgtagctaggaatactcttccaagaataagaggatccttgggttccttatcgtagtccaggaccacaaaattagcagggattagggagttaccaaccttaacaagaacatcctcaaaaattccttcagggattcgtttgaaatgatccgcgaagaggagagtgattctagtcggcctgtagttagtcatgcctaatctctcagcaacagacttaggcatgaggttgatacttgatcccagatcacacaaagagcggttgaacctgcttgaagagatagagcaatcaagaacgaaggtacctggatctggaagcttcttagtggtctgataaggagtgatggtgcagatgtactcagcaatgtccactctctgtgctttctctttcctgaccttaggcagcataattgcactgatgtccaatgtcagcagtttagcgtcatctgagctaataccattgtcaacaagtcgcttgacatacctgttgattggtgataagaggtctcataagcatcattaggaagagaactaaggatcttttccatgatggttgtgcacttagcagcgtgaatctcctgcttagaacgacgcttcctacgataagggacaagaggagtaagcagattcgaggtgaattgggattcgcacctcatatggtgcagtcggacccaatgtcgatcgacactctaagcaagttatgaactgaaactaacttagcattcacctctgccatctgattacctgaaacagctccatcaatcttcttcctctcaaagtcagcattcttggtgctgttactgcaagtgagattctctatcagagcggtagcattgctcgctgcatctagagccatcaggtacctccaatcaaatcttctgaaaaaggtaccaagaagttgtatctcactgaagccatgatacgggcagtcccgttgatactccttgaaacgaacccaagcggctttgaaagcctcagctggaccttgggtaaaggtagacagcttgtttttcagcgcctcaaacttagcatcatcgtaaaaattaatcaagaatgctatcttgatgcttctccaagtcttgagggaacctgctttgagttatttcagccaacaatggaataagggaagagcttgcacagtaggtagtcctctgagactccattagctttgatgctcaggacgaggtcctcaaacgctcgatatgtgttaacactatattttactcattttatacatgtatttatcatcatttagcttagtgatcactcattgtatcatatcattttgcaccattttagcttattttgcacacttaggcatctagaatcatattgcatacacattgcatgttttggtgtgttttcaggtgcagaatgagtttacaaggagtttactcgaccctctaccctatcgccccagaggggaaccagaggagcagctactcgaccagttattcattgccgcagaggggaagcagcagagcatctactcgaccagttattcattccctcagaggggaacgagaggagaagcagttattcattgccctagaggggaaccagaggagaagcagttattctattgcccaagaggggaaccagaggaagcaacatacactactcgaccccctactcgatcccctacttgatcctctactcgaccaattactcgatcaacggcaacctattctacaagacatgttgatcattccccactcaaccagacagtgagcataagaataagagaggaagaagcaactactcgaccaattgatcactcagagcatggaggcaaaggtgcagactttgcagcactctctttactcgatcttcaagatcgagcatccatccaaaccgcctcaagtctcttgtcttctagtgaatctagggtttttgagatttaagtataaataggttctttggggtttgtctaaagaaaataagcttttatctcttagtttttctttgtgttcttgaatcttaaaaccttaattactcttaatctatttcgtttttgcatttagttctttgagcaaagttgtttatcttgtttagatctacattttgatatgctttcagtaagttctgggtttttttcttagttatgttgcttgagtagtgattagggttcttgaggatttattagattaaggtaatctctagggtagtcaggtggttaagattaggttagatcccttctggattcgttggcccctatgcggttttcgctggctaatgtggaaattcgaccataggtatccagcgtccaaaagacgttgaaatggatacctgatctacgaattctagagatttgtagactctagcccaagagattggatagactgcttattgactttggtagattgttgcttaaaccctgctctgctatgtttcatcaacgagagttgagattaggaagtggtagagttatgggggtctctgtcacgagagtggattgacccggtttttgattctattgtctagggtatatgcctttcgcctattagccacctgatgaaccttagagttgcccttatcaatgaatccatccttaggacttctattgttcttagatttatttgtattcaccccctgattgcacttttattcacctgttatctgtgtcacctgttgattgcattttagttatgaaatttgtcacctattggttctactcgacccaatgattgagtagggctcttgataacacggctttttagcccgttttagctattgttttcttatgtttcagagagaatttggagccattctagagccaattaaggagaaacacctattctaggtgccaagaatgttttaatagttttgaagctaaaagtatccaaagacgatcattctagtgcttcggaagtttagcatccggccaaggttttgccggactcggcatgaagataattaggtatggatggaaatctagaagattcaagattcacgtcgaagttgaatcgaagcaatccatgaagccgttcagaagatatggcccgaagagtgaagacatgtcaagaaccggctgtttggaaataaaaagtccaaaacacatccggccgatgagacttgaactcgggcagctccgagtggctcaccaccgaccattaggtcattcccaagtctttccctttttgcgccaccgccattaggctcctttcctgaagcccactactcggcccgatcacttacttatccggcggaatgacgttcttacccctaaacctaattcttgggcctcaagtataaatacttgtccttagccctaaccctaaatgtgcctttatcaccagcgaaccctagccgtcaccaagagctgcctcttagccgtcgcacctcttgaagcttgaaaaacaccatctctctctttctctttctcgttttcgtgtaagactctttaaggtggagctttgcctcttgtattctacattcaaagaagtaatctctaaaccccttttaagtttaattcatcttttagttatggtttactcaacccaactttggattagctcctttgccatgagcgactagatctctagttgggtttgaggggggtttcaaagggaaattcatggggaccaatagatcaaagatctaggttggcggtttctatggctttgtttgatcgtttacactatttcttctagttgagtttattcttaatgcttgtatgtctggaacgccacctagtacttgcctttaggtatttcattatttggcacaatctcgtttgaatgtttgacctaactcaactgaataaagaactataaccgttgcacgcccgccgagtgatagggacttatgaactagaattgaatctgaacttaatgcctgatcttgtattttgaaactatgttagcacctactagccgacagggcaactgagtacgtaatttactagtgataatagccggttttcacctactagcagttaggattaactagttttgatagagtttcgtatgttcgggaatttggaagtaaacaaacctagccatgttatcacctagattgagatctatatcttattattgaatcgtgaacatccggagaaacccctgatgacctaacgcttctctcttatagtttatcgtttagtttagttagtagtctcttagtttagttattcgtagcatacaacaacccctctcttttattttggtcctagcttcactctctttttaaggatttctctgaactacttctctcattgtggattcgatcctaaaatacaactccgatataatgtgcacttgcagtagtcgtgtggtctttcaggtaaaagtctgaaagcgaaataaacgaaataaaacacgcatcagctcttaagttcttatttttgtggtttgaatcctgatttaggattgttactagaaacccaccatcattataatctggcttgacttagttgcttctatacacatcttgattgctagcaataacaatggactggattggcaccccttatagctgcattgatatgttagtgtttaaggggaattgaactgaaccacacttcagcacataagtaggcctgaaaaacctatttattaatttggcgccgttgccaattcattgttggattgttacattcaagatatcagaaaagttaagatcaacttcttttacattactcaagttactaactcatcttttcgtctgcttgtttttgtggtataggtactaatctttgtaaatgcaaactcggtccaaaggttctgcacacctactaccttttaaagatagaatagacagaatagctcgtgagttacaagaaaccaaagcaaaggcagcttgtgatcagcaaagaccagctgctatggatcaacagaacagaccagttgatgtttaagatccacctaatgttgaacaaccaagaaacattggcgctggtgatgtcccaagaaatcatcaccaaatacaagggatagtgccaccaccagttcagaacaacaactttgaaatcaagagtggtctcatctccaagatccaagaaaacaaattccatggtttgcctatggaagatctcctcgaccatcttgacagctttgataggccatgtggccttaccaagatcaatggagtcactgaagatatgtttaagctcacactatttcctttctccttgggagataaggcacaccactgggagaagactctgccctagactccatcaactcatgggatgattgtaagaaagcttttcttgccaagttcttctctaatgctcacacagctagattgaggaacgagatctcaggcttcacacagaaaaacaatgaaactttctgtgaagcttgggagaggtttaaaagctacaccactaagtgcccccatcacggtttcaagaaagcttcatcattgagcacactctacagaggagctttaccaaagatcagaatgctactagacactgcctcgaatggaaacttcctgaacaagaatgtcgcagaaggatgagagttagtcaaaaatctagcacaatctgatgggtgctacaatgaagactttgatcgctcagtgagatgactgagatgactgataaatgcaaatgtaagggacataccttcttgtagaagaagctcggtatggttcctgcttcctggcgttttttgttgcttctctttgtcgtacccaccaaatatctcaaacaaatccatcaacgacctctgaaaatacccttttacattcgatcctttcctgctatgacatctttatacttagaatctgacacatttgttaatgaaaactgtaaaattttttactattacctgattgaatgaagcactgcttcaatgtatgaggttagatacttcaccctcgttgtgtcttcaagagatgagctgtgcatagtcatttgacgtgtatatgaagaatcaatcaccacacagagagagagcttaaaatacatggagaagaagcaaagtaaagtctaacgagaggaagagagagagagaaagagaccattctctaggatgtagacatgaggatttccacaaaattcttcaacatacaaaagtatttgtcgcagactccatggtgaacactcgagcaactgtaacacttgcaatcatttagttttaacccttgaaaacccaaaaaggctaaaataagaaacaatgaatgaaaagacaatctaaaataggtgaaagaaaacatattaaagcccttttatgagctaaaaccacaatacattacaatgtctatgtaggatcaaaagtctctttgataaggggagtctgcgccattgtttcattaattgtttcaagcaacatagtgaaaaaatcaagtgatcatcaaacaaaacaaaaattgcatagattcatagatagtagaattctcaattgcaatttctacaatcaaactgtaaaaaaaattgcattgattcatagattctatttgatatttctacaaccaaactctataaattaattctccaaaacctgcaatctataactaagacaaaccaaacctgacaattaatttatcaaatattccttacggcataaccaacttaacaataacaacaatgataattattaacttatcttttagaccaagttttgaggatttacttaccaaagtttccaaggtaatgatctttattcccggtaacacggccaatccatgcttgccaaagtcctttttgatgatcttggcacacattggtatataagctcctgtagagaaaccgctactcttcatgtattagatcgagttttacctctagttactatcaaagacacatatttagactattaattagattctgtaaagttcttgcatttggacttacctcctgaaggaggcaatgaactcttgtttggtcatgtgcttcatttcctccaattctttccagtaattggtaatctaaaaacgcattggaatggattagtaaagagttgtataaattaaccacaaacggataaaatcataagaggattcgaaagagtgatagaagagccacacatggccaagaaaaacaacaccactcccatctgcaaaacatcatcgcttcttcattaaggtcaaggaaaaagagaaaacgatggagagaaagggagaagaagaagacttaccttgagggtggtggatggatcgccagagaagagagctctgagttgttgatgcagtgactcattgaggtaaggcatgatgagtctgagcatcctctttacatcttcctctctaactccaaccactttatgtctctccttcttcaccatttccatgcgtccattattatataccttacaaccccaatcacaaaaacaacatgcaaagatatgtaaagagaaagatagtggaattgggtcatcgtatcacacctgttgatcattgatttttatacaaacatgatgcccaaataggtgagtctcatgtacgctaccaccgatatgaagttgtgcatatacattcactttttagttctactacttagaaactaaccgtgttatctctttaatcagttgagaaaaaaacctgaaattgagatgattggcgtaggaagaagagattattaggaatgatccgaatcctaacaccacgttgaccttgatacatctctccacaataccagatccactggccatttcatttcattcaatatagttttcatagcaaattttttgtagatggaataatgcagaataaattattaaaaaatgtttctgcaatttctggggctgagtagagttgtcttgttactctgcagatctatctggaaacagtcttaaagagttagtgaaaaaaaaaaaattctcgaatcatttctagaaaaagaagaatttacattacctggattgcagactattatgaactcttccatagaaactccttattcaaagtttgataaccactcaccaaaaagcctgaacaaaatcagacaacagtaacaccaaataaataagtacactcgcatctcacaactaattcgattaagaacgaacacaataagaagaaaaaggaacaaacttgcagattgaggctttaacccaaaaattttccggcacacggatttaatcgaagctgctccttccttcccgattatgagatcccaagatattattccacccaagaaactaccatatgcatcaaccttttttgtaaaattttcatcgctcttcgctgattgagtttgaaaagggaggctgaaaaaaaaatgaaaatgaaatgagaggctaggtttttactttttagtcgttctttaacaaaacatttgacctaatggaggaggatccgcgtgtttttttttaaaaccgggtcaaagtcattttcatgtatcaatggccaggaattaaattgtcaagatccgaataaacagttaacgggtcactaatatccgcgtgtttctaaacggttttttttcatgacataaaatttttatccctatggcaaacttgttatttcagcgaaattcatgcctacctcattaaacgtacgtctaaaataatagagtagatatatataatattaagaacaaagcttatatatatatatatgttttgttcttaaaattatatatatatgtttctaaaacgtgctaggccttctttaaaaataagagaaagttctggcctaaatctccaaatcttcttaacttcattaaaacgcgtctttgaactgctgttaggtattggtgtcgatagacacctacacggtttttggtctgaggattgcttctgcagcataaattctctattttgcaccacaatgctccataagctccaaatatatcccaaacatgtaaaaacctaaaaacgactacaaaagactaaagaaataacaaatagactctaatacctatcctaaatcatactttaaaaccggtaaaactagggatatatcagttttgaatcgtgccatcgtcgggtcttgttaacgttgttacttgatcgccacgtagtgcgaagggtttgagagacggggctagctaccctggccgagttttcaacacgacggtgtagcattttggtagtgatgctacggttacgtacctttgtggtggtaacgcatgagatcacgggagtgtgtttttggtgtgggtgtttgaaggcagcatatcgggccatataacatttaataagattggagtcttaagtgaatttgcatggttttgtagttgcttcggcgaactaccttttgttgttattctctgatgcgtgctttgttttagaattacctttggcaaactaccttttgtgctttgtgttagaaactaatatctattgcaaggaatcccgagctaccttagtaatcttagattactcatgattctacttgttttgcaggaaacccattgaggggaatagagggcgtggtggacgataggaaacctggagtagatttgtgccttttgtaaaacaaatatgtttaccatggttttgggcactaggcattggccataagaactttataaatgttttggtaacatgttgtaaaatacttctacttcagaaataaatcgggtattgtacaaaattacgagtaacgactgatagtgacttagtccgagtcggcacaacacttgaatatcgtaagggttgacaaacctaaacgatatacttagtgggagagtggtcatcaatatgccggctaaggattgagattggttcctgaacctcgactaaatgttgatgattaatctcattgtggcgtcttcggcccccccgtgacttgtctggtcatagagcgactcgggggacgttacagacaatgtgtgttctttcgtcacatatggagaaggctacgattttgaaacctaaaaccaaaaaaaaaaatctaggtttaacgaaaattgtgttcattaagataaggccgaaacatgaagagatatgatttaacatgaacagagaagatgtacttgcatatcatctttatatatatatatatacatctcataacaagcatgaaattgttatcaaacaccaaattaagaaaaacaaaacagagggtaaacgacttcttacacaatctagcaaaatggatgaatgcttcaattcctttgttgatttcaaaaaagaaagaaataattaaccttctaggtattaattatttaggaatgtgcaaagaaacataaacagagaaaattaaacgaatcatatcaaagggagagaaagagtcgtacctaagcactggattagaagaagtttagaaccctaaaagtcacatagaaggagttaaataaacaacgtaaccgtcgtgtcaatatgggagagtagggtatggtttacaaatgaagtgacactaattaagccctacctcacgagaaaatcgtctggccagtccctttttgttcaaaaggaagccaataaatcctcctgaaaaacagaaataatttttgttttaatttaaatcgaaatatatggatattactagtatatccccatctgaacctaattattatccctaaaaccatggttcctttccgaaccggagcacccgaaccacctttactttttatttgaaaataaaaaaacttaaaccctaatatttccagagatttctgatcgaaatcatttttcattataaccgttatcgatttttctcccctttctccttagtaaccggtgaaattaaccgcattccctattttctttaaattcaatcgatcgttcttctccattacttgaattcccattacttccgttctatttccgattcgaaaccaagcactctcagatttcagtcggagtgatgccacttaaaacgcgtggaggaggtgaagggaaaagaaagagagaagcgccggcgaagaaggagaaagataaggtgccagtgaagaaagagaaagttaaggcgccagcgaagaaagagaaagagaagatgctggcaaagaaagtgaaagttaaggcgccggcaaagaaagagaaagagaaagtgccggctgaggagcagtcgccggctcaaacgactgcaatggcgatggacgctacggctccaacgacagcgacagacgctacggctccaacgacggctccaatgacggagagcccgatgcttgaggatgctacgttttatgatactctgaagcaaattcacgctgaagaaattcaaaagaatatgcaaattgatgaggtggaggatgagaatgaaaaagaagaagcaagtgaagaagaagaatcaaggagtagtagccaaaccttgggctccgattccgattcagaggaggcggagacaaacgaggaactcgcatgtgctaatcccgtggaagaggaggagagacaagatgacggcctaaccgccgttatcgaggaggaggaggagagtagctccacgagcgacaaggacgtcaatgtggaaaaatctgtggaggataagggagacgaggacgagagagacgaggacgtgatagtggaaaaacccgtggaggagaggaccatagaagaggacatcgcaaatgtggtaagtattccatttcgtaataccgctttaattgggtaataatgcaattgtgaaatgtagacagtactagtaacattgggaaatgcattgttgatatttaggtaatattggtggatgttgggtaatactttagagtaatactacaattgtgatttatcgatagttagtactagtaactttgagaaatactacatagttaaataggaggatctgtgtaatactggtaatttcggagaatacttctgagaaatacagagtaatactgtggcagtaagatttacaattgagtgatatatgaataggaggatctgtgtaatactggtaattacgggaaatacttttgagaaatacagagtaatactatggcagtactatttacaatgagtgatatatgaatagtaggatctatgtaatactagtaatttcagggaatacttctgagaaatacagagtaatactattgcagtactatttacaattgagtaatataggaatgaatgtttgtttctttcaggatatggaggaagcgttggcaatgcaaccactcggtgtgtacttcacggcgtcggaatataccaagaagataaagttagcgacgaggtgttatatctcggaagtgttgaagacctacgctgacttgaaacatgctctaacggatagcgagaagaattattttaaggagcatccgagtttcaagcacatctaccatttgtcatccggatatacccacaagttaatagggatgtggatgctttttttcgaacggcatctattgagaagaagaaggaggtggttcgttgttaatggagttcccatccgctatggtattagggagcatgctttgatgtctggttttaactgcaaggcctattcagctaattatcagaagctggtagtatgaacttcgccaacaggtacttcaaaatcggggtaattacacgtgaagacgtgagaaccaagctaatggagatggaaccggctagatctaagaataggttgcggatgcggtcctctatttttaacaagcatcattcccgtgcctactaagaccggggaaagggctagtccaattgatgattctgtgttgggactgctagtgatcttacgttttgtaagacatttccatgggggagatattcttttgagtacatgttaaaatcgatctcacacacattgaatcattttaacgatgtcgtcccgaacactcagtcaccatggcctgttcccggattcagtgtgccgcttgaggtaaggaaatcacatgttttatcattgttacattttcgtaattcaagctaacaattaaatttgcatgtattttgtgtagtttttagcatttgaggccattccatcatttagggaagattcatagaagaaaaagagggtgtagatgccggttgtccaaggatgtgcaaggtgaatttcaagaggaccgagatgaaagggtttacccttgagcaaatcaaccatgtactgggaacaactgaggttggtatttcctattattccttgagcaaatatgattttatttatttctaatatttattgtttattatttccataggtcattgagagtataattaaagagaatgatgaaaaagtacctcttttggctcaaatcaccggagaagaggatgatgttgataagcacgatgtcattgttgatagttggatgaagcgtcttggtcaatggcgtgaaattagatttgaggaggtgtacaacgaggatgtgcaggcacgaatggaagccccaaatgaagaggaagttcccacagctgttggaccgggagacccgatgttagttgatgtaatggagaagcttcatgccatcaatgacaagctgaatgaagctttgttggcgcttatggaaatggaggaaaaacaagcaactttcaaaacatttatggatgagatgaaagccaaggtaaatttgggtgataccggatatactgtaccataattggtaatatcgcgtaataccagggtttaactaaattaacaatgcagatgtctcagaacccaccagatgaggaggatgcaacaaccaaggacaagctggctgctcctgttgtacccaaatgagtgacccgttcaacccgtgcaagctctagtaacgtgtgaaaactattcgtgtaacttctccggatttgtattttgatttcttgtactttgactttgttttcagatttcgcaagtactcgtaaaacgatgtttggatttaattaatgtattaggatgttttatgatatttattcttactgaaatacgggaaatacctcgtgctactactactaagatattgaattttactgaaatacgggaaatacctcgggctactacgactaagagatatactggaaatacaacaggctactacgactaagagatatactggaaatataacaaccatagtattaccaatcatagagaagtcttacaatcgaagggaaagtcttacaaagcatacggaaagtcttacaaagcatagggaaagtcttacaaggaaattaacaataagattaaggaacaataggttaacacattacttctttggaaccataggattacggaataccactttgctcacgttcacaatctctgcacggtgggcttttaatcctttttgcatttcttctatgagatactcatgacttagaactttcttccgattgtaatcaacactctcccttaagctactcacctcttcttccatagcctcatcccaaagtttacggatgtgcattaaatcatttctatcatcctacaaagtaccaaatatttatgaaaaatagatctagatctacaaaaactagaaaaacttgtgcagtattacttgttctaggcagtattaccaaaacggaaaatactttgaaataccaaatagatctagatctagatctacaaaaactagaaaaacttgtgctctacatcaacataccttaaacttctcgcattaatagtttctcttttcatcctttcaagtgtcgacaatgctaccaccacatggacaaaacttaggaatcccttccatcatcgcaaccttttccatttgctcaatggctctcttggccgctttcaaatcatcgtagtaggggtctctctcacactctctatccatggtagaaagatgaaagaaagatgagagatgtgagagaattcgagaagagagatgagagatgtgggagaagagagatgagagatgaaagaaaaagagaaaagaagatgaaagatgaaagatgaaagatgtaagaatagatcgaaaaagaaagaggaaaaagaaaaaattgaaatttttggttttggagagaatctcaaaaattgttaggcgccaaaaattttgggggaaaaccaaaaaatttaattctccacatgtgcgccatttttttggagattttttacatgtgcgcagcctttttatagcatagtatttcctaaggttttggtaatgccaatttctcaaataatattactttccatgtttttcatgtttagtagtatttcttatatttacaatttgtttatttagtagtacactggataaactttataaatatagaggtttaaatgttttgtgcaattataaattaaatatatatagcaatatgaattttttatttaaagttggtgttaatattaaaagtgagcttaaaagtatatgggatatgttgtattgagtctactaaagagaagttaaaacgatttaatattaaaatttctaacttaattaagtataaatgattaataatacatttttatctgttaataacccactgtattcatttttttttagttttgaggtaaacaaattcgaactccataatacaaacttagtattaccggttgtactaatatgaccaaaaatttgacaaaaacagacatgatattatttgttataactagtattacaaaaaaacaatagaaatagacatagtattacagaaggggaaatacagtattacatagtatgtccatacaatcaaaacaacaaatcactgtagaaacaaagtaaaatactcagataggcgtattcccaaataataattgttgacacgattgccttggacgccttttgttttgcgtcctttctcgttttggccgcttttccccggttgatggaaatcttagcatttttttccttcccttcttcggttttttagacaacgaaactatcttcaacgcctttacttcatctgatacttctcattgcgacctatccggaacaaaataaatagtcctataataggtcaatgcccacaattccgcccaataatattttgtaaccaaatcatgtaactccaaacctcttctccgatcttcatcatccataatgctaatgaaagcggctaatgcatgaatacaaggatatttttggatatcgaacaccttgcaactgcaagttttcaaaagcaagctcaccgtataatctattcctttctcgcatgtgattacatattcacgctcgaatgagtttagctccaccattttcagcttctcggcaaaaacccacaaatcatgcaaataattctccaccaaaggcaccatcttattttcaaaggatccagacgcggcttccatccgatgttcattaaaccaaacggaaattttttgatgatcgcatcaagcattggtattaacgagtatttccttgcgttgcgaaacacattgttcaaagattccacacaattgcttgtgtctaagttgtatctttctccggggaaacaactccttgcccatttttctttcacggttgtatcctccaaatacttggtcgccttaggatatctcaacttaaactcatcatacgcccggttgaagtccgccacgacgtagacccgacttaactcctgaaacttccatgcgagtacgtctctgttggtgttagtagcatgacctttcacattttgggacaaatgccaaatacaatacccttgatgagccgcggtatacacgttccgtatggcctttagcttctcgaaaaaccaatcccaactagcatcattctcactgtcgagtacggcaaacgctatgatgtaatggtgacggttagggtcttgagccgaggcaaacactagcaccatgccatatccgttcttcaaatgtgttgcatccacaattaaaactttcctcatcactctaaagccttcaatgctagctcccaaagctacgaatacgtactgaaatttatcattctcatccaatttcagataagtaaatgtaccatcatttaccttcttcaacatatacaaataacaattaatatccttgtatctttcttccgggctaccttttaagtcataaatcgcatgatatttcccccttagcgttgtcgagtatgatactttcacacctaatttcgtctgaactagctccatgataatccttggaaccggagtttccaactgtcccggaaaatgatcatgaaggagaggtgcgactaattatgggttgcctttcctttttctgagcctactactacctttacttagccgagtgcaactatgcatcttattgtaccttctaatcgagaatatatcagtattactgatatttgacgctcgtaaacgccaagaacaactttctttggcacacttaaggacatagcgctccttatccgacttcttaatcacataaccaaaactgttagcaaatgcagctctacccaccacctcgtgcaatgccgccttgtttgaaaattcttgacgtaaggtcaacccaattccgtcttcccattcttttttaaacataccaggttctacagcaggtggcgactcaacatactgttcccccctatcagaattatccatagactcatcatagcgtgtttcatcttcttgagtctcgtgatcctcctccactattgccacaagttgttgttgagttcctttttcctcttctaataagacgatgagtgcaccatcatccactctcatttcatcgtcctctgaatttaactccgtatagttcttaccaacataacttttaccaactctagacaattgctcggacaattgctcaagcggtttagagatctcctccacaaccaaaacacttctccggttattttttgcggatgttacataaataaagacatcctcatcatcacaaacgttcatctcttcctctactccgaacaaccatggattgtacctcatatgcaattaaccttatttgcatctaatccaagcttcgtcaatatcctatcttctaacattgaaagagttatcttctcccctaatgtcttcatcatcacattatacatgtgaccttcgaatttaaaatatatgatcacgttctctttcattgtaacctgccaaaacaatacacatactcagtcaatattactagtaataccgattctactacattttcagttttactagtactaattccgaaatattacatgtgtgagtaatactattacatatatgaaatactacgtgtctaagtaatactggtgctattaaaacatactatctatataaattacggtacaagttgtaccgtacaactatacctagttcgaccagtattattttcgcgacaagaacaaatattcgatttgagttcaatttagtatgaatcagtatgtgaaatcaattgcttatccattaacagaccaaattgagcctaaatctatacttaaacttctaatgtaggtgctagaacacaataacccaaatctaattggattgaatctcaaaatcctcaaaatttgtaaattcaaagagaaatcttttagattgttctaaatacatacttggacttcaatgctcgacgcagctcgtaggaagaaaataaatgacaacaatgtagagctcgtcgacggtggaggagctcgtcggaagagcgtcggggaaaaaagaggtaggtgacgaattctttttttttcttgttttcttctttattttctgtttttaattttatttcatttttgaatttcctttaatcctgataagggcaaaatggtctaaacacatttcattaaagaaaaagggatatgtagtagaaaaggattttagaggtttgtggtgtcacaaaggggacatgagagatgatcattcgacctcacgtgcaacacacgtattttgttttaaattcaagagaccgttacaggtagtaataggatttcctgaaaaaatgggatatccggttcagatccggattatagggttaaaatttcaaatgacagcaagatatacaaaccaaaagacgtaaacacataggacgattggtagcgattagtagttttggctttaaagacttcgacttttaaaatttgagctatagaaaatttggttgtaaagacttttgctgtagaaactttagatataaaaatttaattggtaaaacaaagttgtagaagctatgactgttatattattattattattattattattataaattaatattaataataaataaaaacaatgttagaaataattttatgtaacaataaaattttataatgataaaaagttagaaaatacaaaaattcataaagaaatggatacataaatattctgaagaaataaactagatatatattattcattcattttttaataaccaaacattgcattacgaaggtgctttttaaaaatcaaattattaaataataaatctttatttaaaataaatgacaaatatctagaaaacaaattctaagtaaacaaatttatttacattttttgtttcatgccaaaatttaatatctaaacacattaataagtggggataatgatgaagcaattaatgaactaattgaatgacatatgtgaaatgtatagtatttgaaaaatactaatttttgtttgttcaccaaaaaataactaattcaataacgcttttacatccaattaatggtgatgatgaaaaatgaaataattcctagtgaaatggattttagaagaaagattaaaaaatgataataattaatttattaaaaatattttgtgaaaaaatatatgtaaactggtacaaagttgttaattattttggggagaagaaaaaaaaaatttaataattaatttggagaaaagaaaagaaaaactttgaaatccttgtttatgagaccatgtatgctaaacacataaaactagggtgagccgtatcagtttattgagacttttgatacccagtatcaatttaggtggcaggccatgatttgtcgcattaattgttttggtaaaaaaaataaaaaaaaaataaaaaaaaaattattttgtttctttcaaaattttctctttcgctcttacggcgatctgacgatttcttctcatcttttctcagctacagccggtatgacgtagatctccgtctatctagaacattttttttagtttttttgaattttatgttttattttgcttaagtatattctacatttttttaattgtaatattatcttttgtaatcctgtgttttaatatattaatttttgattttgtaacaaaaaatcttatgatacttaaaccggtctaaccaatgcagacatatttagtaggagtatcataacaaatttcaaacaataaacaaacattataaataatactaaaaaaattccttatgattctatatgaggctttaaaacataaggaaaaataaaaaaaactttgagaacttacaaaaaaataaagtaaaaaaagcctaattggcaaaaaaaaaaatcctgttaggactttagatcacttttaaagtcttgaaagttagtagccttaggccaactccaatggggagttctctggtgcatttgtatgggttcccttgttaaagttacaaaaaaataaatctaaactgaaaataaatgagagagccagctctctaaagagagtttttagaatttgagagagccgcctaaatgtcaccatctgattggtcgtgcatttttaacaaaaaaagaaagaaagaaggagagttaaatatttttctttgcccgatattttcgctctctctctcgcgattttcttcaaattctaatttcatcaagattttgttaaaaaaacgagttagggctattacgttcatcgtataatgcgttaagactgatttgggtttgctaaagatggttttatggctgcaaatgtctgatgttgctgagcgcccacaagatgctcgatgaaatgccaaagagagaggttgattgctaaattgcattttttcagttctgaatgatttctattgtttgtgttctgttatgttaatgtttgaatcatttcatctctgaatgataaatgcttgctttggttcatctctgtcatgttaatacaagtgttgttctgtgtataggcttgaatcggaagcaaataggtctgttaattcattatgctcagctaaaaggccaaaaggatgaaagctttgagatgcaagtgtgaagattcattggagtttatgtgtttagtttttctagtgtgtgagttttgagagtgtggagtatgtcacgatttgagagccaaatgtaccccaaacacttttacacattttttcaaaaatttaaatagccaaatgtatcccaaacacttttacacatttttcaaaaatttaaacctttgaccattggagaatgttggtggtcatgtgaaattattttacatagtgtggtaattattttaatggctatacatgaggtcaaaggatgatggaacatgatattgaaggacaattcaaagtttctataatacacatgtacgaaggtatacattattcacagaggccaagttttgataatacacatgtacttctacgattcttattgctaccaaaaatgagctccttccaatacgattaatgataaaatgttcttagcatcagattttgtttttaacaaaaattagttccttccaatacacataaatttaataagtgttttaataacatttaaattaaccaaccaaacaaaatattcacttgtcgttattcgcttcgcaacaatcaacgaaactaatgatcgttatttgttttctttcacatatattttaaaatatttgaaaataaagtatatttaatattttatgatttacaataattgttaaattttataaaataaaataatttttaattattttttttcagagaacccatataagagagactaccattggagtatgaaaaactaaaaacaaaaaaatcaaaagctctcttgtaacatttttgaaatttaatcataaaaaatggaaagaccattgagggactctctccattggatatgctctagagctgtatggaaggactcatatgatttcgattagcatgggaagaacatcgattttaattcgcgctatagggtcacgaaacaaattacaagatctagatgatggtgaaagttatcttacaacaccgagagaggccacatcgagaagaaacaatgaagatcagaggcgaaaccgtgaaagagtctttgtgatccagagatttaaataagttgtttctgcaagtttcttacaaataaatcaaaatcattgaatgattgaccttgtcacaatgtcaatacttatggcttctataagacttagttacataataagcaaaataaacatatattgatatgcttagccggatagccaaaaaataaaagaagtgacgtgaccataatcacaggctctcaatgtaactagaacatagtaaacgatagaaatattaaaactattaaacacaactacactaaaaaaacattgatcataagcatttagataaagcatgcatggagcttctagtgaacttagtaggaagcgatatccaacaatagctttaacctgcattcttttttaagaaaatttcacgttataacacccttgtgactttttctttcacaaatagacaaagtgggctgggtcaaccacgttttagccattaggcccaaaatggccgaatttgccctccaacgagaaactgacggaggcggtttcgtttcgtggaaccggttcactttccttaaccgttttctggtttcaaaataatttaaatatttaaaattattaattttaaaactgaaaataaatcaaaaactgtcttcttcgagaaagcagaacagttccgtcgaaacgaagagtggtttcgaagaaccagaaaaattccgacaaaactgaatcacaattccgattgaggctctgttcgagttctagtcgttgctaaagtggagaaaatttcgatagggttcgtgttaaagtgtggaacaataatacgctttttgggtttatcgattaactgttcatagaagagctctaatggcggcgacgaggaagagtagtcggcggcgaggagtttcggatattgatgaggcatcggcggcgacgacaaatctgggttagttttccctaacttcgtttggagaatgattgattcaaaatctaggttaattttagagatttcaactcataaattttcaattgacaaagggattttgtttttttccgccaaaaacagttgattgagtataaaaggtttcggtgtacgtgtatatgaaaatcgagtttatgtttagttggtatttggatatagtgtacgtgttaagaacttcttcgtcttgctcaactttcaggaagtacttctaatgatccgggtgaattaccacagaggttgtttgcactcgatcactaccctagcaaggcgaagataaatgcgtactccagagcggagtacattggtcaaatagcagctgcgcttaaggacacaccagaaatgacgttccttctagattctccatttggtgacctctttaggatccctactaacaaggcatccttttctggtaaacttgttcttggattaatatgccgtcagttagttacaaataaacgttatgagatgtggatggtattcgctggtcatcctattaggctcggattaagagaatgggcacttataactggtttggaatgtggaacctatcctaaagataaggatgtagaaagtgttatgcagcgtgaggaaggtgaaaatacagtgtgggctactctgtttggagatgataaagctaagccaacagttgaagaattaagggatagattgatttctgaaactgacatgcctgcatggaagaaattagctctcgccctaattatcattgtggatggtgtgctaatatgtgacaagtctcctcctttgagaccaaatgagatgacagttgagctgacgaagaaccttgatttcttctgtaaatatccctggggaaggacatcatttctgcttactttggagcgtatcgcaagtttcaaaggagacaccgacgttaaaaaactccggagtggttgcaagcaacattcttatgcactccatggcttcccacttggactccaactccttgcattcgcaactataccgtctattgctagtctcctaccttctgaaggagataccgccgtgtttacagagaggactattaaaaacctttccaaattgcgtccaatcaagacatccaccatattggcgtgcgagtctgctgaacaggtttgtgcagttgttgttgtacgtacattggtataaaaaaatgaagtacatacactctgaaattaacaatgatcgtctatgtaggtggatatcacatatattgtggacccagcagacagtaattgcccaaaatcttttgtatggaggaaagaaaaagaggacccaagagttgataacattttaaggatgttgaaatctgagcaggagtggaataaaaaaatgtgggttggaggcgatgatgcgcctaagaagcaagtccggccctcagcaactggagagagaggtaaccatatcttttcatcgtataacttatatcagaattaggttcctctaagagtagtaatgcatgatttaaccgtttaatatagttattttgaagaggcaaagacgggtgtcagatcctgttgaaaacaaaaaaaggaaaattagtcactctgatgatggtgaaggtggacccagtggtggtgatggtgaaggtggaccaagtggtggtgatggtgaaggtggaccaagtggtggtgatggtgaaggtggaccaagtggtggtgatggtgaaggtggacccaatggtgctgatggtgaaggtggacccaatggtgctgatggtgaagttggagacgaagcgttcgataagtatgcgggcgaattgaggagtttcttcaagaggcaaacacaacttttggataaaaagtttgaagatttaaaagtatttgtccgtgaagagatacgtgctgctctacagtcccaggaccgaaaggaagaaggcccacgatcatctcacaaatctgattcaccatctgagaaggttgagagggtgaccaaaactgttgagaaggtgaacaaaagggttgagaaggcgaacaaaagagttgagaaggcagctgaacaggtacagagaaaatctgtaaagaaatccaccaaaccaagaaaatttgttccaagaagatcttccaggttgaacaatactcccaagaaggctgcaactggtagtcttcctgtcgaggtacgtctacagcatgtaccttgtgtaaatacaatcgaaaaaaggtttttattatgtgtacgtacaaccaaatacttaggaatgcgttattggtgtttattcacaggaggtaccaggcaatgatggggatggcgaagtttcagcaaaacagaccgtctctgactatgatatggaaaacatatatttgggtggagcatcatcaactgaagaggtaactcacttgtgtaatagtcatgttataatttatgccttattatacgtacaaaaagaaatattactgaccaattgtatggttttgatttcgaaggaggaaggagggaactcggagattgaagaagattcttcaaagttacaccaaaatgtatctgactctgtaatggaagacaatgtcgatcgtgttccatcaccatctcaccaggtaacttgtgttcttattatttcattattgtatgtacaaaatattttatgttcttaatgttcttacttttgacataacagcccgaacatggcattcctgatggtggtaactttgaacaactcttgcctgacccaatactgtctgacccagcccttgagaaaatgtcagatgatgtatcttcctcgtcccatcaggtacagggtacgtactactaatttttgtgtacgtacatattatttctaatttgtatgctttgcatttgtataggacgttcagaaaggacttggtggaaatcctgaagaagaagttgttgctcctgagtcacaacagttggaggagccacaatcaccggaggtcaaggttaggcaagaatttgcttttgaagttacagaagatggcaatcccagtgtacgtacaatgtttttgaaatctgtttcgcacctttgaatgttttgctgtgagtttgactaatacaatggccatccatctccatataatgaggtcaggctgaaacaatttgtggggaaggagaggaagctttgaaggaggataaatctccaaccgttgtagatgaagccttggaggtatgtgttactattttgctctttgtaacgcttatttgccaattagagatataaccaattatttggttactaaatatgaaggacactgcgttacctgaagcgaatctcagtgacccgtcttcaccaaccgtagttgttagcaaggtaagttcctaactaactataacattaaagtcggagatatcatttgatgtttgttatattgttttcattaggtgcttactcaattgaaggacgatattctcgcagaaaatgtatctaaaattcctgagaaggttgccgtccctgaagaggtaatttattagctaactattaataacattactgtcggagttataatttgaagtttgttaaattgttttcattaggtgcttactcaattgaaagacgatgttctcgaagaaaaagtatctgaaaaggttgccatccccgaagaggtcagtatattatcccgtgtacctattaatatttcaactagacgggcatatagtgtacgtactcttgtagctgtttccatgaccaatctaattatatgattttgtgcttgctgacaggaaaggaggacgatgttgtcgaagcgggtgtctctaaaactgaagcaatcgttgctcccgtcaatgagaaagagaagaaaagtgtaagacggagagttaccttctccgatgacaccaaaaatgatgataaaaaagatcctgatgtaacatttgttgaggagagagaggcaggcccggaggttttggttaaggctggcgattcgttgtacaatcctttggagaaggttgacgaagctaaattccagaaattatgtactataactcaaggagaaaaaaggtatgcatctgtgcattcacacaattatctgattgtttgtcaatcttatatcaatcctaactatttcatatgtcttactaatttcaggtgccatactcttttcggctttcggaaagtggacaacgaattcttcactactctagccgaggctaatgattgggttggctcatacgtaagtgaccattaattacgtacactgttgtaattgtacgtatatgtaataatatgtttttgaaagtacgtacataacatcatacttttatgtacttttcagcacatggaaatgatggcactcttgatgtggcataagaacggggagcatatgaagagaaatcggtatgtcgttgtggatcccagactcactttccttctgtcaagctgtgccaatgcattcagatcctgtcgtaaacccgacactttcaaatgggataaacttctcacacggttttccaagggagaatgccttaatcgtgaaccacagctgcattggatcagagatgtggacatcatatttgttcccatgaactggaaagctgagaagcattgggttgggttagctatatgcctgcaacgtcgtgttattgaaatcatggatcctttgcgttcgcttacgcgggagtctgtggttaggtcacgtatccttccaataatggagatgctaccgtacctagtcagagcgacatgcaaagattatctcgataagccttatcccgtgactccttttacatacataaggaatcaacgtctaccacagaatccaactaccggagattgcggtccgtacgcgatgaagtttattgagttgtacatgcttaacactcctgttgaggacaggttttcgattgaagaagatgatatgtacaacttccgtaagggttacgcagtcgagctctacgagcatggaattgggccattaacctagttattcgaagttgcaactgaagcaaacttatgtgttttgtatgccttttggaacttgtgttttgttgtgtttacatttacttgtttgttttctaaacaatttattacttttgtatgctatgcaacattttatgtagtaattaacaacgtacaaaaacaagatatctgaccaaagtacgtacaaactacgtgtccacgtgtacacattacacgactgttgtgtatacaagcggtaccattgatttgacatccatcaatgtaaaattaaatttgtcattcaatgtaactgtaatttccccaacaatatctccatccgtggttattaaatgagaggaagaatttgacctcttcggagtatctcatttctaagatggtcaatcccactatttcagacgacttgctcactatgatagctaagaaagtggcagacaaaagctggttggaccttaagccactgatacgatccggcactcgtggaagagacattgtctaccgaccggatgtccttaaagacgctaacatctacagcttgtgccgtgttcccgatgatttccaagtaggaggtggccataatccaaccggaccccaaggagaaggccgcaatcgactatttttcaaaaggtgccttctcgctaacaatccgacggctgtgtataacgaagcaatacatgttctaattcatgaaactgacatcaatggagcacttaagctcatgcagcgtcatgcacccgtccgagcagatgcaaccatcgcctgcgccatcatattcatatgtgcggggtatgattatatgggtgggttgtttctggacctctacacacgcaaccatcatccattggattccgatttcacacgagatttgtgtgaggagttcttcgaggagataaacaagtttaacccgccgtacaataatacttacgctcgttcgttctgttatcccagcagccatggaattaaaatgccacaatgcgcctaccattgtttcatggtttctggtgcataccagaacgtttgcaacaagtgttacctatggtcgtgtgctaggcgaattagccgaattctctaggtctctcatttgtacgtgtgtttggtgtacgtacactgtcacgtgtttcaagtttgttaggggtttggtcctatgtattttgtttttgcttcatccacaatgcgcctattatgttgttttgtttccgtttcctttaaattcctatttacaacttctgtgtctttttcatgcggtttggttctatctgtcatgaataatatatttctgttgtcaaactaaactggtaggtgtacttgcattctaacaagtacttacattataacaagtacttatattctaactataaatgtaatagtaaatgtaaggatatatgtcagtgaattgaataagaatgtcagtcttattcaattgacgtgccaggcgttaattaataaatacactcccacttgtcataattgcaagaacttcagtcttattggaaatatacgtacacgtgtaactccttattagacgtacatatatcaattatttaatataaatttccttcggattagaccgcaaatatgagaattatatatgtacgtacactgttactctatacgtacacgtgtaactccttattagacgtacatatatcaattatttaatataaatttccttcggattagaccgcaaatatgagaattatatatgtacgtacactgttactctatacgtacacgtgtaactccttattagacgtacatatatcaattatttaatataaatttccttcggattagaccgcaaatatgagaattataaatgtacgtacactgttactctatacgtacatttattggcaaatttattgtaaacgctatctccccatccgttaccctccctcctcggttattaaaaggacaatgatctgacctcttcggagtatctcatttctaacatggtcaacccaactattcctgacgatttactcgcaaagattgctaagacagtggcgcacaaatgctggtgggaccttcagccactactacggtcaggcagacgtggcagagatgttgtttaccgtccggatgtcctgaaaggtgctaatatttttagcatgtgtgaggatcccgacgactaccaagttgatggcagccatcatccatccggcccacaagaagaaggccgacatcgagcctttttcaaaaggtgtgtggatgctggcaatccgactaccatgtattttgaagctctttgtgttttaacgcatgaacgtgacattaagggagccatcaacctcttacgacctcatgttccatcacaagcccatgctacacttgcttgtgcgatactttacataattgacgggaatgattacatgggagccatttttctaaacctatttggacgcaatcattatcctttggggacagaagagacacgggatttgtgtgaggagttcctggaggatttaaagaagtttcgccctccatataataatacttacggatcgacgttctcttatcctaacagccatggtattaaaactccagattgcgccttgctttgctacattgtatctggaccgttcaagaacgtgtgtaactgttgttacctctggtggtgtgctaggcgagttagccaaatgctctagtcatataaatctactagttatttgaagttgttatttaatgttatcgtctaagttatgttcctagttcttctaatgccgttatgtttctatttcgttttatcctctatgcgtgaagttgttcaagttcttgtaatgcttctataaagttatgtttcaatttgtgcttaacctctggtttacaaggtttatcggtttaagggtttattcggatgtaagcaataaatttgaagtttcgtaatccatacttctttctgtacttacattataactttaaagttactataaatgtaggaataaacctgattggattgacgcaaaaagacagttttgtgatagacgtggccaggcataaaaaatacaaatttcaatatagacgtacacgtgtaaatctgaacgtacataaaccaataaactcaaaaattgtaatttgaagtttcggttttaatcggaaatagtttatagtttactattttcatgtaaacacgagttaatgtccaatattaataccacctacaatatgtaagtgggacgtgaaacatttaattagttgtctcctcgccattaggtctatataacatgtactcctcgacaagtcatcttctccacacttttcattgctcttactacgccatatataacctaaactcacaaataaatccctcagtctcggcaatggacgtccccacacccccaccggcggaaatttacctcgccattcagctacctaacccactcagcatcctcgtcaactacttacccgtttccgtaactcccattgaaacactcagaggtctcgttagcacgctggagccgaccgctatcaacatggatgagtttatgacgtggcctgatttcgtgttgccggaaacacctttccgaacatatttcaccctcctgcttgaacgtggagcaaggccggcgatttaccttgaaggggttcgtttagcttgcaatttcattacggttgctcatggtttaaccatgttgagttctatctcgcccatcgacgcttacgcatgtttctctcatggtctgttcctcaccgcaactggcaacggacgagaggttgaagccgtgaacgcgactttctgggatttagtgccatcattcgaagctgcaaacacagtgggggagttggttatgtatcacataagtcgactgcatgctgaaggaactcgtttgtggaatcgttcatggaggttcgtggtttcaccagactgcttgggtcgttgcagctacggagcctgctgccgcaattgcttcttctactggtatgctagggagttgtgcatattttattaaggaaaggcgttcgttcagcatctgatttcccattctatgcatcggctataatttcgcgttgtttgtaaagcatatgttttcctgttatatgcttcggctttattaacatggttgtatgctctactcggtttgttgttatgctttgtatttcctactcttattttaacgtttttttatttccttgttttattgtttatcttatgaatggaactaagtttgtttacattatacatatagtacacctatttgaacgtaccaaaacataattgtacgtccatggaaagtcattacaattaggctgtatttgtaataagtaaactgtagcaattagaaggtaaaactttagcataaaagtagggatatgtttaaattcggttacaaatctgtagttatttagaataaaagaaacaataattaactaatagaccacgactctgatttcttccacttccggtatatccggattagcaatgactttggagatggggccattggtcacagccttcagtttatgaatcccggttagacgccaggatacgagtgcgataatgttttgaggaccagttagccgctggaagaatctttgaaattcgaaagcttgggcattttgtgcttcacattgaagaacttccttgctacagagaatatatattatacacaggatataacaaacctaaaccctaaataattaaaaataaacaacttattgtttatccattatcttaaaaggaagcttccgtccacggtagtcttcggtcaagttgccaacctcaatgagcacaccaataacatctagtgtacgtaatggaagataaaagcattatgtgtacgtacatatttacaaaaatgaatagacagtcaaatatactaaccgactaacactccggtagaaactgtcctctcgatgatgtagtcaaaaggagtaaaatcataatacggtattgcaggcaatcccgatactttggtaacaatggtctgatccataaaacagatccggtagtcatgggacgttgcgtgtattccctcgttgtggagacgaactgagaaagtattaataactatccactcattttctcggatacggtcagagtaaaatgaagcaaggcgacgattaatggtagcctctatgcgggaacgcattccctacaacaaatcatcatgattagggacatgtacggtatgtgaaagtaaaaacgttagaaagacgttgacgaaatattactcgattatctgccaagatgagacccaggtcgaactcatttatgcccacgcatttttgaaacaccctgaccacaaaagcgcgtatactccatcctgtgatcatgggacaaagttcggaaatggcatgatatccatcatccatgatgacaacaacaaaaaccaaaatgaccgactttctgtcttatgtgtgtgatgggtgtggaattttgtttaaatgaattaagggtgttatcaccagtttcttaaatagattttagaaagacgcgatgattggtcccaaattgatgtaacagtatagcaaaaaaatgtaaccgtcaactctgtataattagaagtacccaatatacgtacaaatgaaaacgtttaccaaaagtacgtacagaaaacaacgggattgacaaaaagttgaaggataatcaaatacaccgataatacgaggtccacttacgtacgtacataaggtaacgtacagacaaaataatatgtcatattactacatagactgatcaaaagatttccaaaaacgtacgtagaacagcttccaaaagcacggagacgtaaactctaaccatcgcgaggcctaaatagggtttttgcatgtcttcttgttatgccccgtttgccgacatcttgtacactgattaggaatgagtcttttctgcctctttttctgaaagttaaaaaatggtaaggcgcctaaaaggaaggaaaaattgcatagaagtgaggatgggggaaaatcttacccggttttccccagtagatggtatcctcttggtgggtggtctcccaggtggtcctctgctgcgtggaggtatgagaatcatgtccgataactcttgaggaataacaacgtcttttgggtccggtataggtaaaacgggttcttggaaagaatcagaaaacacttgaaggctataccacaatccaacaacagccttcgggttgatgccaaaatgtattgcagcagctagagcatgctcgcatgggattcttaaaattgtgtacctaagacaagtacacgtacactcatctaggacaacgtgaaaatgctcaccagtctttgaagtaacttgataactccaaggcccagacatcatgactgagaactttcctgacgcaggcaagtcttgaaggaaacgttcatctacctccggggtgaccaaagagttacacttcgacacttttttctgccttgctgcaaaccatcgcatgatgacctctcggatgaactctagcatatagacaattggataggcttttgccttgcttaagacattgttcattgcctcggagttgttgctcgtcatgatattgtaccgctcccctttgcagtatgccctagtccaatgctcaaatccaacatcctctaaatactttgcgcatccggggctccgacctcttaactcttcaaagtatttttcaaaatctctaacccgatacactttagcggcgctaaagaataaaccagacacaccgtaccttgcgtaagacaccgatatgtttcgctccaggtgtactatacatgctccatgattggctttcgggtacaccacactaacgcctttatatatggaagaatgcctgtccgagacaatcatcaaatcgtcagtatctggaacaatctctgataatttctcaaagaaccaaatccatgaagcatcggtctcgccgtcaacaaccccaaaagctaatggaaaaatttggaagttcccgtcttgtgcacatgctataaggaggcatcctttgtaacgaccgactagctgcgttccgtctacaacaatgactttcctcatatatttccaaccttttatagacgccgagagagaaacgaatacatatttgaagcgctggcgacctttatcttcaggagtggagtggagatgacagattgtaccgggatttgctaattgtaaaagatacagatatgtaggtaaaaacctgtaactagccatatcatcaccccttatagagtttactgcaacctctctagctctccatgctgaagaatatgagatccgaacgttaaggtcatttaagaccaatcgaggcaaatctacagctctaggacccccttgcgaagaactatatctattcttcataacctcgcctaaaagcttgtaagttgcatgtttacgataatcctttcgagtgtcgatcttgcaaacatggatggaatcataccctgtgattttgaaacatttggaattgggtatgacatgtgcagtcaaatgccacgaacaattgcgatctacgcagaacatctctaatcttttagggcatgaccgagtttgtttgtagcggaagcactttttgattgcaacaagtcgcatggtctgctgtatgacttgcttgtttttgaaaacacttcccacatacaacggatgacctgacgtactcaattcaacttctgtcacatcgactcgaacattggctaaatcatcgaatacaggatccgcatcagtatcgagcaactcattctcagcattatgcaatgtagaaaaccctttatacacttcgtaggcttcacctgttgtcactagaccgtcatcagattcaatatttaacccacttgcagaaaccccttctaggacgactataccatcatctccagttacgttctcagctatatcatccgtgtgctcaactaattcaccttcgcatcttgtctcctctgcacagactctagtgtacgtacattggtacaaaccatgttgacacgtcggggatggagcagaggttggtgtacagtcaaccaaaacaccagtgggttctacatgaggtacatgtgtacccgtcgacgtacacgatgccaatagacgagtgaattcccctgggggttccacggtatgttgagtgtcattcacgacgccctcctcaacatgaccatttccatattgttccacaatcatgtcaccccatttattgtaatcgtattcttcgctactaccttcactaaagtctactgtagggtcgagtgtacttccacggctttcaccatcggtgtcatcgtcatgtacatccatatcttcgtcctcttcgttatcctcgtcctcatgttcatcctcatcaccttcatctatgtcatcctcctcatctacatttatatcttcgtaaccattatgagctgcatcaacatttgtaacccctgtctctgtattgcctccattgccgatagggtaaaaagacacaaacaagttaacagaaggatcgccattacgaatcaacataaatgtatccaggctgatttgattctcaatatatactggagggcgattacttgctatcatatcagacatctttccaggcatccagtaacttattatagggttccattcactaaacttatagctgaaaacatcacatattgtacttgccaaatccgtgtacgtcgttgtgtctataatacgtacacagcgtccgaaacttcctttttcagcttcaaatttccaaccttcttctttgtatatccactcaccaaccataattaatacaggtaactccatacctgcaacataaatttctcatgtcagaccaacattaaataaaaaaaaatcagatcttttttcaaggatttcatttatgtcaacgaagacaaaaagaagcttaacaaaacaatttatgtacttataaatttaactaaacaaaacatagagctttcatttatatctacaaatacaaatagaatctccaacaaaacaatgtatgaacccagaaatttttaaaaacgtatcattcaaatcacgttctcaagtgtaattaggattaacacgaatttcttacccagaacacagattgtctccccttcaatccttcaaactttgtaaaacagcaactgaaaacttcagattcttcaccgtaacacaatttcgattttcgtttcttcaccttaacagaatttcgatttacgttttttacccagaattctaatctaaattatcaaaatatcttacaatataatctctattataataggtaatcatgacttttagtcttgtcaaaactatttagcattaaaaacttctgagcccaacgaattttaaattttttttattccaatctcaagtgtcaacttcgccgaaacccagaaatcatttaatgcatttctcgtcgatgaacagcgtacgtacgaacccggttcttttggattccaacgacgcggtccgtacgtacaaaccgggttcagtttcgtcaggtcgccaggggcattttggtcagtttttggcttaatggctaatagctgaaaggcccagcccactttgtcaaaatctgaaattaaaagtgggtcaatggctactgtgtgcaatttacccttcttgtaattgaataacctcagaaacagttttatttgatctcttgcattattacattagagtagaacttaagaacaaagctttctgcttccacaatcagttccaacactatcgattctcctctcttcacacagttagcattgcaaaacgttttccaacctcctactaatctcattctcttacggtccttttcaaacctcagattcgtagaccatttcacatcatctttatccaagaaactcatcttctttgcattttttatgccattcacctcgccagtttgtcataacgtagactcgtaggcaaaatattagccacaaaactaaagggattcttcttccttttcttcctcctttgaatcatcccagaaaatgacaggaataaatacaagtggtaatagtgaaactgattcttgaatgtcacgtattagaatgagagacgaaacaaaactcaccaaggttggtatcttcactgctttctagttctggggaaagagactcttcattagcttgttattctggctctttggcggacaagctgtagactcgaagccatgacattagccacacaacaagaaggatctagtgacgaagactctgtttctcttcttggattcttcttccattgaatcttcccttcaaacgaagagaacaaatcaaactggtaatagttaaactgattatctctactttaagattcagattctattatctcagcagatttttaaaatatcaaggacagagttcgaaagacagcacaactaaccgaggttgctctagtcgtgtaaacaagacatatattgaatctcacaccaactaggccccaacagtgtaacgtggaaggacagatctctctcttgtctgaaaacaacaatgtcaccgattcgaagatcatgtgataagttacacagggtgtttttcaggagaaagaaggacaaagtagcacacacgtgtgaggatatgacaagtgaggaggttgatgaggtgacagggatcacccgtacgaagggttaaggttgtgccttgggattgctgcttataaataaggagagaatgctttggggaaaagcatgttgaatcaagtggaggattagtcgttatgagactatcgtatggagagattagattcgaagagatgctgagaatctagtcttgttcttcatttgtttgattgttcaatccttgtaattcctgaaccttgagagtttttaattaatgtatggaagtaggcatgaccaaaatctaaccgtaaccgtatttcggaccgtaaccagaccgtttattaaccgtaacccaaccgtaattgtataaaacggttaataaccgtaaccgttaaccgtgaaaatagacccgttacggttaagaaaatatactaaccgtaaccattaattaaccgaaaccgtatcaaaaccgtcggttaaccgtatggttaaaaccttaaaaatatagttgtaactgtgtataattctaaataaataattatttcactaaaatagtaacttaaatcgtttaatatgcccactactacgatcgaagttactccactactctttttaccataaatcaaatcataagtagttcatattattattatactcttaaaactgtttcttaatgttcacaacatcttctctttagtattgtttttgtttggaaaatgtaattaactcaattattataattatgaccattaatttgtttattcattggtttatttaagaaaaatagatagttgattcactataaatatttgaaacacataattacgtaaaataaatattatttgatatatcactatttatttatttattttattataaagattaaaaaatataatattttgtctcatatattaactatatcataattatcaaataccgtatttaaccataaccgtatttaaccgtaaccgtatttaaccgtaaccgttttaaccgtatatataacggttaaggttaagattaacaaaaatttataaacgtaaccggtggttaataaaccgtaaccgtaataaccgtaaccgtaataaccgtaaccgtggtcatgcctatatggaagtttataaagataggctttaatcgagtatttacattatcattcataccactaaagtctatcatcatgtgagagagcaaactctttacaaccgtcagtgagtctctgtccatctatcttcacttcccaagttatcttcgacacgtcctatctcagctccgccgtcttctactcgtctcttccttctatattcttcaagaagaaggctgcatgaattgtctcaagcaacatgtaaatacaaaaccagaccagtttggcagtttattctaaatgagcttctcagaggggcatagacagagataaaagaagggaaagagtgagagagagagagagtaccaaatgacagtggaatccgggaagaagaggcttgaagaaatgttgcttcgccattatcaaaatccataaatctttcagcttctagtgtaggaaattaacacaagatttcgtcaagttcagagtcctttgatgaggagactctttatattggtgaagtctccttggaactcgagagctttgattgatgattacttttggttatagccgcatcagaaatagtttatatactgtatacatatttatttattcttggtttccgaattcattaatgggcttggtttcagagtaagacttgtgaaatcccactactttacttttaatttgacaatctgcggccatgaaagtattgaccataaaatggaatttcactgagacaagaaggtgtgctgcaaaacgaaacattgcactatctgctagtgatcactgctaattagtataatacctgaagctcattcttcccatatgtggtttcttggcataaataagatcttccgtcggagcaacacttgtactgtctgcaatttggagtgatatacaattaagtaaggatgtaaacaatacgaattcgtgtacgtacacaagatttatccacattaatactcaaaagctgatttttggcgtaaacagagattttcaattcaaatttttaatctccagacggaaaataagagaaacttatccagttccaccgttgcctttgtcgaagacagttttctcctcggggaaactctgagtacccgcttctccttctcagccataacgaagttgctatctcgcgccggaggtttctcaattcctcttcgccggaaaaagtgcgatttttgcttcgccggattttggagttcactaattgtcgaaacttcgccgaattttgaactttgacttcaccggattttagagttcactgaatgtggaaagttcgacggaaatcataaacccaacaatttgaagtgatgtcgaaaaacgaaggagttgatgaattcgaacttatttctactcaaatctctcttttgctttctctttttcttcttcttcgatttcttcgtttcaattttttttttttttaaattaaaccgcaggaactaaaccaaaacaaaccgcaacccaacggtttggttgatctcattaggagtatatttgtcataaaacaaatgaagtgccaaaaattgagattgaaatctcactttgctaaacactgaaatgaaatcttttttttgccactttcgttaaaatttcttttgttgtttctatcgtttattttattccaaggtacaaaatgtattttacaaaaaatagagttccatagttgacttcaccaaacaaaatgcacataacctcaaacataacctagtctttggtgaagaagtagacgactagtgacttctcctaagaacagcaagagccttaagcgaatgcttcatgactacggtaaactcaaacttctccgtcaagtccacttcatgaccttggacctctttccactcaaactccctcaccatattcgccacatagtactcaagatgcagcatcgctagcccaatccctggacaaatccttctacccgccccgaacggcatcatctttatccctctgcttccggttatgtccaccgcttcttcttctcccataaacctctctggcttaaacgccattggttcctcccacaccattggatccctcccaatctctgccaccatgaaattaattgttcccttcttcgggactttgtatcctcccaacacagtgtcctcagttacactgtgcgggagtacaaaatgtcccggaggatgtctccggagaccctccatcaccactgcctttagatacggcatcttttgcgcgtcttcttcctctacttcctttgcttcttccccaactacgcttttgatctcctcgtataacctcttctgaatctccgggtttttcaccaagttcgccatgatccattgcaacgcggtggccgttgtatcagtcccaccgttgagaaactccgaacacaaactaacaatctcatcttcgttcagcttcctcttctcatctggaagctccagctcaagcagagtatcaacgtatgattgtacatacactttgttgtcttcttcttcctctgatgatctattctttctctcttcaacaatctttctccgagcacgaatcaacggaagcaaaacgtcatgctgctctctccgcatctggaaaaactcttcccatctctttcgcaaaatcaatttagtaaacttaggccagagattgagaatattgaatctggaaaagccaagaagctgtcgtctctgaacatattccacctgtttgatttgtttctcgtcaagcttatctccaaaacacatgagaacaagaagcgcaaacattgcatagtgaagatgatcaacaacaacaatcggttcttcacctctgcttttaccaaatcgatcaaaaagaatctcaagaacccaacgccgcgcgtgagagtaagatctcacgcgcgaggggtgaagaatctcagaagtgagattccggcgaagaagacgccacgtggctccatataaactagagctgatgttatgttggttactcgaaataatcttactgatcggagcagccggtggacgatcagcgaaaacggcaccgttcaaaacgagagcctggtgagcaagagaacgatcggcgacgaagatagcggggcgggaagtgatgcgaagggtgatgatgggaccgagacggtggtggacggagcggagatagttgttgagtccacctaagccttgccggagccattggagggttccaaggaaagggaagaagttagggtcaggtggtaacggaagagaggaggagtcacggcggcgaaagaggagtaaattgagaaggagagagaggaagagagagcccaagataagtaaccatatctccattttcagtttgttctctacttctctttgctgttttttctttgcttcttcttcctttgtattcgtgtttatataatacacgtgtgtgtggctaaattcgtgtaacaaaacttttttagttaacctacgtgtaaacaatttatcatcagagagtgtgttattcaactataacttaattttataataaggcagtatttattattattattactatcttaagtaggattgattttttaggatccaattcaaaatctattctgatttgtttccaaatattttgatacacaatacaattttggaatttatatacagtaataatttatttattttaaataacatgtgatatataggaaagatatatgaaattttacttttatatattattttcacattaagtgatggcagatttataattttgttaaaaaaatatgtcacattgtaacaaatttgttgtcacaaaattaattactagaatgaggtctaacgataaccaatttttttaatgttatgatagacttgttttatgttataacagattcttgtaattttacacaatatctatcgtttgatggcatatttgttttctaaaatataatgttttgtgttatgacagagttattttatgttgtgacagataaatttatattaccataaatctgtggtttgatgccaggtttaataaaaaataaaataaattactggaatgaccttaaattttttttatgttacgacagatttgtaatttgaaatccttatggtgactgatttataattttcttttttcataatttttttaatagaataatactaactactgtaacagtttttttatttggaaaatcatattatgacagatttgaattttttttgtcaattgtttttagaaattcttttaaataccactaaaatgagtttttccaaaaaatactataattaattttatttttcaaaaatatcacaaatctaaaactaaatttaatattcaaaactaatttttatatcataaagactaaaccttacacctaaaaactataccgtaaatatataaaaaaaatctataacttcaaaaatcaattatggttttttttgcatatttttttgctataataatatttatagtggtgacagttttttttctttgtaatgacagacttattagagcagttaccatatttacgattaaaacattaaatgtcgacatatagagtcaactggtatttttacacaaaatttgtgttagtatagtttttttgtttttttaacacttatgacattatattgatgagatgtactcaaagtgtaatgagtccgaaatacaacggggtacaaaatagaagaaagtatatccttgatcattttggttgtgatacttagacaatgtatctgccgatctgttcacttgtcttggtatccacctaaattgaacttcagagaatctccgtttccatgtttgaatttcgtgcagccagtttgtaatatcgaatctttttgtcttcccttgtaacacgtccaccagaattttgcagtcgccttcaaatataaccttagtgtgtccttttgcccataaatgttgcattgctgaaaccagtgaattgcattcaacttctagtgcggatgtagcttgtgtaccttgaatcttccctgctcctttgtagtgaccgaactcattgcgaatgatccaggccgctgatgttctttgaaggtgttgtatgtagcttccatcatagttacattttatccagcctgcttcaggccgtctccagtgaagaatacgtcgacttccattcgcagtaggagagtgaaattcctaagacgacgtgtatctccaagagtactccattcttcggcatcgtgatgtgcgcttgatagatctttctcccacgtgtttgcttctctcccgaatattagtttgtttctgttcttccagatttgccataaaatccagaagggaagttgtgcctgtaactgattgttcgagctttgcttgtgccattcgaagattatagacatctttgtttctaagcttactcgtgagtctgtaaggtcttgaatcggaatggttgatgctctccagatttgcattgcgtgaggacaagtgaaaaataggtgatctgtagtttctgtctctgtgacgcaacgtttgcagtacttatccggattgatgtgtcttcgctcgagttcttctcctgtagcaagtgcctttgagagcattctccagaggaaatgtttaatcttcggtgtcgttgtcgttttccagatacttcttttcaggtgtggatctcctgttgggggtagtgctcgtggttcgtcactgtggaggtgtgttgcaagccaataacccgatttaactgtgtaaagcctcgtatctgtgtaatgccatcccaaataatcctttgattgtgactggctaatctttaaagccaaggtgtgcggaatatcctctggtgctactcgttcctgtagtaatcgttcattccatccagttttgtgtgggaggaaaaagtcctgaagcgtttgaaactgtggttgagtgtgatcaagttggcgcggaggtcggggagggtgtagtggcagccatggatccacccaaggctgaatcgaagttccatctcctactatgtagcgcattcctttttttaatagatctctgcccttcagtagggattgccatccgaaggagctttgtgagccaattgaagcgactaaaacatttgaattaggaaagtacctcccccgcaacacacgtgccattaagcattcaggattatgaaggattctccaagcttgtttagcgagtagtgcatcattgaatttgccaatatcccgaaatccgagtcctctttcttcttttgaaaatttcattcgctcccaagccacccaatgcattgcgtttccttccggttgagtacaccaccaatactgtgaaatgatgcgttcaatctcctcacatatgtgtttgggaagcttgtaacagttcatcgaatataccggcatagcaagggctatagcttttagcaagacttctttacctccatgagaaaggaatttattcctccatccctttgttttctctctgaccttttcaactatgtactggaacaactcaatcttctttcttccaaattgctcaggcaatcccagatacttgttacatcccccgtcattatgaatgtcaagagttctgcgtatagccgtcttcgtcgtatcttgtaccctttttccaaaatgaagagctgatttactggtattgaccttttgtcccgaagctctttcatactgtgttagaatatccttgatagcaagacacgatttcatgttggcttgacagaaaaacagggagtcatctgcgaatagtagatgacttacttgaggacttttattacttatcttgattcctttgatgagaccttgagtttctgcctttttcatcatatgacttagtacctcagcacataatataaagaggtaaggggagaggggatcgccttggcgtatgcctcgttccggctgaatgaatccataaggagcaccattgatattaaccgaaaaggttggagttctgacacaagtcataatccattcaatccaacgaacgtcaaatccgaatttgaacattgcggcttgtaggaaatcccattcgagacgatcatatgcctttgtgatgtctgtcttgatggccatatacgaatttgagcatcttttcttcactttaagagcgtggataacctcatgagcaataatgacattgtccgtgattacacgccctggaataaaagctgcctgttcctcagagataatacttgaaaggtgcttcttcagacgggccaccagaatcttagaaataattgtgtagctcacgttgcataaggcaatcggtctgtagtcactcagaagacgagaacttgctggtttcggtataaggcacaagtttgtgtggttcatggatttatcaaaaatgccattctcaaaaaagtcatgtacctcagccatgatagattgtttgatgtcatcccagtaatggtgataaaatgcaccagtgaatccatcagaccccggggctttagttccgcctatagaaaagactgcttctttaacctcctcttcggtaatcttctttgttaggtctgcattcatatctgcggttactcgttgttggaagccatttagaacatagtagtgattgttatttgtcgttaagtcactccgaaagagcttggtgaagaattgttgcgccacttccccaatattagaactgcctctgtgttccacattcgcatcgtccaagatagagtacattctatttcgtgcagatcgtgtttttgcagaggcaaaaaaatactttgtgttacggtctccacctgacagccatgttttccggctcttaagtctctagaattcttcttcagcagcataagccttcgacagctgcaatctgagctctcggatgtgttgagttgttgtgccatcagagtgagctctatcaattctgtttttgagaagggctatatcttcttgggcatttgatcgatatcgcctcttccattgagatatttctcttctgcaggcagtgagtcgtgatcgtagattgtcgtcctggtgaaagattctccggttccacccacgtctgacagcatcactgaacccatcacgctcaaccattcttccatcaaaacagaactggttatgcttctgctcaaaatcgctcgtgattgttgtgatcactggtcgatgatctgattctattaactcaaggaattc

SEQ ID NO: 205 - DNA, 87119 bp, Arabidopsis thaliana
aagcttcttagtggtctgataaggagtgatggtgcagatgtactcagcaatgtccactctctgtgctttctctttcctgaccttaggcagcataattgcactgatgtccaatgtcagcagtttagcgtcatctgagctaataccattgtcaacaagtcgcttgacatacctgttgattggtgataagaggtctcataagcatcattaggaagagaactaaggatcttttccatgatggttgtgcacttagcagcgtgaatctcctgcttagaacgacgcttcctacgataagggacaagaggagtaagcagattcgaggtgaattgggattcgcacctcatatggtgcagtcggacccaatgtcgatcgacactctaagcaagttatgaactgaaactaacttagcattcacctctgccatctgattacctgaaacagctccatcaatcttcttcctctcaaagtcagcattcttggtgctgttactgcaagtgagattctctatcagagcggtagcattgctcgctgcatctagagccatcaggtacctccaatcaaatcttctgaaaaaggtaccaagaagttgtatctcactgaagccatgatacgggcagtcccgttgatactccttgaaacgaacccaagcggctttgaaagcctcagctggaccttgggtaaaggtagacagcttgtttttcagcgcctcaaacttagcatcatcgtaaaaattaatcaagaatgctatcttgatgcttctccaagtcttgagggaacctgctttgagttatttcagccaacaatggaataagggaagagcttgcacagtaggtagtcctctgagactccattagctttgatgctcaggacgaggtcctcaaacgctcgatatgtgttaacactatattttactcattttatacatgtatttatcatcatttagcttagtgatcactcattgtatcatatcattttgcaccattttagcttattttgcacacttaggcatctagaatcatattgcatacacattgcatgttttggtgtgttttcaggtgcagaatgagtttacaaggagtttactcgaccctctaccctatcgccccagaggggaaccagaggagcagctactcgaccagttattcattgccgcagaggggaagcagcagagcatctactcgaccagttattcattccctcagaggggaacgagaggagaagcagttattcattgccctagaggggaaccagaggagaagcagttattctattgcccaagaggggaaccagaggaagcaacatacactactcgaccccctactcgatcccctacttgatcctctactcgaccaattactcgatcaacggcaacctattctacaagacatgttgatcattccccactcaaccagacagtgagcataagaataagagaggaagaagcaactactcgaccaattgatcactcagagcatggaggcaaaggtgcagactttgcagcactctctttactcgatcttcaagatcgagcatccatccaaaccgcctcaagtctcttgtcttctagtgaatctagggtttttgagatttaagtataaataggttctttggggtttgtctaaagaaaataagcttttatctcttagtttttctttgtgttcttgaatcttaaaaccttaattactcttaatctatttcgtttttgcatttagttctttgagcaaagttgtttatcttgtttagatctacattttgatatgctttcagtaagttctgggtttttttcttagttatgttgcttgagtagtgattagggttcttgaggatttattagattaaggtaatctctagggtagtcaggtggttaagattaggttagatcccttctggattcgttggcccctatgcggttttcgctggctaatgtggaaattcgaccataggtatccagcgtccaaaagacgttgaaatggatacctgatctacgaattctagagatttgtagactctagcccaagagattggatagactgcttattgactttggtagattgttgcttaaaccctgctctgctatgtttcatcaacgagagttgagattagaaagtggtagagttatgggggtctctgtcacgagagtggattgacccggtttttgattctattgtctagggtatatgcctttcgcctattagccacctgatgaaccttagagttgcccttatcaatgaatccatccttaggacttctattgttcttagatttatttgtattcaccccctgattgcacttttattcacctgttatctgtgtcacctgttgattgcattttagttatgaaatttgtcacctattggttctactcgacccaatgattgagtagggctcttgataacacggctttttagcccgttttagctattgttttcttatgtttcagagagaatttggagccattctagagccaattaaggagaaacacctattctaggtgccaagaatgttttaatagttttgaagctaaaagtatccaaagacgatcattctagtgcttcggaagtttagcatccggccaaggttttgccggactcggcatgaagataattaggtatggatggaaatctagaagattcaagattcacgtcgaagttgaatcgaagcaatccatgaagccgttcagaagatatggcccgaagagtgaagacatgtcaagaaccggctgtttggaaataaaaagtccaaaacacatccggccgatgagacttgaactcgggcagctccgagtggctcaccaccgaccattaggtcattcccaagtctttccctttttgcgccaccgccattaggctcctttcctgaagcccactactcggcccgatcacttacttatccggcggaatgacgttcttacccctaaacctaattcttgggcctcaagtataaatacttgtccttagccctaaccctaaatgtgcctttatcaccagcgaaccctagccgtcaccaagagctgcctcttagccgtcgcacctcttgaagcttgaaaaacaccatctctctctttctctttctcgttttcgtgtaagactctttaaggtggagctttgcctcttgtattctacattcaaagaagtaatctctaaaccccttttaagtttaattcatcttttagttatggtttactcaacccaactttggattagctcctttgccatgagcgactagatctctagttgggtttgaggggggtttcaaagggaaattcatggggaccaatagatcaaagatctaggttggcggtttctatggctttgtttgatcgtttacactatttcttctagttgagtttattcttaatgcttgtatgtctggaacgccacctagtacttgcctttaggtatttcattatttggcacaatctcgtttgaatgtttgacctaactcaactgaataaagaactataaccgttgcacgcccgccgagtgatagggacttatgaactagaattgaatctgaacttaatgcctgatcttgtattttgaaactatgttagcacctactagccgacagggcaactgagtacgtaatttactagtgataatagccggttttcacctactagcagttaggattaactagttttgatagagtttcgtatgttcgggaatttggaagtaaacaaacctagccatgttatcacctagattgagatctatatcttattattgaatcgtgaacatccggagaaacccctgatgacctaacgcttctctcttatagtttatcgtttagtttagttagtagtctcttagtttagttattcgtagcatacaacaacccctctcttttattttggtcctagcttcactctctttttaaggatttctctgaactacttctctcattgtggattcgatcctaaaatacaactccgatataatgtgcacttgcagtagtcgtgtggtctttcaggtaaaagtctgaaagcgaaataaacgaaataaaacacgcatcagctcttaagttcttatttttgtggtttgaatcctgatttaggattgttactagaaacccaccatcattataatctggcttgacttagttgcttctatacacatcttgattgctagcaataacaatggactggattggcaccccttatagctgcattgatatgttagtgtttaaggggaattgaactgaaccacacttcagcacataagtaggcctgaaaaacctatttattaatttggcgccgttgccaattcattgttggattgttacattcaagatatcagaaaagttaagatcaacttcttttacattactcaagttactaactcatcttttcgtctgcttgtttttgtggtataggtactaatctttgtaaatgcaaactcggtccaaaggttctgcacacctactaccttttaaagatagaatagacagaatagctcgtgagttacaagaaaccaaagcaaaggcagcttgtgatcagcaaagaccagctgctatggatcaacagaacagaccagttgatgtttaagatccacctaatgttgaacaaccaagaaacattggcgctggtgatgtcccaagaaatcatcaccaaatacaagggatagtgccaccaccagttcagaacaacaactttgaaatcaagagtggtctcatctccaagatccaagaaaacaaattccatggtttgcctatggaagatctcctcgaccatcttgacagctttgataggccatgtggccttaccaagatcaatggagtcactgaagatatgtttaagctcacactatttcctttctccttgggagataaggcacaccactgggagaagactctgccctagactccatcaactcatgggatgattgtaagaaagcttttcttgccaagttcttctctaatgctcacacagctagattgaggaacgagatctcaggcttcacacagaaaaacaatgaaactttctgtgaagcttgggagaggtttaaaagctacaccactaagtgcccccatcacggtttcaagaaagcttcatcattgagcacactctacagaggagctttaccaaagatcagaatgctactagacactgcctcgaatggaaacttcctgaacaagaatgtcgcagaaggatgagagttagtcaaaaatctagcacaatctgatgggtgctacaatgaagactttgatcgctcagtgagatgactgagatgactgataaatgcaaatgtaagggacataccttcttgtagaagaagctcggtatggttcctgcttcctggcgttttttgttgcttctctttgtcgtacccaccaaatatctcaaacaaatccatcaacgacctctgaaaatacccttttacattcgatcctttcctgctatgacatctttatacttagaatctgacacatttgttaatgaaaactgtaaaattttttactattacctgattgaatgaagcactgcttcaatgtatgaggttagatacttcaccctcgttgtgtcttcaagagatgagctgtgcatagtcatttgacgtgtatatgaagaatcaatcaccacacagagagagagcttaaaatacatggagaagaagcaaagtaaagtctaacgagaggaagagagagagagaaagagaccattctctaggatgtagacatgaggatttccacaaaattcttcaacatacaaaagtatttgtcgcagactccatggtgaacactcgagcaactgtaacacttgcaatcatttagttttaacccttgaaaacccaaaaaggctaaaataagaaacaatgaatgaaaagacaatctaaaataggtgaaagaaaacatattaaagcccttttatgagctaaaaccacaatacattacaatgtctatgtaggatcaaaagtctctttgataaggggagtctgcgccattgtttcattaattgtttcaagcaacatagtgaaaaaatcaagtgatcatcaaacaaaacaaaaattgcatagattcatagatagtagaattctcaattgcaatttctacaatcaaactgtaaaaaaaattgcattgattcatagattctatttgatatttctacaaccaaactctataaattaattctccaaaacctgcaatctataactaagacaaaccaaacctgacaattaatttatcaaatattccttacggcataaccaacttaacaataacaacaatgataattattaacttatcttttagaccaagttttgaggatttacttaccaaagtttccaaggtaatgatctttattcccggtaacacggccaatccatgcttgccaaagtcctttttgatgatcttggcacacattggtatataagctcctgtagagaaaccgctactcttcatgtattagatcgagttttacctctagttactatcaaagacacatatttagactattaattagattctgtaaagttcttgcatttggacttacctcctgaaggaggcaatgaactcttgtttggtcatgtgcttcatttcctccaattctttccagtaattggtaatctaaaaacgcattggaatggattagtaaagagttgtataaattaaccacaaacggataaaatcataagaggattcgaaagagtgatagaagagccacacatggccaagaaaaacaacaccactcccatctgcaaaacatcatcgcttcttcattaaggtcaaggaaaaagagaaaacgatggagagaaagggagaagaagaagacttaccttgagggtggtggatggatcgccagagaagagagctctgagttgttgatgcagtgactcattgaggtaaggcatgatgagtctgagcatcctctttacatcttcctctctaactccaaccactttatgtctctccttcttcaccatttccatgcgtccattattatataccttacaaccccaatcacaaaaacaacatgcaaagatatgtaaagagaaagatagtggaattgggtcatcgtatcacacctgttgatcattgatttttatacaaacatgatgcccaaataggtgagtctcatgtacgctaccaccgatatgaagttgtgcatatacattcactttttagttctactacttagaaactaaccgtgttatctctttaatcagttgagaaaaaaacctgaaattgagatgattggcgtaggaagaagagattattaggaatgatccgaatcctaacaccacgttgaccttgatacatctctccacaataccagatccactggccatttcatttcattcaatatagttttcatagcaaattttttgtagatggaataatgcagaataaattattaaaaaatgtttctgcaatttctggggctgagtagagttgtcttgttactctgcagatctatctggaaacagtcttaaagagttagtgaaaaaaaaaaaattctcgaatcatttctagaaaaagaagaatttacattacctggattgcagactattatgaactcttccatagaaactccttattcaaagtttgataaccactcaccaaaaagcctgaacaaaatcagacaacagtaacaccaaataaataagtacactcgcatctcacaactaattcgattaagaacgaacacaataagaagaaaaaggaacaaacttgcagattgaggctttaacccaaaaattttccggcacacggatttaatcgaagctgctccttccttcccgattatgagatcccaagatattattccacccaagaaactaccatatgcatcaaccttttttgtaaaattttcatcgctcttcgctgattgagtttgaaaagggaggctgaaaaaaaaatgaaaatgaaatgagaggctaggtttttactttttagtcgttctttaacaaaacatttgacctaatggaggaggatccgcgtgtttttttttaaaaccgggtcaaagtcattttcatgtatcaatggccaggaattaaattgtcaagatccgaataaacagttaacgggtcactaatatccgcgtgtttctaaacggttttttttcatgacataaaatttttatccctatggcaaacttgttatttcagcgaaattcatgcctacctcattaaacgtacgtctaaaataatagagtagatatatataatattaagaacaaagcttatatatatatatatgttttgttcttaaaattatatatatatgtttctaaaacgtgctaggccttctttaaaaataagagaaagttctggcctaaatctccaaatcttcttaacttcattaaaacgcgtctttgaactgctgttaggtattggtgtcgatagacacctacacggtttttggtctgaggattgcttctgcagcataaattctctattttgcaccacaatgctccataagctccaaatatatcccaaacatgtaaaaacctaaaaacgactacaaaagactaaagaaataacaaatagactctaatacctatcctaaatcatactttaaaaccggtaaaactagggatatatcagttttgaatcgtgccatcgtcgggtcttgttaacgttgttacttgatcgccacgtagtgcgaagggtttgagagacggggctagctaccctggccgagttttcaacacgacggtgtagcattttggtagtgatgctacggttacgtacctttgtggtggtaacgcatgagatcacgggagtgtgtttttggtgtgggtgtttgaaggcagcatatcgggccatataacatttaataagattggagtcttaagtgaatttgcatggttttgtagttgcttcggcgaactaccttttgttgttattctctgatgcgtgctttgttttagaattacctttggcaaactaccttttgtgctttgtgttagaaactaatatctattgcaaggaatcccgagctaccttagtaatcttagattactcatgattctacttgttttgcaggaaacccattgaggggaatagagggcgtggtggacgataggaaacctggagtagatttgtgccttttgtaaaacaaatatgtttaccatggttttgggcactaggcattggccataagaactttataaatgttttggtaacatgttgtaaaatacttctacttcagaaataaatcgggtattgtacaaaattacgagtaacgactgatagtgacttagtccgagtcggcacaacacttgaatatcgtaagggttgacaaacctaaacgatatacttagtgggagagtggtcatcaatatgccggctaaggattgagattggttcctgaacctcgactaaatgttgatgattaatctcattgtggcgtcttcggcccccccgtgacttgtctggtcatagagcgactcgggggacgttacagacaatgtgtgttctttcgtcacatatggagaaggctacgattttgaaacctaaaaccaaaaaaaaaaatctaggtttaacgaaaattgtgttcattaagataaggccgaaacatgaagagatatgatttaacatgaacagagaagatgtacttgcatatcatctttatatatatatatatacatctcataacaagcatgaaattgttatcaaacaccaaattaagaaaaacaaaacagagggtaaacgacttcttacacaatctagcaaaatggatgaatgcttcaattcctttgttgatttcaaaaaagaaagaaataattaaccttctaggtattaattatttaggaatgtgcaaagaaacataaacagagaaaattaaacgaatcatatcaaagggagagaaagagtcgtacctaagcactggattagaagaagtttagaaccctaaaagtcacatagaaggagttaaataaacaacgtaaccgtcgtgtcaatatgggagagtagggtatggtttacaaatgaagtgacactaattaagccctacctcacgagaaaatcgtctggccagtccctttttgttcaaaaggaagccaataaatcctcctgaaaaacagaaataatttttgttttaatttaaatcgaaatatatggatattactagtatatccccatctgaacctaattattatccctaaaaccatggttcctttccgaaccggagcacccgaaccacctttactttttatttgaaaataaaaaaacttaaaccctaatatttccagagatttctgatcgaaatcatttttcattataaccgttatcgatttttctcccctttctccttagtaaccggtgaaattaaccgcattccctattttctttaaattcaatcgatcgttcttctccattacttgaattcccattacttccgttctatttccgattcgaaaccaagcactctcagatttcagtcggagtgatgccacttaaaacgcgtggaggaggtgaagggaaaagaaagagagaagcgccggcgaagaaggagaaagataaggtgccagtgaagaaagagaaagttaaggcgccagcgaagaaagagaaagagaagatgctggcaaagaaagtgaaagttaaggcgccggcaaagaaagagaaagagaaagtgccggctgaggagcagtcgccggctcaaacgactgcaatggcgatggacgctacggctccaacgacagcgacagacgctacggctccaacgacggctccaatgacggagagcccgatgcttgaggatgctacgttttatgatactctgaagcaaattcacgctgaagaaattcaaaagaatatgcaaattgatgaggtggaggatgagaatgaaaaagaagaagcaagtgaagaagaagaatcaaggagtagtagccaaaccttgggctccgattccgattcagaggaggcggagacaaacgaggaactcgcatgtgctaatcccgtggaagaggaggagagacaagatgacggcctaaccgccgttatcgaggaggaggaggagagtagctccacgagcgacaaggacgtcaatgtggaaaaatctgtggaggataagggagacgaggacgagagagacgaggacgtgatagtggaaaaacccgtggaggagaggaccatagaagaggacatcgcaaatgtggtaagtattccatttcgtaataccgctttaattgggtaataatgcaattgtgaaatgtagacagtactagtaacattgggaaatgcattgttgatatttaggtaatattggtggatgttgggtaatactttagagtaatactacaattgtgatttatcgatagttagtactagtaactttgagaaatactacatagttaaataggaggatctgtgtaatactggtaatttcggagaatacttctgagaaatacagagtaatactgtggcagtaagatttacaattgagtgatatatgaataggaggatctgtgtaatactggtaattacgggaaatacttttgagaaatacagagtaatactatggcagtactatttacaatgagtgatatatgaatagtaggatctatgtaatactagtaatttcagggaatacttctgagaaatacagagtaatactattgcagtactatttacaattgagtaatataggaatgaatgtttgtttctttcaggatatggaggaagcgttggcaatgcaaccactcggtgtgtacttcacggcgtcggaatataccaagaagataaagttagcgacgaggtgttatatctcggaagtgttgaagacctacgctgacttgaaacatgctctaacggatagcgagaagaattattttaaggagcatccgagtttcaagcacatctaccatttgtcatccggatatacccacaagttaatagggatgtggatgctttttttcgaacggcatctattgagaagaagaaggaggtggttcgttgttaatggagttcccatccgctatggtattagggagcatgctttgatgtctggttttaactgcaaggcctattcagctaattatcagaagctggtagtatgaacttcgccaacaggtacttcaaaatcggggtaattacacgtgaagacgtgagaaccaagctaatggagatggaaccggctagatctaagaataggttgcggatggcggtcctctatttttaacaagcatcattcccgtgcctactaagaccggggaaagggctagtccaattgatgattctgtgttgggactgctagtgatcttacgttttgtaagacatttccatgggggagatattcttttgagtacatgttaaaatcgatctcacacacattgaatcattttaacgatgtcgtcccgaacactcagtcaccatggcctgttcccggattcagtgtgccgcttgaggtaaggaaatcacatgttttatcattgttacattttcgtaattcaagctaacaattaaatttgcatgtattttgtgtagtttttagcatttgaggccattccatcatttagggaagattcatagaagaaaaagagggtgtagatgccggttgtccaaggatgtgcaaggtgaatttcaagaggaccgagatgaaagggtttacccttgagcaaatcaaccatgtactgggaacaactgaggttggtatttcctattattccttgagcaaatatgattttatttatttctaatatttattgtttattatttccataggtcattgagagtataattaaagagaatgatgaaaaagtacctcttttggctcaaatcaccggagaagaggatgatgttgataagcacgatgtcattgttgatagttggatgaagcgtcttggtcaatggcgtgaaattagatttgaggaggtgtacaacgaggatgtgcaggcacgaatggaagccccaaatgaagaggaagttcccacagctgttggaccgggagacccgatgttagttgatgtaatggagaagcttcatgccatcaatgacaagctgaatgaagctttgttggcgcttatggaaatggaggaaaaacaagcaactttcaaaacatttatggatgagatgaaagccaaggtaaatttgggtgataccggatatactgtaccataattggtaatatcgcgtaataccagggtttaactaaattaacaatgcagatgtctcagaacccaccagatgaggaggatgcaacaaccaaggacaagctggctgctcctgttgtacccaaatgagtgacccgttcaacccgtgcaagctctagtaacgtgtgaaaactattcgtgtaacttctccggatttgtattttgatttcttgtactttgactttgttttcagatttcgcaagtactcgtaaaacgatgtttggatttaattaatgtattaggatgttttatgatatttattcttactgaaatacgggaaatacctcgtgctactactactaagatattgaattttactgaaatacgggaaatacctcgggctactacgactaagagatatactggaaatacaacaggctactacgactaagagatatactggaaatataacaaccatagtattaccaatcatagagaagtcttacaatcgaagggaaagtcttacaaagcatacggaaagtcttacaaagcatagggaaagtcttacaaggaaattaacaataagattaaggaacaataggttaacacattacttctttggaaccataggattacggaataccactttgctcacgttcacaatctctgcacggtgggcttttaatcctttttgcatttcttctatgagatactcatgacttagaactttcttccgattgtaatcaacactctcccttaagctactcacctcttcttccatagcctcatcccaaagtttacggatgtgcattaaatcatttctatcatcctacaaagtaccaaatatttatgaaaaatagatctagatctacaaaaactagaaaaacttgtgcagtattacttgttctaggcagtattaccaaaacggaaaatactttgaaataccaaatagatctagatctagatctacaaaaactagaaaaacttgtgctctacatcaacataccttaaacttctcgcattaatagtttctcttttcatcctttcaagtgtcgacaatgctaccaccacatggacaaaacttaggaatcccttccatcatcgcaaccttttccatttgctcaatggctctcttggccgctttcaaatcatcgtagtaggggtctctctcacactctctatccatggtagaaagatgaaagaaagatgagagatgtgagagaattcgagaagagagatgagagatgtgggagaagagagatgagagatgaaagaaaaagagaaaagaagatgaaagatgaaagatgaaagatgtaagaatagatcgaaaaagaaagaggaaaaagaaaaaattgaaatttttggttttggagagaatctcaaaaattgttaggcgccaaaaattttgggggaaaaccaaaaaatttaattctccacatgtgcgccatttttttggagattttttacatgtgcgcagcctttttatagcatagtatttcctaaggttttggtaatgccaatttctcaaataatattactttccatgtttttcatgtttagtagtatttcttatatttacaatttgtttatttagtagtacactggataaactttataaatatagaggtttaaatgttttgtgcaattataaattaaatatatatagcaatatgaattttttatttaaagttggtgttaatattaaaagtgagcttaaaagtatatgggatatgttgtattgagtctactaaagagaagttaaaacgatttaatattaaaatttctaacttaattaagtataaatgattaataatacatttttatctgttaataacccactgtattcatttttttttagttttgaggtaaacaaattcgaactccataatacaaacttagtattaccggttgtactaatatgaccaaaaatttgacaaaaacagacatgatattatttgttataactagtattacaaaaaaacaatagaaatagacatagtattacagaaggggaaatacagtattacatagtatgtccatacaatcaaaacaacaaatcactgtagaaacaaagtaaaatactcagataggcgtattcccaaataataattgttgacacgattgccttggacgccttttgttttgcgtcctttctcgttttggccgcttttccccggttgatggaaatcttagcatttttttccttcccttcttcggttttttagacaacgaaactatcttcaacgcctttacttcatctgatacttctcattgcgacctatccggaacaaaataaatagtcctataataggtcaatgcccacaattccgcccaataatattttgtaaccaaatcatgtaactccaaacctcttctccgatcttcatcatccataatgctaatgaaagcggctaatgcatgaatacaaggatatttttggatatcgaacaccttgcaactgcaagttttcaaaagcaagctcaccgtataatctattcctttctcgcatgtgattacatattcacgctcgaatgagtttagctccaccattttcagcttctcggcaaaaacccacaaatcatgcaaataattctccaccaaaggcaccatcttattttcaaaggatccagacgcggcttccatccgatgttcattaaaccaaacggaaattttttgatgatcgcatcaagcattggtattaacgagtatttccttgcgttgcgaaacacattgttcaaagattccacacaattgcttgtgtctaagttgtatctttctccggggaaacaactccttgcccatttttctttcacggttgtatcctccaaatacttggtcgccttaggatatctcaacttaaactcatcatacgcccggttgaagtccgccacgacgtagacccgacttaactcctgaaacttccatgcgagtacgtctctgttggtgttagtagcatgacctttcacattttgggacaaatgccaaatacaatacccttgatgagccgcggtatacacgttccgtatggcctttagcttctcgaaaaaccaatcccaactagcatcattctcactgtcgagtacggcaaacgctatgatgtaatggtgacggttagggtcttgagccgaggcaaacactagcaccatgccatatccgttcttcaaatgtgttgcatccacaattaaaactttcctcatcactctaaagccttcaatgctagctcccaaagctacgaatacgtactgaaatttatcattctcatccaatttcagataagtaaatgtaccatcatttaccttcttcaacatatacaaataacaattaatatccttgtatctttcttccgggctaccttttaagtcataaatcgcatgatatttcccccttagcgttgtcgagtatgatactttcacacctaatttcgtctgaactagctccatgataatccttggaaccggagtttccaactgtcccggaaaatgatcatgaaggagaggtgcgactaattatgggttgcctttcctttttctgagcctactactacctttacttagccgagtgcaactatgcatcttattgtaccttctaatcgagaatatatcagtattactgatatttgacgctcgtaaacgccaagaacaactttctttggcacacttaaggacatagcgctccttatccgacttcttaatcacataaccaaaactgttagcaaatgcagctctacccaccacctcgtgcaatgccgccttgtttgaaaattcttgacgtaaggtcaacccaattccgtcttcccattcttttttaaacataccaggttctacagcaggtggcgactcaacatactgttcccccctatcagaattatccatagactcatcatagcgtgtttcatcttcttgagtctcgtgatcctcctccactattgccacaagttgttgttgagttcctttttcctcttctaataagacgatgagtgcaccatcatccactctcatttcatcgtcctctgaatttaactccgtatagttcttaccaacataacttttaccaactctagacaattgctcggacaattgctcaagcggtttagagatctcctccacaaccaaaacacttctccggttattttttgcggatgttacataaataaagacatcctcatcatcacaaacgttcatctcttcctctactccgaacaaccatggattgtacctcatatgcaattaaccttatttgcatctaatccaagcttcgtcaatatcctatcttctaacattgaaagagttatcttctcccctaatgtcttcatcatcacattatacatgtgaccttcgaatttaaaatatatgatcacgttctctttcattgtaacctgccaaaacaatacacatactcagtcaatattactagtaataccgattctactacattttcagttttactagtactaattccgaaatattacatgtgtgagtaatactattacatatatgaaatactacgtgtctaagtaatactggtgctattaaaacatactatctatataaattacggtacaagttgtaccgtacaactatacctagttcgaccagtattattttcgcgacaagaacaaatattcgatttgagttcaatttagtatgaatcagtatgtgaaatcaattgcttatccattaacagaccaaattgagcctaaatctatacttaaacttctaatgtaggtgctagaacacaataacccaaatctaattggattgaatctcaaaatcctcaaaatttgtaaattcaaagagaaatcttttagattgttctaaatacatacttggacttcaatgctcgacgcagctcgtaggaagaaaataaatgacaacaatgtagagctcgtcgacggtggaggagctcgtcggaagagcgtcggggaaaaaagaggtaggtgacgaattctttttttttcttgttttcttctttattttctgtttttaattttatttcatttttgaatttcctttaatcctgataagggcaaaatggtctaaacacatttcattaaagaaaaagggatatgtagtagaaaaggattttagaggtttgtggtgtcacaaaggggacatgagagatgatcattcgacctcacgtgcaacacacgtattttgttttaaattcaagagaccgttacaggtagtaataggatttcctgaaaaaatgggatatccggttcagatccggattatagggttaaaatttcaaatgacagcaagatatacaaaccaaaagacgtaaacacataggacgattggtagcgattagtagttttggctttaaagacttcgacttttaaaatttgagctatagaaaatttggttgtaaagacttttgctgtagaaactttagatataaaaatttaattggtaaaacaaagttgtagaagctatgactgttatattattattattattattattattataaattaatattaataataaataaaaacaatgttagaaataattttatgtaacaataaaattttataatgataaaaagttagaaaatacaaaaattcataaagaaatggatacataaatattctgaagaaataaactagatatatattattcattcattttttaataaccaaacattgcattacgaaggtgctttttaaaaatcaaattattaaataataaatctttatttaaaataaatgacaaatatctagaaaacaaattctaagtaaacaaatttatttacattttttgtttcatgccaaaatttaatatctaaacacattaataagtggggataatgatgaagcaattaatgaactaattgaatgacatatgtgaaatgtatagtatttgaaaaatactaatttttgtttgttcaccaaaaaataactaattcaataacgcttttacatccaattaatggtgatgatgaaaaatgaaataattcctagtgaaatggattttagaagaaagattaaaaaatgataataattaatttattaaaaatattttgtgaaaaaatatatgtaaactggtacaaagttgttaattattttggggagaagaaaaaaaaaatttaataattaatttggagaaaagaaaagaaaaactttgaaatccttgtttatgagaccatgtatgctaaacacataaaactagggtgagccgtatcagtttattgagacttttgatacccagtatcaatttaggtggcaggccatgatttgtcgcattaattgttttggtaaaaaaaataaaaaaaaaataaaaaaaaaattattttgtttctttcaaaattttctctttcgctcttacggcgatctgacgatttcttctcatcttttctcagctacagccggtatgacgtagatctccgtctatctagaacattttttttagtttttttgaattttatgttttattttgcttaagtatattctacatttttttaattgtaatattatcttttgtaatcctgtgttttaatatattaatttttgattttgtaacaaaaaatcttatgatacttaaaccggtctaaccaatgcagacatatttagtaggagtatcataacaaatttcaaacaataaacaaacattataaataatactaaaaaaattccttatgattctatatgaggctttaaaacataaggaaaaataaaaaaaactttgagaacttacaaaaaaataaagtaaaaaaagcctaattggcaaaaaaaaaaatcctgttaggactttagatcacttttaaagtcttgaaagttagtagccttaggccaactccaatggggagttctctggtgcatttgtatgggttcccttgttaaagttacaaaaaaataaatctaaactgaaaataaatgagagagccagctctctaaagagagtttttagaatttgagagagccgcctaaatgtcaccatctgattggtcgtgcatttttaacaaaaaaagaaagaaagaaggagagttaaatatttttctttgcccgatattttcgctctctctctcgcgattttcttcaaattctaatttcatcaagattttgttaaaaaaacgagttagggctattacgttcatcgtataatgcgttaagactgatttgggtttgctaaagatggttttatggctgcaaatgtctgatgttgctgagcgcccacaagatgctcgatgaaatgccaaagagagaggttgattgctaaattgcattttttcagttctgaatgatttctattgtttgtgttctgttatgttaatgtttgaatcatttcatctctgaatgataaatgcttgctttggttcatctctgtcatgttaatacaagtgttgttctgtgtataggcttgaatcggaagcaaataggtctgttaattcattatgctcagctaaaaggccaaaaggatgaaagctttgagatgcaagtgtgaagattcattggagtttatgtgtttagtttttctagtgtgtgagttttgagagtgtggagtatgtcacgatttgagagccaaatgtaccccaaacacttttacacattttttcaaaaatttaaatagccaaatgtatcccaaacacttttacacatttttcaaaaatttaaacctttgaccattggagaatgttggtggtcatgtgaaattattttacatagtgtggtaattattttaatggctatacatgaggtcaaaggatgatggaacatgatattgaaggacaattcaaagtttctataatacacatgtacgaaggtatacattattcacagaggccaagttttgataatacacatgtacttctacgattcttattgctaccaaaaatgagctccttccaatacgattaatgataaaatgttcttagcatcagattttgtttttaacaaaaattagttccttccaatacacataaatttaataagtgttttaataacatttaaattaaccaaccaaacaaaatattcacttgtcgttattcgcttcgcaacaatcaacgaaactaatgatcgttatttgttttctttcacatatattttaaaatatttgaaaataaagtatatttaatattttatgatttacaataattgttaaattttataaaataaaataatttttaattattttttttcagagaacccatataagagagactaccattggagtatgaaaaactaaaaacaaaaaaatcaaaagctctcttgtaacatttttgaaatttaatcataaaaaatggaaagaccattgagggactctctccattggatatgctctagagctgtatggaaggactcatatgatttcgattagcatgggaagaacatcgattttaattcgcgctatagggtcacgaaacaaattacaagatctagatgatggtgaaagttatcttacaacaccgagagaggccacatcgagaagaaacaatgaagatcagaggcgaaaccgtgaaagagtctttgtgatccagagatttaaataagttgtttctgcaagtttcttacaaataaatcaaaatcattgaatgattgaccttgtcacaatgtcaatacttatggcttctataagacttagttacataataagcaaaataaacatatattgatatgcttagccggatagccaaaaaataaaagaagtgacgtgaccataatcacaggctctcaatgtaactagaacatagtaaacgatagaaatattaaaactattaaacacaactacactaaaaaaacattgatcataagcatttagataaagcatgcatggagcttctagtgaacttagtaggaagcgatatccaacaatagctttaacctgcattcttttttaagaaaatttcacgttataacacccttgtgactttttctttcacaaatagacaaagtgggctgggtcaaccacgttttagccattaggcccaaaatggccgaatttgccctccaacgagaaactgacggaggcggtttcgtttcgtggaaccggttcactttccttaaccgttttctggtttcaaaataatttaaatatttaaaattattaattttaaaactgaaaataaatcaaaaactgtcttcttcgagaaagcagaacagttccgtcgaaacgaagagtggtttcgaagaaccagaaaaattccgacaaaactgaatcacaattccgattgaggctctgttcgagttctagtcgttgctaaagtggagaaaatttcgatagggttcgtgttaaagtgtggaacaataatacgctttttgggtttatcgattaactgttcatagaagagctctaatggcggcgacgaggaagagtagtcggcggcgaggagtttcggatattgatgaggcatcggcggcgacgacaaatctgggttagttttccctaacttcgtttggagaatgattgattcaaaatctaggttaattttagagatttcaactcataaattttcaattgacaaagggattttgtttttttccgccaaaaacagttgattgagtataaaaggtttcggtgtacgtgtatatgaaaatcgagtttatgtttagttggtatttggatatagtgtacgtgttaagaacttcttcgtcttgctcaactttcaggaagtacttctaatgatccgggtgaattaccacagaggttgtttgcactcgatcactaccctagcaaggcgaagataaatgcgtactccagagcggagtacattggtcaaatagcagctgcgcttaaggacacaccagaaatgacgttccttctagattctccatttggtgacctctttaggatccctactaacaaggcatccttttctggtaaacttgttcttggattaatatgccgtcagttagttacaaataaacgttatgagatgtggatggtattcgctggtcatcctattaggctcggattaagagaatgggcacttataactggtttggaatgtggaacctatcctaaagataaggatgtagaaagtgttatgcagcgtgaggaaggtgaaaatacagtgtgggctactctgtttggagatgataaagctaagccaacagttgaagaattaagggatagattgatttctgaaactgacatgcctgcatggaagaaattagctctcgccctaattatcattgtggatggtgtgctaatatgtgacaagtctcctcctttgagaccaaatgagatgacagttgagctgacgaagaaccttgatttcttctgtaaatatccctggggaaggacatcatttctgcttactttggagcgtatcgcaagtttcaaaggagacaccgacgttaaaaaactccggagtggttgcaagcaacattcttatgcactccatggcttcccacttggactccaactccttgcattcgcaactataccgtctattgctagtctcctaccttctgaaggagataccgccgtgtttacagagaggactattaaaaacctttccaaattgcgtccaatcaagacatccaccatattggcgtgcgagtctgctgaacaggtttgtgcagttgttgttgtacgtacattggtataaaaaaatgaagtacatacactctgaaattaacaatgatcgtctatgtaggtggatatcacatatattgtggacccagcagacagtaattgcccaaaatcttttgtatggaggaaagaaaaagaggacccaagagttgataacattttaaggatgttgaaatctgagcaggagtggaataaaaaaatgtgggttggaggcgatgatgcgcctaagaagcaagtccggccctcagcaactggagagagaggtaaccatatcttttcatcgtataacttatatcagaattaggttcctctaagagtagtaatgcatgatttaaccgtttaatatagttattttgaagaggcaaagacgggtgtcagatcctgttgaaaacaaaaaaaggaaaattagtcactctgatgatggtgaaggtggacccagtggtggtgatggtgaaggtggaccaagtggtggtgatggtgaaggtggaccaagtggtggtgatggtgaaggtggaccaagtggtggtgatggtgaaggtggacccaatggtgctgatggtgaaggtggacccaatggtgctgatggtgaagttggagacgaagcgttcgataagtatgcgggcgaattgaggagtttcttcaagaggcaaacacaacttttggataaaaagtttgaagatttaaaagtatttgtccgtgaagagatacgtgctgctctacagtcccaggaccgaaaggaagaaggcccacgatcatctcacaaatctgattcaccatctgagaaggttgagagggtgaccaaaactgttgagaaggtgaacaaaagggttgagaaggcgaacaaaagagttgagaaggcagctgaacaggtacagagaaaatctgtaaagaaatccaccaaaccaagaaaatttgttccaagaagatcttccaggttgaacaatactcccaagaaggctgcaactggtagtcttcctgtcgaggtacgtctacagcatgtaccttgtgtaaatacaatcgaaaaaaggtttttattatgtgtacgtacaaccaaatacttaggaatgcgttattggtgtttattcacaggaggtaccaggcaatgatggggatggcgaagtttcagcaaaacagaccgtctctgactatgatatggaaaacatatatttgggtggagcatcatcaactgaagaggtaactcacttgtgtaatagtcatgttataatttatgccttattatacgtacaaaaagaaatattactgaccaattgtatggttttgatttcgaaggaggaaggagggaactcggagattgaagaagattcttcaaagttacaccaaaatgtatctgactctgtaatggaagacaatgtcgatcgtgttccatcaccatctcaccaggtaacttgtgttcttattatttcattattgtatgtacaaaatattttatgttcttaatgttcttacttttgacataacagcccgaacatggcattcctgatggtggtaactttgaacaactcttgcctgacccaatactgtctgacccagcccttgagaaaatgtcagatgatgtatcttcctcgtcccatcaggtacagggtacgtactactaatttttgtgtacgtacatattatttctaatttgtatgctttgcatttgtataggacgttcagaaaggacttggtggaaatcctgaagaagaagttgttgctcctgagtcacaacagttggaggagccacaatcaccggaggtcaaggttaggcaagaatttgcttttgaagttacagaagatggcaatcccagtgtacgtacaatgtttttgaaatctgtttcgcacctttgaatgttttgctgtgagtttgactaatacaatggccatccatctccatataatgaggtcaggctgaaacaatttgtggggaaggagaggaagctttgaaggaggataaatctccaaccgttgtagatgaagccttggaggtatgtgttactattttgctctttgtaacgcttatttgccaattagagatataaccaattatttggttactaaatatgaaggacactgcgttacctgaagcgaatctcagtgacccgtcttcaccaaccgtagttgttagcaaggtaagttcctaactaactataacattaaagtcggagatatcatttgatgtttgttatattgttttcattaggtgcttactcaattgaaggacgatattctcgcagaaaatgtatctaaaattcctgagaaggttgccgtccctgaagaggtaatttattagctaactattaataacattactgtcggagttataatttgaagtttgttaaattgttttcattaggtgcttactcaattgaaagacgatgttctcgaagaaaaagtatctgaaaaggttgccatccccgaagaggtcagtatattatcccgtgtacctattaatatttcaactagacgggcatatagtgtacgtactcttgtagctgtttccatgaccaatctaattatatgattttgtgcttgctgacaggaaaggaggacgatgttgtcgaagcgggtgtctctaaaactgaagcaatcgttgctcccgtcaatgagaaagagaagaaaagtgtaagacggagagttaccttctccgatgacaccaaaaatgatgataaaaaagatcctgatgtaacatttgttgaggagagagaggcaggcccggaggttttggttaaggctggcgattcgttgtacaatcctttggagaaggttgacgaagctaaattccagaaattatgtactataactcaaggagaaaaaaggtatgcatctgtgcattcacacaattatctgattgtttgtcaatcttatatcaatcctaactatttcatatgtcttactaatttcaggtgccatactcttttcggctttcggaaagtggacaacgaattcttcactactctagccgaggctaatgattgggttggctcatacgtaagtgaccattaattacgtacactgttgtaattgtacgtatatgtaataatatgtttttgaaagtacgtacataacatcatacttttatgtacttttcagcacatggaaatgatggcactcttgatgtggcataagaacggggagcatatgaagagaaatcggtatgtcgttgtggatcccagactcactttccttctgtcaagctgtgccaatgcattcagatcctgtcgtaaacccgacactttcaaatgggataaacttctcacacggttttccaagggagaatgccttaatcgtgaaccacagctgcattggatcagagatgtggacatcatatttgttcccatgaactggaaagctgagaagcattgggttgggttagctatatgcctgcaacgtcgtgttattgaaatcatggatcctttgcgttcgcttacgcgggagtctgtggttaggtcacgtatccttccaataatggagatgctaccgtacctagtcagagcgacatgcaaagattatctcgataagccttatcccgtgactccttttacatacataaggaatcaacgtctaccacagaatccaactaccggagattgcggtccgtacgcgatgaagtttattgagttgtacatgcttaacactcctgttgaggacaggttttcgattgaagaagatgatatgtacaacttccgtaagggttacgcagtcgagctctacgagcatggaattgggccattaacctagttattcgaagttgcaactgaagcaaacttatgtgttttgtatgccttttggaacttgtgttttgttgtgtttacatttacttgtttgttttctaaacaatttattacttttgtatgctatgcaacattttatgtagtaattaacaacgtacaaaaacaagatatctgaccaaagtacgtacaaactacgtgtccacgtgtacacattacacgactgttgtgtatacaagcggtaccattgatttgacatccatcaatgtaaaattaaatttgtcattcaatgtaactgtaatttccccaacaatatctccatccgtggttattaaatgagaggaagaatttgacctcttcggagtatctcatttctaagatggtcaatcccactatttcagacgacttgctcactatgatagctaagaaagtggcagacaaaagctggttggaccttaagccactgatacgatccggcactcgtggaagagacattgtctaccgaccggatgtccttaaagacgctaacatctacagcttgtgccgtgttcccgatgatttccaagtaggaggtggccataatccaaccggaccccaaggagaaggccgcaatcgactatttttcaaaaggtgccttctcgctaacaatccgacggctgtgtataacgaagcaatacatgttctaattcatgaaactgacatcaatggagcacttaagctcatgcagcgtcatgcacccgtccgagcagatgcaaccatcgcctgcgccatcatattcatatgtgcggggtatgattatatgggtgggttgtttctggacctctacacacgcaaccatcatccattggattccgatttcacacgagatttgtgtgaggagttcttcgaggagataaacaagtttaacccgccgtacaataatacttacgctcgttcgttctgttatcccagcagccatggaattaaaatgccacaatgcgcctaccattgtttcatggtttctggtgcataccagaacgtttgcaacaagtgttacctatggtcgtgtgctaggcgaattagccgaattctctaggtctctcatttgtacgtgtgtttggtgtacgtacactgtcacgtgtttcaagtttgttaggggtttggtcctatgtattttgtttttgcttcatccacaatgcgcctattatgttgttttgtttccgtttcctttaaattcctatttacaacttctgtgtctttttcatgcggtttggttctatctgtcatgaataatatatttctgttgtcaaactaaactggtaggtgtacttgcattctaacaagtacttacattataacaagtacttatattctaactataaatgtaatagtaaatgtaaggatatatgtcagtgaattgaataagaatgtcagtcttattcaattgacgtgccaggcgttaattaataaatacactcccacttgtcataattgcaagaacttcagtcttattggaaatatacgtacacgtgtaactccttattagacgtacatatatcaattatttaatataaatttccttcggattagaccgcaaatatgagaattatatatgtacgtacactgttactctatacgtacacgtgtaactccttattagacgtacatatatcaattatttaatataaatttccttcggattagaccgcaaatatgagaattatatatgtacgtacactgttactctatacgtacacgtgtaactccttattagacgtacatatatcaattatttaatataaatttccttcggattagaccgcaaatatgagaattataaatgtacgtacactgttactctatacgtacatttattggcaaatttattgtaaacgctatctccccatccgttaccctccctcctcggttattaaaaggacaatgatctgacctcttcggagtatctcatttctaacatggtcaacccaactattcctgacgatttactcgcaaagattgctaagacagtggcgcacaaatgctggtgggaccttcagccactactacggtcaggcagacgtggcagagatgttgtttaccgtccggatgtcctgaaaggtgctaatatttttagcatgtgtgaggatcccgacgactaccaagttgatggcagccatcatccatccggcccacaagaagaaggccgacatcgagcctttttcaaaaggtgtgtggatgctggcaatccgactaccatgtattttgaagctctttgtgttttaacgcatgaacgtgacattaagggagccatcaacctcttacgacctcatgttccatcacaagcccatgctacacttgcttgtgcgatactttacataattgacgggaatgattacatgggagccatttttctaaacctatttggacgcaatcattatcctttggggacagaagagacacgggatttgtgtgaggagttcctggaggatttaaagaagtttcgccctccatataataatacttacggatcgacgttctcttatcctaacagccatggtattaaaactccagattgcgccttgctttgctacattgtatctggaccgttcaagaacgtgtgtaactgttgttacctctggtggtgtgctaggcgagttagccaaatgctctagtcatataaatctactagttatttgaagttgttatttaatgttatcgtctaagttatgttcctagttcttctaatgccgttatgtttctatttcgttttatcctctatgcgtgaagttgttcaagttcttgtaatgcttctataaagttatgtttcaatttgtgcttaacctctggtttacaaggtttatcggtttaagggtttattcggatgtaagcaataaatttgaagtttcgtaatccatacttctttctgtacttacattataactttaaagttactataaatgtaggaataaacctgattggattgacgcaaaaagacagttttgtgatagacgtggccaggcataaaaaatacaaatttcaatatagacgtacacgtgtaaatctgaacgtacataaaccaataaactcaaaaattgtaatttgaagtttcggttttaatcggaaatagtttatagtttactattttcatgtaaacacgagttaatgtccaatattaataccacctacaatatgtaagtgggacgtgaaacatttaattagttgtctcctcgccattaggtctatataacatgtactcctcgacaagtcatcttctccacacttttcattgctcttactacgccatatataacctaaactcacaaataaatccctcagtctcggcaatggacgtccccacacccccaccggcggaaatttacctcgccattcagctacctaacccactcagcatcctcgtcaactacttacccgtttccgtaactcccattgaaacactcagaggtctcgttagcacgctggagccgaccgctatcaacatggatgagtttatgacgtggcctgatttcgtgttgccggaaacacctttccgaacatatttcaccctcctgcttgaacgtggagcaaggccggcgatttaccttgaaggggttcgtttagcttgcaatttcattacggttgctcatggtttaaccatgttgagttctatctcgcccatcgacgcttacgcatgtttctctcatggtctgttcctcaccgcaactggcaacggacgagaggttgaagccgtgaacgcgactttctgggatttagtgccatcattcgaagctgcaaacacagtgggggagttggttatgtatcacataagtcgactgcatgctgaaggaactcgtttgtggaatcgttcatggaggttcgtggtttcaccagactgcttgggtcgttgcagctacggagcctgctgccgcaattgcttcttctactggtatgctagggagttgtgcatattttattaaggaaaggcgttcgttcagcatctgatttcccattctatgcatcggctataatttcgcgttgtttgtaaagcatatgttttcctgttatatgcttcggctttattaacatggttgtatgctctactcggtttgttgttatgctttgtatttcctactcttattttaacgtttttttatttccttgttttattgtttatcttatgaatggaactaagtttgtttacattatacatatagtacacctatttgaacgtaccaaaacataattgtacgtccatggaaagtcattacaattaggctgtatttgtaataagtaaactgtagcaattagaaggtaaaactttagcataaaagtagggatatgtttaaattcggttacaaatctgtagttatttagaataaaagaaacaataattaactaatagaccacgactctgatttcttccacttccggtatatccggattagcaatgactttggagatggggccattggtcacagccttcagtttatgaatcccggttagacgccaggatacgagtgcgataatgttttgaggaccagttagccgctggaagaatctttgaaattcgaaagcttgggcattttgtgcttcacattgaagaacttccttgctacagagaatatatattatacacaggatataacaaacctaaaccctaaataattaaaaataaacaacttattgtttatccattatcttaaaaggaagcttccgtccacggtagtcttcggtcaagttgccaacctcaatgagcacaccaataacatctagtgtacgtaatggaagataaaagcattatgtgtacgtacatatttacaaaaatgaatagacagtcaaatatactaaccgactaacactccggtagaaactgtcctctcgatgatgtagtcaaaaggagtaaaatcataatacggtattgcaggcaatcccgatactttggtaacaatggtctgatccataaaacagatccggtagtcatgggacgttgcgtgtattccctcgttgtggagacgaactgagaaagtattaataactatccactcattttctcggatacggtcagagtaaaatgaagcaaggcgacgattaatggtagcctctatgcgggaacgcattccctacaacaaatcatcatgattagggacatgtacggtatgtgaaagtaaaaacgttagaaagacgttgacgaaatattactcgattatctgccaagatgagacccaggtcgaactcatttatgcccacgcatttttgaaacaccctgaccacaaaagcgcgtatactccatcctgtgatcatgggacaaagttcggaaatggcatgatatccatcatccatgatgacaacaacaaaaaccaaaatgaccgactttctgtcttatgtgtgtgatgggtgtggaattttgtttaaatgaattaagggtgttatcaccagtttcttaaatagattttagaaagacgcgatgattggtcccaaattgatgtaacagtatagcaaaaaaatgtaaccgtcaactctgtataattagaagtacccaatatacgtacaaatgaaaacgtttaccaaaagtacgtacagaaaacaacgggattgacaaaaagttgaaggataatcaaatacaccgataatacgaggtccacttacgtacgtacataaggtaacgtacagacaaaataatatgtcatattactacatagactgatcaaaagatttccaaaaacgtacgtagaacagcttccaaaagcacggagacgtaaactctaaccatcgcgaggcctaaatagggtttttgcatgtcttcttgttatgccccgtttgccgacatcttgtacactgattaggaatgagtcttttctgcctctttttctgaaagttaaaaaatggtaaggcgcctaaaaggaaggaaaaattgcatagaagtgaggatgggggaaaatcttacccggttttccccagtagatggtatcctcttggtgggtggtctcccaggtggtcctctgctgcgtggaggtatgagaatcatgtccgataactcttgaggaataacaacgtcttttgggtccggtataggtaaaacgggttcttggaaagaatcagaaaacacttgaaggctataccacaatccaacaacagccttcgggttgatgccaaaatgtattgcagcagctagagcatgctcgcatgggattcttaaaattgtgtacctaagacaagtacacgtacactcatctaggacaacgtgaaaatgctcaccagtctttgaagtaacttgataactccaaggcccagacatcatgactgagaactttcctgacgcaggcaagtcttgaaggaaacgttcatctacctccggggtgaccaaagagttacacttcgacacttttttctgccttgctgcaaaccatcgcatgatgacctctcggatgaactctagcatatagacaattggataggcttttgccttgcttaagacattgttcattgcctcggagttgttgctcgtcatgatattgtaccgctcccctttgcagtatgccctagtccaatgctcaaatccaacatcctctaaatactttgcgcatccggggctccgacctcttaactcttcaaagtatttttcaaaatctctaacccgatacactttagcggcgctaaagaataaaccagacacaccgtaccttgcgtaagacaccgatatgtttcgctccaggtgtactatacatgctccatgattggctttcgggtacaccacactaacgcctttatatatggaagaatgcctgtccgagacaatcatcaaatcgtcagtatctggaacaatctctgataatttctcaaagaaccaaatccatgaagcatcggtctcgccgtcaacaaccccaaaagctaatggaaaaatttggaagttcccgtcttgtgcacatgctataaggaggcatcctttgtaacgaccgactagctgcgttccgtctacaacaatgactttcctcatatatttccaaccttttatagacgccgagagagaaacgaatacatatttgaagcgctggcgacctttatcttcaggagtggagtggagatgacagattgtaccgggatttgctaattgtaaaagatacagatatgtaggtaaaaacctgtaactagccatatcatcaccccttatagagtttactgcaacctctctagctctccatgctgaagaatatgagatccgaacgttaaggtcatttaagaccaatcgaggcaaatctacagctctaggacccccttgcgaagaactatatctattcttcataacctcgcctaaaagcttgtaagttgcatgtttacgataatcctttcgagtgtcgatcttgcaaacatggatggaatcataccctgtgattttgaaacatttggaattgggtatgacatgtgcagtcaaatgccacgaacaattgcgatctacgcagaacatctctaatcttttagggcatgaccgagtttgtttgtagcggaagcactttttgattgcaacaagtcgcatggtctgctgtatgacttgcttgtttttgaaaacacttcccacatacaacggatgacctgacgtactcaattcaacttctgtcacatcgactcgaacattggctaaatcatcgaatacaggatccgcatcagtatcgagcaactcattctcagcattatgcaatgtagaaaaccctttatacacttcgtaggcttcacctgttgtcactagaccgtcatcagattcaatatttaacccacttgcagaaaccccttctaggacgactataccatcatctccagttacgttctcagctatatcatccgtgtgctcaactaattcaccttcgcatcttgtctcctctgcacagactctagtgtacgtacattggtacaaaccatgttgacacgtcggggatggagcagaggttggtgtacagtcaaccaaaacaccagtgggttctacatgaggtacatgtgtacccgtcgacgtacacgatgccaatagacgagtgaattcccctgggggttccacggtatgttgagtgtcattcacgacgccctcctcaacatgaccatttccatattgttccacaatcatgtcaccccatttattgtaatcgtattcttcgctactaccttcactaaagtctactgtagggtcgagtgtacttccacggctttcaccatcggtgtcatcgtcatgtacatccatatcttcgtcctcttcgttatcctcgtcctcatgttcatcctcatcaccttcatctatgtcatcctcctcatctacatttatatcttcgtaaccattatgagctgcatcaacatttgtaacccctgtctctgtattgcctccattgccgatagggtaaaaagacacaaacaagttaacagaaggatcgccattacgaatcaacataaatgtatccaggctgatttgattctcaatatatactggagggcgattacttgctatcatatcagacatctttccaggcatccagtaacttattatagggttccattcactaaacttatagctgaaaacatcacatattgtacttgccaaatccgtgtacgtcgttgtgtctataatacgtacacagcgtccgaaacttcctttttcagcttcaaatttccaaccttcttctttgtatatccactcaccaaccataattaatacaggtaactccatacctgcaacataaatttctcatgtcagaccaacattaaataaaaaaaaatcagatcttttttcaaggatttcatttatgtcaacgaagacaaaaagaagcttaacaaaacaatttatgtacttataaatttaactaaacaaaacatagagctttcatttatatctacaaatacaaatagaatctccaacaaaacaatgtatgaacccagaaatttttaaaaacgtatcattcaaatcacgttctcaagtgtaattaggattaacacgaatttcttacccagaacacagattgtctccccttcaatccttcaaactttgtaaaacagcaactgaaaacttcagattcttcaccgtaacacaatttcgattttcgtttcttcaccttaacagaatttcgatttacgttttttacccagaattctaatctaaattatcaaaatatcttacaatataatctctattataataggtaatcatgacttttagtcttgtcaaaactatttagcattaaaaacttctgagcccaacgaattttaaattttttttattccaatctcaagtgtcaacttcgccgaaacccagaaatcatttaatgcatttctcgtcgatgaacagcgtacgtacgaacccggttcttttggattccaacgacgcggtccgtacgtacaaaccgggttcagtttcgtcaggtcgccaggggcattttggtcagtttttggcttaatggctaatagctgaaaggcccagcccactttgtcaaaatctgaaattaaaagtgggtcaatggctactgtgtgcaatttacccttcttgtaattgaataacctcagaaacagttttatttgatctcttgcattattacattagagtagaacttaagaacaaagctttctgcttccacaatcagttccaacactatcgattctcctctcttcacacagttagcattgcaaaacgttttccaacctcctactaatctcattctcttacggtccttttcaaacctcagattcgtagaccatttcacatcatctttatccaagaaactcatcttctttgcattttttatgccattcacctcgccagtttgtcataacgtagactcgtaggcaaaatattagccacaaaactaaagggattcttcttccttttcttcctcctttgaatcatcccagaaaatgacaggaataaatacaagtggtaatagtgaaactgattcttgaatgtcacgtattagaatgagagacgaaacaaaactcaccaaggttggtatcttcactgctttctagttctggggaaagagactcttcattagcttgttattctggctctttggcggacaagctgtagactcgaagccatgacattagccacacaacaagaaggatctagtgacgaagactctgtttctcttcttggattcttcttccattgaatcttcccttcaaacgaagagaacaaatcaaactggtaatagttaaactgattatctctactttaagattcagattctattatctcagcagatttttaaaatatcaaggacagagttcgaaagacagcacaactaaccgaggttgctctagtcgtgtaaacaagacatatattgaatctcacaccaactaggccccaacagtgtaacgtggaaggacagatctctctcttgtctgaaaacaacaatgtcaccgattcgaagatcatgtgataagttacacagggtgtttttcaggagaaagaaggacaaagtagcacacacgtgtgaggatatgacaagtgaggaggttgatgaggtgacagggatcacccgtacgaagggttaaggttgtgccttgggattgctgcttataaataaggagagaatgctttggggaaaagcatgttgaatcaagtggaggattagtcgttatgagactatcgtatggagagattagattcgaagagatgctgagaatctagtcttgttcttcatttgtttgattgttcaatccttgtaattcctgaaccttgagagtttttaattaatgtatggaagtaggcatgaccaaaatctaaccgtaaccgtatttcggaccgtaaccagaccgtttattaaccgtaacccaaccgtaattgtataaaacggttaataaccgtaaccgttaaccgtgaaaatagacccgttacggttaagaaaatatactaaccgtaaccattaattaaccgaaaccgtatcaaaaccgtcggttaaccgtatggttaaaaccttaaaaatatagttgtaactgtgtataattctaaataaataattatttcactaaaatagtaacttaaatcgtttaatatgcccactactacgatcgaagttactccactactctttttaccataaatcaaatcataagtagttcatattattattatactcttaaaactgtttcttaatgttcacaacatcttctctttagtattgtttttgtttggaaaatgtaattaactcaattattataattatgaccattaatttgtttattcattggtttatttaagaaaaatagatagttgattcactataaatatttgaaacacataattacgtaaaataaatattatttgatatatcactatttatttatttattttattataaagattaaaaaatataatattttgtctcatatattaactatatcataattatcaaataccgtatttaaccataaccgtatttaaccgtaaccgtatttaaccgtaaccgttttaaccgtatatataacggttaaggttaagattaacaaaaatttataaacgtaaccggtggttaataaaccgtaaccgtaataaccgtaaccgtaataaccgtaaccgtggtcatgcctatatggaagtttataaagataggctttaatcgagtatttacattatcattcataccactaaagtctatcatcatgtgagagagcaaactctttacaaccgtcagtgagtctctgtccatctatcttcacttcccaagttatcttcgacacgtcctatctcagctccgccgtcttctactcgtctcttccttctatattcttcaagaagaaggctgcatgaattgtctcaagcaacatgtaaatacaaaaccagaccagtttggcagtttattctaaatgagcttctcagaggggcatagacagagataaaagaagggaaagagtgagagagagagagagtaccaaatgacagtggaatccgggaagaagaggcttgaagaaatgttgcttcgccattatcaaaatccataaatctttcagcttctagtgtaggaaattaacacaagatttcgtcaagttcagagtcctttgatgaggagactctttatattggtgaagtctccttggaactcgagagctttgattgatgattacttttggttatagccgcatcagaaatagtttatatactgtatacatatttatttattcttggtttccgaattcattaatgggcttggtttcagagtaagacttgtgaaatcccactactttacttttaatttgacaatctgcggccatgaaagtattgaccataaaatggaatttcactgagacaagaaggtgtgctgcaaaacgaaacattgcactatctgctagtgatcactgctaattagtataatacctgaagctcattcttcccatatgtggtttcttggcataaataagatcttccgtcggagcaacacttgtactgtctgcaatttggagtgatatacaattaagtaaggatgtaaacaatacgaattcgtgtacgtacacaagatttatccacattaatactcaaaagctgatttttggcgtaaacagagattttcaattcaaatttttaatctccagacggaaaataagagaaacttatccagttccaccgttgcctttgtcgaagacagttttctcctcggggaaactctgagtacccgcttctccttctcagccataacgaagttgctatctcgcgccggaggtttctcaattcctcttcgccggaaaaagtgcgatttttgcttcgccggattttggagttcactaattgtcgaaacttcgccgaattttgaactttgacttcaccggattttagagttcactgaatgtggaaagttcgacggaaatcataaacccaacaatttgaagtgatgtcgaaaaacgaaggagttgatgaattcgaacttatttctactcaaatctctcttttgctttctctttttcttcttcttcgatttcttcgtttcaattttttttttttttaaattaaaccgcaggaactaaaccaaaacaaaccgcaacccaacggtttggttgatctcattaggagtatatttgtcataaaacaaatgaagtgccaaaaattgagattgaaatctcactttgctaaacactgaaatgaaatcttttttttgccactttcgttaaaatttcttttgttgtttctatcgtttattttattccaaggtacaaaatgtattttacaaaaaatagagttccatagttgacttcaccaaacaaaatgcacataacctcaaacataacctagtctttggtgaagaagtagacgactagtgacttctcctaagaacagcaagagccttaagcgaatgcttcatgactacggtaaactcaaacttctccgtcaagtccacttcatgaccttggacctctttccactcaaactccctcaccatattcgccacatagtactcaagatgcagcatcgctagcccaatccctggacaaatccttctacccgccccgaacggcatcatctttatccctctgcttccggttatgtccaccgcttcttcttctcccataaacctctctggcttaaacgccattggttcctcccacaccattggatccctcccaatctctgccaccatgaaattaattgttcccttcttcgggactttgtatcctcccaacacagtgtcctcagttacactgtgcgggagtacaaaatgtcccggaggatgtctccggagaccctccatcaccactgcctttagatacggcatcttttgcgcgtcttcttcctctacttcctttgcttcttccccaactacgcttttgatctcctcgtataacctcttctgaatctccgggtttttcaccaagttcgccatgatccattgcaacgcggtggccgttgtatcagtcccaccgttgagaaactccgaacacaaactaacaatctcatcttcgttcagcttcctcttctcatctggaagctccagctcaagcagagtatcaacgtatgattgtacatacactttgttgtcttcttcttcctctgatgatctattctttctctcttcaacaatctttctccgagcacgaatcaacggaagcaaaacgtcatgctgctctctccgcatctggaaaaactcttcccatctctttcgcaaaatcaatttagtaaacttaggccagagattgagaatattgaatctggaaaagccaagaagctgtcgtctctgaacatattccacctgtttgatttgtttctcgtcaagcttatctccaaaacacatgagaacaagaagcgcaaacattgcatagtgaagatgatcaacaacaacaatcggttcttcacctctgcttttaccaaatcgatcaaaaagaatctcaagaacccaacgccgcgcgtgagagtaagatctcacgcgcgaggggtgaagaatctcagaagtgagattccggcgaagaagacgccacgtggctccatataaactagagctgatgttatgttggttactcgaaataatcttactgatcggagcagccggtggacgatcagcgaaaacggcaccgttcaaaacgagagcctggtgagcaagagaacgatcggcgacgaagatagcggggcgggaagtgatgcgaagggtgatgatgggaccgagacggtggtggacggagcggagatagttgttgagtccacctaagccttgccggagccattggagggttccaaggaaagggaagaagttagggtcaggtggtaacggaagagaggaggagtcacggcggcgaaagaggagtaaattgagaaggagagagaggaagagagagcccaagataagtaaccatatctccattttcagtttgttctctacttctctttgctgttttttctttgcttcttcttcctttgtattcgtgtttatataatacacgtgtgtgtggctaaattcgtgtaacaaaacttttttagttaacctacgtgtaaacaatttatcatcagagagtgtgttattcaactataacttaattttataataaggcagtatttattattattattactatcttaagtaggattgattttttaggatccaattcaaaatctattctgatttgtttccaaatattttgatacacaatacaattttggaatttatatacagtaataatttatttattttaaataacatgtgatatataggaaagatatatgaaattttacttttatatattattttcacattaagtgatggcagatttataattttgttaaaaaaatatgtcacattgtaacaaatttgttgtcacaaaattaattactagaatgaggtctaacgataaccaatttttttaatgttatgatagacttgttttatgttataacagattcttgtaattttacacaatatctatcgtttgatggcatatttgttttctaaaatataatgttttgtgttatgacagagttattttatgttgtgacagataaatttatattaccataaatctgtggtttgatgccaggtttaataaaaaataaaataaattactggaatgaccttaaattttttttatgttacgacagatttgtaatttgaaatccttatggtgactgatttataattttcttttttcataatttttttaatagaataatactaactactgtaacagtttttttatttggaaaatcatattatgacagatttgaattttttttgtcaattgtttttagaaattcttttaaataccactaaaatgagtttttccaaaaaatactataattaattttatttttcaaaaatatcacaaatctaaaactaaatttaatattcaaaactaatttttatatcataaagactaaaccttacacctaaaaactataccgtaaatatataaaaaaaatctataacttcaaaaatcaattatggttttttttgcatatttttttgctataataatatttatagtggtgacagttttttttctttgtaatgacagacttattagagcagttaccatatttacgattaaaacattaaatgtcgacatatagagtcaactggtatttttacacaaaatttgtgttagtatagtttttttgtttttttaacacttatgacattatattgatgagatgtactcaaagtgtaatgagtccgaaatacaacggggtacaaaatagaagaaagtatatccttgatcattttggttgtgatacttagacaatgtatctgccgatctgttcacttgtcttggtatccacctaaattgaacttcagagaatctccgtttccatgtttgaatttcgtgcagccagtttgtaatatcgaatctttttgtcttcccttgtaacacgtccaccagaattttgcagtcgccttcaaatataaccttagtgtgtccttttgcccataaatgttgcattgctgaaaccagtgaattgcattcaacttctagtgcggatgtagcttgtgtaccttgaatcttccctgctcctttgtagtgaccgaactcattgcgaatgatccaggccgctgatgttctttgaaggtgttgtatgtagcttccatcatagttacattttatccagcctgcttcaggccgtctccagtgaagaatacgtcgacttccattcgcagtaggagagtgaaattcctaagacgacgtgtatctccaagagtactccattcttcggcatcgtgatgtgcgcttgatagatctttctcccacgtgtttgcttctctcccgaatattagtttgtttctgttcttccagatttgccataaaatccagaagggaagttgtgcctgtaactgattgttcgagctttgcttgtgccattcgaagattatagacatctttgtttctaagcttactcgtgagtctgtaaggtcttgaatcggaatggttgatgctctccagatttgcattgcgtgaggacaagtgaaaaataggtgatctgtagtttctgtctctgtgacgcaacgtttgcagtacttatccggattgatgtgtcttcgctcgagttcttctcctgtagcaagtgcctttgagagcattctccagaggaaatgtttaatcttcggtgtcgttgtcgttttccagatacttcttttcaggtgtggatctcctgttgggggtagtgctcgtggttcgtcactgtggaggtgtgttgcaagccaataacccgatttaactgtgtaaagcctcgtatctgtgtaatgccatcccaaataatcctttgattgtgactggctaatctttaaagccaaggtgtgcggaatatcctctggtgctactcgttcctgtagtaatcgttcattccatccagttttgtgtgggaggaaaaagtcctgaagcgtttgaaactgtggttgagtgtgatcaagttggcgcggaggtcggggagggtgtagtggcagccatggatccacccaaggctgaatcgaagttccatctcctactatgtagcgcattcctttttttaatagatctctgcccttcagtagggattgccatccgaaggagctttgtgagccaattgaagcgactaaaacatttgaattaggaaagtacctcccccgcaacacacgtgccattaagcattcaggattatgaaggattctccaagcttgtttagcgagtagtgcatcattgaatttgccaatatcccgaaatccgagtcctctttcttcttttgaaaatttcattcgctcccaagccacccaatgcattgcgtttccttccggttgagtacaccaccaatactgtgaaatgatgcgttcaatctcctcacatatgtgtttgggaagcttgtaacagttcatcgaatataccggcatagcaagggctatagcttttagcaagacttctttacctccatgagaaaggaatttattcctccatccctttgttttctctctgaccttttcaactatgtactggaacaactcaatcttctttcttccaaattgctcaggcaatcccagatacttgttacatcccccgtcattatgaatgtcaagagttctgcgtatagccgtcttcgtcgtatcttgtaccctttttccaaaatgaagagctgatttactggtattgaccttttgtcccgaagctctttcatactgtgttagaatatccttgatagcaagacacgatttcatgttggcttgacagaaaaacagggagtcatctgcgaatagtagatgacttacttgaggacttttattacttatcttgattcctttgatgagaccttgagtttctgcctttttcatcatatgacttagtacctcagcacataatataaagaggtaaggggagaggggatcgccttggcgtatgcctcgttccggctgaatgaatccataaggagcaccattgatattaaccgaaaaggttggagttctgacacaagtcataatccattcaatccaacgaacgtcaaatccgaatttgaacattgcggcttgtaggaaatcccattcgagacgatcatatgcctttgtgatgtctgtcttgatggccatatacgaatttgagcatcttttcttcactttaagagcgtggataacctcatgagcaataatgacattgtccgtgattacacgccctggaataaaagctgcctgttcctcagagataatacttgaaaggtgcttcttcagacgggccaccagaatcttagaaataattgtgtagctcacgttgcataaggcaatcggtctgtagtcactcagaagacgagaacttgctggtttcggtataaggcacaagtttgtgtggttcatggatttatcaaaaatgccattctcaaaaaagtcatgtacctcagccatgatagattgtttgatgtcatcccagtaatggtgataaaatgcaccagtgaatccatcagaccccggggctttagttccgcctatagaaaagactgcttctttaacctcctcttcggtaatcttctttgttaggtctgcattcatatctgcggttactcgttgttggaagccatttagaacatagtagtgattgttatttgtcgttaagtcactccgaaagagcttggtgaagaattgttgcgccacttccccaatattagaactgcctctgtgttccacattcgcatcgtccaagatagagtacattctatttcgtgcagatcgtgtttttgcagaggcaaaaaaatactttgtgttacggtctccacctgacagccatgttttccggctcttaagtctctagaattcttcttcagcagcataagccttcgacagctgcaatctgagctctcggatgtgttgagttgttgtgccatcagagtgagctctatcaattctgtttttgagaagggctatatcttcttgggcatttgatcgatatcgcctcttccattgagatatttctcttctgcaggcagtgagtcgtgatcgtagattgtcgtcctggtgaaagattctccggttccacccacgtctgacagcatcactgaacccatcacgctcaaccattcttccatcaaaacagaactggttatgcttctgctcaaaatcgctcgtgattgttgtgatcactggtcgatgatctgattctattaactcaaggaattccatgtgggatgcgggaaattgagttaaccattcgttattcaccaaggatcgatccaagcagcaggcaacatcatgagtgtgtcgttttccgacccaagagaaagggtctcctgtaaacttgagatcatggaagtcacaggtttgtatcattttcctgaaatcaaagaaagagctttctggcctcaagttgcctccttttttctcatggttgcctcgtatttcattgaagttccctatagccatccaaggacctgttctttgtgttgctgttcgttctaatctttcccaaaccaagtgtctatggataggatttgggtgaccatatacacaagataaatagaacccaaatccattaatattaacaaaagtatctacaaggtttggggattgataaagaacagaatacagaaatactacttttccacattaaagcaattccaccacttagaccatttggaggaaccattacaaccctatcataacctacatcgctgcaaatatctctgacgatgtcattcctttacttcgtttccatgagaacaatgatgtctggagagaatttcttctttatctcctttagacgtcgaactgcgaggtcattgcccagtcctctgcagttccaagcggctgtcctcatggaggaagagggggttctgggcccaccgcgcctctccccacgtcattcggctgaaccgtctctccggagcaaccactgctttccccagcctcacggatcaccatcttagaaggctcgtgttcttcatcttcttcgatggtgtcctctctcttgcgtttgcccctatccgctgccacatcctcacgaacatagtctctgttcactccattatttgtttccatctctccatggtacgtggagtaacgacatggctcccaatcctggaaatcttccacggcttcatgatgggcattcatcactaatgagagttattttatttattattgtccacgtatttattttgtttttaatgtatttttttttttttttgccttttacagttcctaatccagatttaaatctggatataaccctataaattataagatatactcgtccacataatattatcaagttttttagttttttagaaaataaaaatctattctaaaatttgagaaaatcaagtgagataattttgtgcctcacaagtcacgagattacttagctcggaagggttttgggctctacgtgtgaaaggcataagatattttagttacttttatgctttacaatttacattactagagtacaaacaaaacaacagctatcatggatttttatgacatcatcaatttacgtgtgtcatttgagatttataatctttattttattatcacttctattttgttttaatgagttcaagatcttttcttgaaagacatatgaagactttaacccaaaaagctaagtattgtctttgatgaaactttgaaatcgagaagttttcaaaattttaaacgatgtcaaccagtattttttatttataaaacagtatttttctctaaatatttgacaagatttttttacccccgcattagctaaaacccattttcgtacatatgtttacaaacagtgtccgctcaacaatttcatgggtgtaggataatttttttttatattttgttataaaattttttgtatgataatttagttaacaaaaaaaaaaaaaatgcattaaaaaaattataggtccattctaaattttatttttgtgttatatctaatttttaaaaatattttttaaaaaatatatgtcccttaattgttaaaacatgggtttggattcttggctgtcgcaccgcttgcccctctatttaaaccggcactgtttacaaattaaacattatagaaaataattcttaaaaaccggactaagtaatgaaaattttaaattacaaaaacgaagaatactaggaagctagaactagggaagaaaacttgaagcaccacattagtcaaagagatcgaagaaagaagccattctctaagaaaatttaccattaagattgactatgcactttatttaaaacacttgccaatatatctttttcaaaagtttttttttcataactcatattaagactttcatcttcaaattaaagggggatgagctttccggatgatacttagacctgagttgagtcaaaatcgcatctccctacaaacaagttcatcataaaccagtcgtagggtccaaagactttcacgatccattaaactgacatcttagtgttcaaagatatttttcttggtgttctaaaacatatatcttctgaacatggctcaattgtgactcctctcaagaaaatttaaaggacttgggggaggactatattattatttttagttccccttaaatatccacataataattactgtttgttgttttctttttaattcaaacatacaccattccaaagagacctttgatagttttctttactaaaatattattgaaaattacttataagatttattattaacatgttttagattgaaaattgctcatacaggcacataaacagattgagatgtacacacaacaaggcttctcgaatcttcccatatgcatgtcgaaaacgcagtactcattctcacatgatacatcaaagaaaagagcaccttcagggtttgtattgccaattcgggatgttagaggaagcattggagctggtttcatatacactacaaaaaaagtcctcattgatagcagtagaggatagctcattttcctcaactgctataaaagatgaataaaatttttggttactttttaatagcaccttataaacgctaagaccgtaaatcctctagcgggaatgtaaaatactttagtccgccaacacttaggtaaaattattcacttcagcgccaacacttaagcaaaactattcacttccctctacagcttcgtgaaaacctaagaaaatcgagaagaccaaaattattcacttttgccttagatctgtcgaatccactcccaaaatcgattcaacctaaaagctaagatctgtcgctggccagaaattcggattctccgccgccacattctccagctcagccaccgttgagctcaaattcaaggttagtctttcttccttattccttattaatccatttcagcttccatctttctcgcattttgacctaatctcatagaatcgactttcattttgcagccaccagtgagctctaaccttgtcgcagccaccagtgagctctaaccttgtcgcagccaccactgagctcaaaatcaaggcatgtcttactctcaatttgacctagttctttgtgacgatttgattttggggtttatatgcatcgatttgttatatttagggcaatgtgatttgaatggaattaggaagtgaaacttttcttttttcttatactgattatcgttttggggtttatatgcatcgatttgtgatttgatttagagttcttaaacgttttgcttcaacttatactcataatcgtttttttttatcaagtgttggtgattgcaatgtcgaggaagtgaaacttttcttcttctattcacacgactacaggttagtcacacgacagattcaattgttctgttctttacttatgagttgtatgaacttaagttgttgtgattcttttgttctgttctttactgaagttgatgtgattgttgtcgattggttttattggctgagatagtgtaatttgttggtccttaaacatgtgtctttgaattaatctgagatagtatactgtcgattgtgttcttcactgaagttgctgtgattgttgtcgattggttttatttgctgagatagtgtaatttgttggtcctaaaacatgtgtctttgaattaatctgagatagtatattgtcgattgtgtttgccattgtttatttcttaatttgatgaacttgataagagataagtttgtatattggtccaagtgcacttgtctgtgatgcgatttgagttactgtcttctatagtttaatgttgcttatggtttgaattgcttttacaaaggttttaattaagcttagaacatataatgttggacaaggcatgggttcgtctatgcaggtaagcagataattaatatgggttagttttctgattaggtttggttgctttaagaggttttttatttttcctgtttacttgaagagctgatcctggatatgagaaaggtgctcagaaattcgtaaccgatgtggctgttgcattaggagacattgacatgatagtatgtccctgcaaagactgtcgtaatgtggaacgaaagtcaggcagcgatgtggtggatcatcttgtaagaagggggatggatgaggcttacaagttgagagctgattggtatcatcatggggacgtggactcagtggctgactgtgagagcaacttcagtcgttggaatgctgaaattttggagctataccaagcagctcaaggttttgatgctgacttaggtgagattgcagaggatgaggacataagagaagatgagtttctagcaaagttagcagatgctgaaatacctctatatcctagctgtttaaaccacagcaagctgtctgctatagtgactctttttaggatcaagaccaaaaatggttggtctgataagagtttcaatgaactccttggaacattgccagagatgttgcccgcagacaatgtgcttcatacatcattgtatgaagtcaagaaatttctaaggagctttgatatgggatatgaaaagattcatgcatgtgtaaacgactgctgtctatttagaaagaggtacaagaatctagaaaattgtcctaaatgcaatgcgtcacggtggaagagtaacatgcaaactggagaagctaagaaaggagtcccacagaaggtattacgatactttccgataattccacggtttaagagaatgttcagatcagaggaaatggccaaggacttaaggtggcattatagtaacaaaagcactgatggaaaacttcgtcaccctgtagattctgttacatgggataagatgaatgacaagtatcctgaatttgctattgaagaaagaaacctgcggcttggcctttcaacagatggatttaatccattcaacatgaagaatactaggtatagttgctggcctgttctgttagtaaactacaatttgccgcctgacctatgtatgaagaaggagaacataatgctaagcctgcttattcctggaccacaacaacctggaaatagtattgatgtgtacttagaaccccttattgaagatcttaaccatctgtggaagaagggtgagttaacatatgatgccttcagtaagactacattcactctaaaggcaatgcttttatggaccatcagtgactttcccgcctatggaaaccttgctggatgtaaagttaaaggtaaaatgggttgtcctctatgtggaaaaggcacagatagtatgtggttgaaatatagcagaaagcatgtgtttatgtgtcatagaaaagggttggcaccaacacatagttatagaaacaagaaggcttggtttgacggaaagatagaacatgggagaaaggcaagaattctaacaggtcgtgaagtttcacaaaccctgaaaaacttcaaaaatgatttcgggaatgctaaagaatctgggaggaagagaaaaaggaatgattgcattgaatcagtcactgatagtgacgatgaatctagtgaatccgaagaagatgaggaactagaagtagacgaagatgagttatcaagatggaagaagagatccatttttttcaagctgtcttattgggaggtaaatgttaatttgtctattgatcatgtaagtgacgtttatggtgtgatccttatgaactgtttttgtattgtctaggatttaccggtgaggcataacttggatgtaatgcatgtagagcgaaatgtgggtgcaagcattgtatctactttgttacattgtggaaaatccaaagatgggttaaatgctaggaaagatctgcaagatcttggtgtaaggaaggatttgcatcctaacgcacaaggaaaacgaacataccttccagcagcaccttggtctttgtccaaatcagagaagaaaacattctgcaagcgtctatttgagtttaaaggtcctgatgggtattgttctaatatatcaaggggtgtatcattagaagattgcaagataatgggactcaaatctcatgattatcacgtcttgatgcagcagcttcttcctgttgcactaatgggtttgttaccaaaaggtcctcggacagcaataatacgcttatgctcatttttcaatcacttgtgtcagagagttattgacatagaggtgatttcagtaatggaagctgaaattgtggaaactctttgtatgtttgaacgatttttcccacccaccttctttgatattatggttcacttgactgtacatttgggaagagaggctcgactaggaggaccagtccatttcagatggatgtatccattcgagaggtaaaatttctgttttttagtacattgttacagtttgtgtgaataatgtttcagatttttagtatgttttcatagaaaaatgtttctcactgccactttgtaggtatatgaaagttctgaaagactttgtacgaaaccccgcaagaccagaaggttgtattgctgagtcttatctcgcagaagaatgcatgcggttctgtagtgattttctgaaaaagactacaagtgttgaagagaaaccagagaggaatacagagtatgagaacaactccatactagaagggcgtccaatatccgcaggaacttcatttatgctcactgaagtagataagaacatagcccatcttgctgtcatccaaaatatggctgcctttgatccttatgtggagtaagtactatctttttaggaatttttctaatgctcatttacgaattaaactaaatatagcaagctgagttttcaactgattgtgttttacagcatgcacttgcaatatctccaagacacaaatccaagatgtaaacgtgatgcatcattcttatggaatatgcatgccaagaattttgcatcttggataaaagaacaggcaagtacttccacgatctgaattttatggtttatgagaatataagtgactgactttctgtttatcatttggtagatacctctttcttcaaatggacatgaagatacaattaaatggcttgcatatggtccacgatgtagtgcaaggtcatattctggttatattgtgaatggacaaaggtttcacacacggtcacttgaaaggcaaagtcagaatagtggagtttattatgaagcaacagctatgtgtagatccagtgctaaagatacagcacaagttgttgacttggtatcgtactatgggacagtaactgatatcatattgctggactacaatgtgttctatgttcctatatttaggtgtcaatgggctgttagaggtaatggggttaaggtagaagatgggttcacattggtcaacttgaatcacagtcaagtcagctttttaaaggatccatttatattagcatctcaggcgaagcaagtcttctattcaagggtagatgattcatctagttggtatgttgcaatgaaaggttcatcaagaagatatagtaaagaagatgctcaggaaggaaacgcagagattggtccattaccagcagatattgacatggacgctgaaatggatgaagctgaatatgctagatctgattgtgaaggcatttatgtgccaaatgtagattcttattcattttatgagtcattgttctatgccttgcatgctctatgtttactcttgcttttttggtttcagatttcttttttagaagtatgattgacatagaattctttttttgaaatgcaggtgaactgaaatgggtaaagcaaagaagaaaggtggacagaaaagaaagaagaaagctgtagatgatgagccagagtatatcggcaccattgagccccaagatacagcagctgagcctgctaaggaaactgagcctgataatgaaactgagcctgctaaggaaactgagtctctaactgagcctgtaatagaccaacaagctgaggagaatcctttagtgactgataaggatgggctgaatgaggaagaggcgataggtgagatggaattgtcagaaggaactgagcctccggctaagcgtaggagacaaaggggaccaacaaagatgaagaacatcgccaaggatccaactgttagagaaatagttgagtacactattatgggagatcctgttggtccaggttcagttaaactggcatcatatgtaggcacattggtacgtgaacatgttcctatcacaattgaaacttggaaggatgttagtcaggatatgaaaacggttctttggaaatctgtgcaggtaaattcttcttttcagtctttttttctgcttgttagttgtgtaaaggttgatttccatactttgtgtgatggtaaatgattgcaggcaaggtttgagcttgatgaagagtttcaaagggttgctgttctaaaacaaatgggcagtctgtggaggtcatacaagtcccggactgtgaaagatattaatctggctcctaataatcagcaaaggatgaatctgagacccatgaatatttccccaacagaatggcgcaaatttgttaaagtcaaaactagcgcagcctttaaggtaatgagttggaattatgaccattttaacttttatttgtcaattattaacatgtttaattggtaggttgtgagtgagaaatacaaagaaaggaggaggaatcaaatacctcatactacaagtcgtaaaggaatggtgagattagcagaagacatggtaagtaaattgacatgtaagttgtctcttctggtaagaatgcattctcatatatttgaatgaaattttttttttgacacagaaacttgaaagtggagatccatcagaagtgacaaggctaaaggtctgggtaaagtctcgtaccaaaaaggatggtacgccggtgaacactaatgctgctgaaaagattgtaagtaatcactgcaagactgatcatgatttcagttatcaatattagtagatgacacaatttcatattctgtagagaaaggcggctgagctggttggaaatgatggtccaccaacgtcagcaaatccagaagaagatcacctctctcaacttttaggaccagacaatccgggtaggctgagagcaatgggtagaggcatgagtaaaacaaaactagcttgcctccaagtcaagagcaagtgcatgactgacatggaagagaagcaagttcttttaatgaagaaggtcaatgagctgcaagatgaacttaccagaataaagcagagacaagaacctgaagtgggtgaaaactctgctgctgccagggtaagtgattccttcttcctttattccatcagttttggaatcacttctttttattaaagtttggccttcttttgtagagtgtaaacagaagaacaaacccaaaatgtctgttggttaattggtctggtcctgaggatatcattggtgaggggcgaattctttcttctgatcctgatgacgtggttaatgactgtcgtctaggccctgtggacttgaaggtgttggttgaagctgctaatacaccagatgcatttctatggcgacctgcacctaacatgtatactatcacggaagctgttggacagatgattgcatggcctgcatctaaatgtgttcttgtagagaaggatatcgaaatagaggacattgtgcctttggtaaactgcagatttcagcacattcttagtcagctttttgatgagttcatgtttgatctagtagagacagagtcttaatttgattttttaactgaatgtgtttgacagggacttagaggaaattctcagaacaaatgtaagctattggatttgtcaacagatgaagtcattgttgctgagggtcgatggcagacacaagagcaaaatgcattggttaatggacttcctcttggaccgagcgcagttaaagtttttgtggataaagtgctcatgccagaaacatttgtatggaggcctacaatggaaatgacgtaccttgaggattgtttgaaggcttttatatcatggcctgtgcataaagtggtatttgaaaatctcccatctgctagtggtaatcagaagtcatctcttcagccctcaggatcagcttccaaatcttcagcaggggcaaaatctgcagcttctaaatccacaagttctaagtcttcagcttcaggatctgaaactcctttggagaatgcaaatgctccaagctctacaaatcagaaaactctacagaaatctcaggtaaatgtttccttagtatcttgaaattgcttctgtcatattgaatcagtctttggtttattaatgttatgaacatggcagtgtttcaatcaaggcgtttctaaggaaaatatgaagtgcaagttgatggatattaccggaaagaaacgagttgtggcggaaggacgttgggcaacaaacgatccaaaacagaaggttcactttgttccattgggtgataatgtagttaaagtgtgggtcgatattgtgaaagtaagcgatgtaaaagtgtggaggccatcagatgaagtcgagatcatggaagatgcacttggcacagccattgcatggccagaggataaggttatcatgtcttgaggtttactatactcttgagacttttgttgtgtttgtaattcgttttggataatgtagttaagtagaatgatgcttttgttaaaaactttcggttagttcaatcattacaggttatcattgttatgaaaaacatatattatcgcagacacaaatcctgctattaaaaactttaaatgtaatgtaacgctttcgtaatgctatggttgaaacacctaacatagcgaagaatatggattattaaataatttagcaaaaatattggtgttctctaataaagcgtttcattagagctatcgtataaaactataacatagcatacaattctgacgctatcgtatgtgggggtctacaataacaggggcataagatagcttttatgaaaacgctattaatgacatattatagcgcttttcactggctaataatgttgatatttgttgtagtgatatccactggttggtacaatgagtacaatgcctggacttcctacaagaccttgtttctatgagattgatatcagtcaaagcttcaaggcttcccttcaccgtcgttcctcacttcctcaataaaaatttggcgattgtactttgatactgagtgtttttcctctttgaaatgaataataataaagtatcttttcctgttgattaattaatctctgaaatactcattatttgaagttgaactcaaggtaacgttacacatagaacttgtgatgttcaaaaacaaagcataaagcaaatgagtgacaatgttttcttttgaaaaatcgttttatgtgaaatcatcagaggcattggagatttatgaatcagaacatcttgcagaaatcatgcactgagaggcacaaattggatgccatgccgaaatgagggcatctcgattcacgtattgtgggccgaatagtaaggcccatggaagattaaagtcaattcaaattcgaacgttgaaagcattaaatccaaagacggaaacggaagagttaaaagagaattatggtgtataattaagaataattactaggtttttgtataaataagagaggtcttggaccatgtaagacacccacaatttttctagcaattttcgatagtcattttgatatcaatttttagcttttacattttatttttgtcctcaaaaattaatccatctcacaaaacaaataaatacttgagtgtgtgaatccgacatccacaacacttttgcctgaaaaaataattaacataaatgtaaagtatcctaactttcccattttaaataatattgtttattcaaattatctttaaaaagttttgacatatatacacccaaaagtatatttttgaaaaatctaaagttgtaaggtaataaggtaatatatctaaggtagactaaagatatattgaataacaaataaaaaatctaaagtttttaaatgactcaaaattggacggtatagatgaattctaacgcctatccactacaagaaaacatgtgattgacgacctacaagtcagtcgtttagtagtcgtaacaaaagctaatacgactaatttgcgactaatgactgtagtcattaatccatagtcgctaaaaacagtagtcgtttattagtcgttggtcaacgacaataatacgacaactgaataaacagtgtaaaatcgtcgttacgtagtcgtattatgtcggcgactaattgacgactatcctacgattatttgtactgtactgagcgtgtgagaacatgtagtcgtttcgtagtcgttaattgtgtacgacgactttacgaccatgttgcgattaattattataaaccctgggtatgtttccagttgtcgtaaagtagtcgtaaatatgtttacgactatttgacgactctttgacgattacaagtactttgccaaggatttgaaactttttgtcataacatagtcgtataagtatatacgactattggacgtcagttttacgattcttttatgactaatttgttttttcttatgattgtcgtaaagttatgtgactacttgacgacgatttagcgactatattgctacttatttactacttttttgcgactaattgtttggtccgaataaagatttggtcatcaggtgatgggtttcttgtttgttcttgtttgttcatcgattgttcttgtttgttattgatatgctatacaatatgaaaacactgcttatatattgaaaatcaagttcaaaacataaaattatcttgttcaaacatacaacttattgaaagatacaattagtgtttggaaacctaaattctatggatcattagatgggggagtaattgggatacgctctgtggatgtggaagagtgtgtggcaatgaagtccaagaactgcggatcggtttggcggagatacttctcgactaaggacaagtgctcgagcttgtccttttgctcagctgtgactcgggctgtctcggcttctcgggcagcaatctcagcatctcgcttctcgttatatgcagcctgttcttcaatttgccgctgagcttcctgcagccgttcttctaaggctttaaaggttgagtctccggggagttggcggttggcactgcctagagtttctttaagacagccaagtcaataaggattgcctcttgcatccttttctgtggactgcaagaaataaagaggaagataattagtgacagatcctaaatgtctctaagactctgaaaaagacaaagaacatcttacctcgagaaatatggctgcatactcatctagtgtgagatcccgaggacgtgaagagccatcagacacaacagaagcagccgcctctagttcagacagcttctctctcacattctgctcatacgccagagcaatcttctctgccttctgatcaacataagtcccatccgacttagtgtgtgtctggatgaacacctcaccaagagggacaagtcttcccattttttcttcctgcaaacacagatcacaagcttcattactatcaacagactaaacatcacacacagttaaacgaacatcactaaaacacatgggaagattgcagaaacacttaccaattcatcttggatttcttggaaagactttggcccagagtagtggacgtgaggaccgagaccgttacggtcagagagacgagctttggaatatgtcttactccttttctgtgcctcttcagtgtcccagtagtcgcacatggttccccacagagtttctccaatccatggaggctgctctcgagttctccttgcggtgctaaccatgtccttcaagcgcctcttaacgatctcattgaagtagtattggactgtccctgttattaagggatcctagtggtgagttttctacaaaaaaagtgtgaagttagtgaacaaatgacagattaaatagtacagtctaatgaaagttgaagaaatacaagaagcttaccgcaaactctaaaaacaatctttctcttttatccaatggcacacaggaccaattatagtagggagcattgaacttttgagtaaaaatccgtgtgatctttctaaccaatttagatcctctgtcgcgagtaaacctccaaacacatgcaacacagacagaaagtaaacatgtttaaaatccaaaacactacaactacagtagactctataattgaacaaaggcagattctacaagattctagacaagtataagccgacaagatcacacacagaacacaatagtcaacataacaagatcatagacagtaaagaacaagtataaacaagtatagaacaaagacagatcctcaatgtcaaagccgaaaacatgctaagttcaacaatcaacaaatgttccacaattaagttcatgattcacaacagaacacaataaagaacttaacaagattatagacaagtatagaacaaagacagatcctcaatgtcaaagccgaaaacatgcaatgggatacaatcaacaaatgttccacaattaagttcatgattcacaacagaacacaataaagaacttaacaagattatagacaagtatagaacaaagacagatcctcaatgtcaaagccgaaaacatgctaagttcaacaatcaacaaatgttccacaattaagttcatgattcacaacagaacacaataaagaacttaacaagattatagacaagtatagaacaaagacagatcctcaatgtcaaagccgaaaacatgctaagttcaacaatcaacaaatgttccacaattatgttcatgattcaccacagaacacaataaataacctaacaagattatagacaaagtgaagaacttaacaagatcacacacgagtttagaacaaaggcagattctactatgttacacaaaccctaacaaacatccaactccaacaaaggcagattctactatgttacacaaaccctaacaagccattctacagaccataacacgagttacactacacaggctaagaacactagaataaaatagaggaagaaaacataccactcggttttaggtttgggaattggagacaagacacaacaccactgctccctgtttggcacagagagtttcgattgcagagccaacgccgagtcttcttgtagctccggcaacgtcccaggaacttcctcttggaagttgttcccttgagacgacgggtggctgtttgctggagcgtctgaatctcgcgactgaggaggagtttgctgaggtggcgctgttggcggcggagtgtagtggacctcttcagatagaggcgaaggagcttgatgctgtggttgagtcgttgagttctggaagagttgcagaggcggtggatagttgcggacgtggggtgcagacgttgaaggtccatgttgttgagccggctccgtcgtaggaacttgaaccgccggcgccggagtgaagttgtattggggaggaagatttgcaggtcttgatccgccggcgccggctctctgagtgacgttcggcgtcatcttacgcttccgggagccacctcgaccggcgataggcatgatagtgagccaaatgaagagattgaagagaagaagaagaagaagacgaagcagatcggagaagaagaagaagaagacaaagcagatcggagatcggagaggttgaaggtgagagatcgaagaagatcgatcgatcttataggaagaagaagaagatcgatctacaaggagaaaggatcgatcttagaaagagttttggggattagggttttcgagacgaagaagaagaagaagaggaggttggatcgaataggtttaaggtgagagatcgaagaaaatcgatcgatcttagaaagaagaagaagaagatcgaagaagaaagagaattgggggttagggttttgcgagacgaagaagacgaagaagaagaagaaatggctaagtgtttggctcgaagagaaatgactcgatttagggttttcaacacaaaagaggtcgcataatagtcgcataatagtcgcatactaatttgggtttgggcctcaaaattttgaagcccaactaatcaaacaagtatcgttgaatagtcgtaattttgtcgccaattatactgggtttgggtttcaaaatttcaaagcccaacaaatcaaaacttgtcggtatttagtcgcaatatagacgcctatactaatgggtttgggccccgaaattttaaagcccaacatatcaaacagttgtcgcataatagtcgtcgttttgtcgccgattttaatgggtttggatttcaacgtgtagaagcccaataaaacttatcttagtcgctcattagtcgcataatagtcacttttaaattgatataattatagatgtgaagaaatatttgtatatcataaaaaagttcaatgattttatgaaacaaaattcattctaatatttattcaaataattatacatatattaacacagttatacatcttcatcttctacttcatcttcgtccgaggacgataaattacatcggaattcgtcttctggttcagcatccccgacatcgtaatcaaggattattgggtttaagttggctaccggagtttcaagaacaagatcttcaattgtagtgagcaaaacatcatcatcattttctgtttgcaaaagagttggatcattgttttcatattctccagaaatgtttcccctcggattgacttttagaacattgagccaaatgttctttggtttcttcgtatatggatacggaatataacaaacttgatctgcttgagatcctgtatacatatatcaaagatagattattaataattaaaaaagaaacatattttggacttaagaataattacgtaccaagaataaatggctcgtatttattgtatttcctcgtagatagaatgtctacaacgccactatggcttcgtcgagtgcctctcccgatctttgggtcatacctcttacacttaaaaagtgtgatcctcaaattgacgataccctcatactcgagttctataatatcagttaaggtaccgtagaaatccgcttcatctgatgaatcagcgtaattttcacctttaacacagaccccatagttacatgtctttcgtccagcgccgtgattttgcgtatgaaacaaatatcctcttgtgaaatacattggccaagttttaaccttgttcaaaggtccttgcacaatctcttgaacccaagtaggaaatggagaagtagtgttccagtatgttacctacataatagataaacaatatcaattagtatatattaaatgatcacctttcgaatgaaccaaaattgatgtagacttacatattctttaacccatagatgatattcttccgctcttctcgcgtagagttctttttcgggcaagcatggatatttggcagaaagataatcttcgaacatactacatttacaaacgaggaaaattttatcaaagtgatcttagtgaaaatttacaaacaacgagtgattaaaaatacctctcaaacggtttaaaatagtcacaatttcttaaaacatatgcatgtgcgctttggtagtctttatctgaaagccaatctaaatgcatttcaccacttggacggccgacgtgcataaatatattaggtactccagggacatgatatacaggaatttcaccttcattgaatcttgttaacctgatccatgtaagtgaattaatatcgaagaatatctaatcgttaaataattaaatatatttaccttgattttgtttgaatatgatcggcaaagtagtgctctgaaaaataagcaatctcgtcattgatatatgactcaacaattgaacctgcagcatatcttttgttctttgcttttcctttcaactttttgaaaaacctctcgaatgggtacatccacctatattggagtaggccacccaattcagcttcgtatgggagatggataggtaagtgttccataacataaaaaaatgatggtggaaagatcttttccaagttacagatgattaaaactatgttctgtttgagaatttgaacgcgacttgtctgtaaagttctcgaacatagatctcggaaaaatgctccaattcctaaaatacatgtgcaagttaaatgattagattaaaaaaatgttggaacaaaatatagttagtatatattgtacctgatagtgcaaggtggacattccggtcaagcagttcagcaaagataaatggaagtagtcgctccataaatacatgacaatcatgacttttcatgcctgaatactttccattatccagatctacacaactagccaaatctgaaaaataaccatctggaaatctaatatcatattttacacattgtaataaactctgtttggcttcttctgtcaatgtatacgctggaaatggagctttgccactactatcaatatgtaagcctgggcgtgaacaaaatttctcaatatccaatcttgacatgatattatcttttgatttacccttaactctcatgagagtgttcatgatgttgtctagaaaattcttctctgtatgcatcacatcaatattatgtcgaagattgaggtatttccagtaagacaactcccacaagatgctttccttgtgccaattatgttccttcccatagcctcgcatcttcttttcatgaccgttcccaccaacatccttcgtttttggtggatttacactagccaacctctcgtaataaacttgctcccctgtcaaagactcaggtggatattcgctagaagcatctcttcctttcagaaagttttttctgttcctacgggatggatgaccatgaggaagaaatctacggtgacaatcaaaccagcatgtcttccgtccattgggtagataaaaagactttgtactttctatacaaacaggacaagacaatttaccatgagtagtccatcctgataacatgctatacgccggaaagtcgctaatcgtccacagtagtactgcttttagattaaaattctgactcaatgaaacatcgtacgcatcgactccagtagaccacaactcttttaactcctcaataagaggttggaggaagacatcaagactagctcgaggatgatttggaccagaattcagaatggtaagaaataagtactcggtattcatgcacataccagggggtaaattataaggagttaggatcacaggccacaacgaatgattacgaaacatgccaaatggattgaacccatcagtacacaacccgagataaacgttacggggttcttcggcaaactcgggatgtaacccttggaaatatctccactctgctgtatctgaaggatgattcatttctccctcctttgattggtgctcagcatgccatcgcattgccgcagctgtcttatggctctgatacattctcttcaaccggtccccaataggtagataccacatacgactatatggtactttggttcttcgacggtcgtccttaggcttccatcttttcgcgccacaaaatcgacattgatcttctttttcgtcttctttccaaaatagcatacaattgttctgacaaacatcaatcgtatgatatggaagtcctaaattgcgcattaacttctcggtctggtaatgtgaagtggttgcctggtttccttttggtaaaaaatctgtaaacatttcgcaaatggagtccaccaacttttcactcatattatactccgccttgttgtgcatgagtcgagatgctaaggataattgcgactgcccttcacgacaaccatcgtacaaaggattatttgcaccttctaacaagtcgtagaacttatttgaatggttacggaccagttcttccacattctgataactatcatcatgacgatagttatcatcataccccacgttaaaattaaatgcatcgttcaccatatccacatatggatcttctacaatattacccacttcttcatgattctcactaaaatacgtcctattcgtgtaactcgttcctatatccatattcatttcttctccatgcttataccaaacataataatcaggcataaatccatgactaaacaaatgactactaactcttctacccgagatgatgtgtttttcattcttgcatacactacaaggacaatgaaatttacctcaactactctgtactattggctgactattagcgaatgtcatgaattgctcaactcctgcaacgtattcggctgacaaattccccgtcacttcatcaaatctcttgtacatccaatctcgatagaaaccgccagtaccgccataattgtagtttcccgccattatacaataaaataactaatatttttttttttctctttgatgttgttgttgttttgatttgttggtgaaagaagagttgcgtgaacgtttattatataggccaatttttgtgactaatttacgactacaactaaataattaggtgtacctacttaccaatgcgaaacatgttttccatctactttatacgagtacgttgcgacgtttctacgacaacaggacgactagaggacttagtcggcctgtagtcgccatattagcgactaaataaaatagacggtagaatagtcgttaattagcgactaagcaacgacaacaatatcccttcaataatataatcgtcaaatagtcgtcacttgccgacactttgccgactgcagacgatagtcgtaaaacaacgactatgtgactacaatttttcgtgttgtcgcaggggagtcgtaaatccgtcgccaactagtcgtataatgttacgactacgtttgttgtcgctgattgttccgcctatagagaagactgcttctttaacctcctcttcggtaatcttctttgttaggtctgcattcatatctgcggttactcgttgttggaagccatttagaacatagtagtgattgttatttgtcgttaagtcactccgaaagagcttggtgaagaattgttgcgccacttccccaatattagaactgcctctgtgttccacattcgcatcgtccaagatagagtacattctgtttcgtgcagatcgtatttttgcagaggcaaaaaaatactttgtgttacggtctccacctgacagccatgttttccggctcttaagtctccagaattcttcttcagcagcataagccttcgacagctgcaatctgagctctcggatgtgttgagttgttgtgccatcagagtgagctctatcaattctgtttttgagaagggctatatcttcttgggcatttgatcgatatcgcctcttccattgagatatttctcttctgcaggcagtgagtcgtgatcgtagattgtcgtcctggtgaaagattctccggttccacccacgtctgacagtatcactgaacccatcacgctcaaccattcttccatcaaaacagaactggttatgcttctgctcaaaatcgctcgtgattgttgtgatcactggtcgatgatctgattctattaactcaaggaattccatgtgggatgcgggaaattgagttaaccattcgttattcaccaaggatcgatccaagcagcaggcaacatcatgagtgtgtcgttttccgacccaagagaaagggtctcctgtaaacttgagatcatggaagtcacaggtttgtatcattttcctgaaatcaaagaaagagctttctggcttcaagttgcctccttttttctcatggttgcctcgtatttcattgaagtcccctatagccatccaaggacctgttctttgtgttgctgttcgttctaatctttcccaaaccaagtgtctatggataggatttgggtgaccatatacacaagataaatagaacccaaatccattaatattaacaaaagtatttacaaggtttggggattgataaagaacagaatacagaaatactacttttccacattaaagcaattccaccacttagatcatttggaggaaccattacaaccctatcataacctacatcgctgcaaatatctctgacgatgtcattcttttacttcgtttccatgagaacaatgatgtctggagagaatttcttctttatctcctttagacgtcgaactgcgaggtcattgcccagtcctctacagttccaagcggctgtcctcatggaggaagagggggttctgggcccaccgcgcttctccccacgtcattcggctgaaccgtctctccggagcaaccactgctttccccagcctcatggatcaccatcttagaaggctcgtgttcttcatcttcttcgatggtgtcctctctcttgtgtttgcccctatccgctgccacatcctcacgaacatagtctctgttcactccattatttgttttcatctctccatggtacgtggagtaacgacatggctcccaatcctggaaatcttccacggcttcatgatgggcattcatcactaatgagagttattttatttattattgtccacgtatttattttgtttttaatgtattttttttttttttgccttttacagttcctaatccagatttaaatctggatataaccctataaattataagatatactcgtccacataatattatcaagttttttagttttttagaaaataaaaatctattctaaaattagagagaaaatcaagtgagacaattttgtgcctcacaagtcacgagattacttagctcggaagggttttgggctctacgtgtgaaaggcataagatattttagttacttttatgctttacaatttacattactagagtacaaacaaaacaacagctatcatggatttttatgacatcatcaatttacgtgtgtcatttgagatttataatctttactttattatcacttctattttgttttaatgagttcaagatcttttcttgaaagacatatgaagactttaacccaaaaagctaagtattgtctttgatgaaactttgaaatcgagaagttttcaaaattttaaacgatgtcaaccagtattttttatttataaaacagtatttttctctaaatatttgacaagatttttttacccccgcattagctaaaacccattttcgtacatatgtttacaaacaatgtccgctcaacaatttcatgggtgtaggataatttttttttatattttgttataaaattttttgtatgataatttagttaacaaaaaaaaaaacaatgcattaaaaaaattataggtccattctaaattttatttttgtgttatatctaatttttaaaaatatttttaaaaaaatatatgtcccttaattgttaaaacatgggtttggattcttggctgtcgcaccgcttacccctctatttaaaccggcactgtttacaaattaaacattatagaaaataattcttaaaaaccggactaagtaatgaaaattttaaattacaaaaatgaagaatactaggaagcgagaactagggaagaaaacttgaagcaccacattagtcaaagagatcgaagaaagaagccattctctaagaaaatttaccattaagattgactatgcactttatttaaaacacttgccaatatatctttttcaaaagtttttttttcataactcatattaagactttcatcttcaaattaaagggggatgagctttccggatgatacttagacctgagttgagtcaaaatcgcatctccctacaaacaagttcatcataaaccagtcgtagggtccaaagactttcacgatccattaaactgacatcttagtgtttaaagacatttttcttggtgttctaaaacatatatcttctgaacatggctcaattgtgactcctctcaagaaaatttaaaggacttggggaggactatattattatttttagttccccttaaatatccacataataattactgtttgttgttttctttttaattcaaacatacaccattccaaagagacctttgatagttttctttactaaaatattattgaaaattacttataagatttattattaacatgttttagattgaaaattgctcatacaggcacataaacagattgagatgtacacacaacaaggcttctcgaatcttcccatatgcatgtcgaaaacgcagtactcattctcacatgatgcatcaaagaaaggagcaccttcagggtttgtattgccaattcgggatgttagaggaagcattggagctggtttcatatatccactggttggtacaatgagtacaatgcctggacttcctacaagaccttgtttctatgagattgatatcagtcaaagcttcaaggcttcccttcaccgtcgttcctcacttcctcaataaaaatttggcgattgtactttgatactgagtgtttttcctctttgaaatgaataataataaagtatcttttcctgttgattaattaatctctgaaatactcattatttgaagttgaactcaaggtaacgttacacatagaacttgtgatgttcaaaaacaaagcataaagcaaatgagtgacaatgttttcttttgaaaaatcgttttatgtgaaatcatcagaggcattggagatttatgaatcagaacatcttgcagaaatcatgcactgagaggcacaaattggatgccatgccgaaatgagggcatctcgattcacgtattgtgggccgaatagtaaggcccatggaagattaaagtcaattcaaattcgaacgttgaaagcattaaatccaaagacggaaacggaagagttaaaagagaattatggtgtataattaagaataattactaggtttttgtataaataagagaggtcttggaccatgtaagacacccacaatttttctagcaattttcgatagtcattttgatatcaatttttagcttttacattttatttttgtcctcaaaaattaatccatctcacaaaacaaataaatacttgagcgtgtgaatccgacatccacaacacttttgcctgaaaaaataattaacataaatgtaaagtatcctaactttcccattttaaataatattgtttattcaaactatctttaaaaagttttgacaaatatacacccaaaagtatatttttgaaaaatctaaagttgtaaggtaataaggtaatatatctaaggtagactaaagatatattgaataacaaataaaaaatctaaagtttttaaatgactcaaaattggacggtatagatgaattctaacgcctatcatctatatatatatacgacaagggtctttcttatttatctcgataaccaaactatcctcagcttgtgtaatcctcattttgcccctgacttttgaacggtcaaataatatgagccgttcgatcgaatatgagatgagaattttaaaatcgtaaccgtccgtttttaactttggccattgtccctgctctttaattttataattaattaattgaagccaaataattgtgaccgtcagatcgatatcaaaagaaaggagttgataacattcgtccgattttatcaaaaacaaggaacgaatgtcagccgtccattttgtacccttcagtaaaccctaatactcgtacctaattaacctaatataaatataaaaatacggtgccgcttcatatattgtctatcctatttgcacctaagaactactctttccatctctaggttttgtctacaagattgggatctcatgattgacaaagagaaaggtaatttagtcaaggccgatagatttaagtatgcgaagagaaccagatttgggtacagatttgggtatgtgaagagagccatgcacggtacaaagatagttatcaaataaagctgtcaagtatattgacttttcaacaccattcgtaatgtgaagaaagaagagagttgcaaagtcctccttctttattagaaggaaatctcattctcttattgtctttgtatgggtgaaagtgagatctatggaagggagttagttgacctgcggaaccagagtcgatgggagacgctgaagcggttggaaacgtttcgagttgagcaagaacttggtctaggtttgttcgaagagtattagggtttgctttgttagtttgatcgataccacgccaaatctgatattcgacgtaaagacttttcaccttctcttgtaaaacccaatttaggtttcgaatccgtacggtccattgtgaagttactagcgcggtttggtaacacttaagtgaattgtcaaactctcgctgattgttacatatcatcaaatttttcttcctgctttatatcatctaactagctgatttgagattcacaatcttgattctccaggttgctctgtatattggtggtctttatgtttgtggaaaggttggattttgaactcttattcttgcaaacaatgatcttagcttttgatttgaagccattgtttgagttttcggtcttggtaatatacaacaatgttaaaaatatgcaggttggattggaatctataatgaaaatgggagtatagacaagagaactgttcttctatgagacatttctgtattgtaacccgctccttctcattgtaagttacatttcctctcaaattagtagagtcaaattctttaagtgtgtttcctcatgtatgctattttgttcagacactgaaggtctgctggctctgggtgttaatttgtggctttttctcggtctggagttgattatgcagcaatcttttatctaggaccagatcatcttagtcacaaagagatatggaaggtaaacaactattacttagatcatttgtatatatttttcattcgattattacatcaatgtaaccaatgtcacagtgtgccgggtggatgacaataattatattgactagcatgactgctgatatgtcctggtttttactgatttctaacatagtttcagaatagtttttagagtcttacactacaagaaaacaggtgattgaagacctacaagtcagtcgttaagtagtcgtaactaaagctaatacgactaatttgcgactaataactgtaatcattaatccatagtcgctaaaaacagtagtcgtattattgtcgttgaccaacgactaattaaccacaactgactaaacagtgaaaaatcttcgttacgtagtcgtactatgtcggcgactaattgacgactatcctacgattatttatactgtacagagcgtgtgagaacatgtagtcgtttcgtagtcgttaattgtgtacgacgacattacgactatgttgcgattaaatattctaaaccctgggtatgtttccagttgtcgtaaaatagtcgtaaatatgtttacgactattcgacgactctttgacgattaaaagtactttaccaaggatttgaaactttttgtgataacatagtcgtataagtatgtacgactattggacgtctgctttacgattcttttatgactaatttgtttagtcttatgattgtcgtaaagttatgtgactaattgacgactattcagtgactatagtgctacttatttactacttttttgcgactaatagtttggtccgaataaagatttggtcatcaggtgatggtttcttgtttgttcttgtttgttcatcgattgttcttgtttgttattgatatgctatacaatatgaaaacactgcttatatattgaaaatcaagttcaaaacataaaattatcttgttcaaacatacaacttattgaaagatacaactagtgtttggaaacctaaattctatggatcattagatgggggagtaattgggatacgctctgtggatgtggaagagtgtgtggcaatgaagtccaagaactgcgaatcggtttggcggagatacttctcgactaaggacaagtgctcgagcttgtccttttgctcagctgtgactcaggctgtctcggcttctcgggcagcaatctcagcatctcgcttctcgttatatgcagcctgttcttcaatttgccgctgagcttcctgcagccgttcttctaaggctttaaaggttgagtctccggggagttggcggttggcactgcctagagtttctttaagacagccaagtccataaggattgcctcttgcatccttttctgtggactgcaagaaataaagaggaagataattagtgacagatcctaaatgtctctaagactctgaaaaagacaaagaacatcttacctcgagaaatatggctgcatactcatctagtgtgagatcccgaggacgtgaagagccatcaaacacagcagaagcagccgcctctagttcagacagcttctctctcacattctgctcatacgccagagcaatcttctctgccttctgatcaacataagtcccatccgacttagtgtgtgtctggatgaacacctcaccaagagggacaggtcttcccattttttcttcctgcaaacacaaatcacaagcttcattactatcaacagactaaacatcacacacagttaaacgaacatcactaaaccacatgggaagattgcagaaacacttaccaattcatcttggatttcttggaaagactttggcccaaagtagtggacgtgaggaccgagaccgttacggtcagagagacgagctttggaatatgtcttactccttttctgtgcctcttcagtgtcccagtagtcgcacatggttccccacagagtttctccaatccatggaggctgctctcgagttctccttgcggtgctaaccatgtccttcaagcgcctcttaacgatctcattgaagtagtattggactgtccctgttattaagggatcccagtggtgagttttctacaaaaaaagtgtgaagttagtgaacaaatgacatattaaatagtacagtcaaatgaaagttggagaaatacaagaagcttaccgcaaactctaaaaacaatctttctcttttatccaatggcacacacgaccaattatagtagggagcattgaacttttgagtaaaaatccgtgtgatcttttaaccaatttagatcctctgtcgcgagtaaacctccaaacacatgcaacacagacacaaagtaaacatgtttaaaatccaaaacactataactacagcagactatataattgaacaaaggcagaatctacaagattctagacaagtataagccgacaagatcacacacagaacacagtagtcaacataacaagatcatagacagtaaagaacaagtatagacaagtatagaacaaagacagatcctcattgtcaaagccgaaaacatgctaagttcaacaatcaacaaatgttccacaattatgttcatgattcacaacagaacacaataaagaacttaacaagattatagacaagtatagaacaaagacagatcctcaatgtcaaagccgaaaacatgctaagttcaataatcaacaaatgttccacaattatgttcatgattcacaacaaaacacaataaagaacttaacaagattatagacaagtatagaacaaagacagatcctcaatgtcaaagccgaaaacatgctaagttcaacaatcaacaaatgttccacaattatgttcatgattcaccacagaacacaataaataacctaacaagattctagacaaagtgaagaacttaacaagatcacacacgagtttagaacaaaggcagattctactatgttacacaaaccctaacaaacatccaattccaacaaaggcagattctactatgttacacaaaccctaacaagccattctacagaccataacacgagttacactacacaggctaagaacactagaataaaatagaggaagagaacataccactcggttttaggtttgggaattggagacaagacacaacaccactgctccctgtttggcacagagagtgtcgattgcagagccaacgccgagtcttcttgtagcttcggcaacgtcccaggaacttcctcttggaagttgttcccttgagacgacgggtggctgtttgctgttggcggcagagtgtagtggacctcttcagatagaggcggaggagcttgatgttgtggttgagtcgttgagttctggaagagttgcagaggcggtggatagttgcggacgtggggtgcagacgttgaaggtccatgttgttgagccggctccgtcgcaggaacttgaaccgccggcgccggagtgaagttgtattggggaggaagatttgcaggtcttgatccgccggtgccggctctctgagtgtcgttcggcgtcgtcttacgcttccgggagccacctcgaccggcgataggcatgatagtgagccaaatgaagagattgaagagaagaagaagaagaagacgaagcagatcgaagaggttgaaggtgagagatcgaagaagatcgatcgatcttagcagaagaagaagaagatcgatctagaaggagaaaggatcgatcttagaaagagttctggggattagggttttcgagacgaagaagaagaagaagaggaggttggatcgaataggtttaaggtgagagatcgaagaagatcgatcgatcttagcagaagatcgatcgatcttagcagaagaagaagaagatcgatctagaaggagaaaggattgatcttagaaagagaattggggattagggttttcgagacgaagaagaagaagaagaagaagaaatggctaagtgtttggctcaaagagaaatgactcgatttagggttttcaacacaatagaagtcgcataatagtcgcataattatcgcatattcatttggatttgggcctcgaaattttgaagcccaactaatcaaaaaagtatcgttgaatagtcgtaattttgtcgccaattatactgggtttgggtttcaaaatttcaaagcccaacaaatcaaaacttgtcggaacatagtcgcatctttgtcataaaatattactgggtttgggcttcaacatttagaagcccaaaataccaaacatctgtcggccaatagtcgcaatattgtcgtcgataataatgggtttgggccccgaaattaagaagcccacaaaacaaacttgtctcggtatttagtcgcaatatagacgcctataccaatgggtttgggcctcgaaatattaaagcccaacatatcaaacaggtgtcgcataatagtcgtcgttttgtcggcggttttaatgggtttggatttcaacgtttagaagcccaataaaacttatcttcgtcgctcattagtcgcataatagtcacttttaaattgatataattataaatgtgaagaaatatttatatatcataaaaaagttcaatgatattatgaaacaaaattcattctaatatttattcaaataattatacatatattaacacagttatacatcttcatcttctacttcatcttcgtccgaggacgataaattacatcggaattcgtcttctggttcagcatcccctacatcgtaatcaaggattattgggtttaagttggctaccggagtttcaagaacaagatcttcaattgtagtgagcaaaacatcatcatcattttgcaaaagagttggatcattgttttcatattctccagaaatgtttcccctcggattgacttttaaaacattgagcctaatgttctttggtttcttcgtatatggatacggaatataacaaacttgatctgcttgagatcctgtatacattatcaaagatagattattaataattaaaaaagaaacgtattttggacttaagaataattacgtaccaagaataaatggctcgtatttattgtatttcctcgtagatagaatgtctacaacgccactatggcttcgtcgagtaactctcccgatctttgggtcataccacttacacttaaaaagtgtgatcctcaaattgacgataccctcatacacgagttctataatatcagttaaggtaccgtagaaatccgcttcatcagatgaatcagcgtaattttcacctttaacacagaccccatagttacatgtctttcgtccagcgctgtgattttgcgtatgaaacaaatatcctcttgtgaaatacattggccaagttttaaccttgttcaaaggtccttgcactatctcttatacccaagttggacatggagaagtagtgttccagtatgttacctacataatagataaacaatatcaattagtatatattaaatgatcacctttcgaatgaaccaaaattgatgtagacttacatattctttaggccatagatgatattcttccgctcttctcgcgtagtgttctttttcgggcaagcatggatatttggcagaaagataaccttcgaacatactacatttacaaacgaggaaaaatttatcaaagtgatcttagtgaaaatttacaaacaacgagtgattaaaaatacctctcaaatggtttaaaatagtcacaatttcttaaaacatatgcatgtgcgctttggtagtctttctctgaaacccaatctacatgcatttcaccacttggacggccgacgtgcataaatatattaggtactccagggacatgatatacaggaacttcaccttcattgaatcttgttaacctgatccatgtaagtgaattaatatcgaagaatatctaatcgttaaataattaaatatatttaccttgattttgtttgaatatgatcggcaaagtagtgctctgaaaaataagcaatctcgtcattgatatattactcaacaattgaacctgcagcatatcttttgttctttgcttttcctttcaactttttgaaaaacctctcgaatgggtacatccacctatattggactgggccacccaattcagcttcgtatgggagatggataggtaagtgttccataacatcaaaaaatgatggtggaaagatcttttccaagttagagatgattaaaactatgttctgtttgagaatttgaacgcgacttgtctgtaaagttctcgaacatagatctcggaaaaatgctccaattcctaaaatatatgtgcaagttaaatgattagattaaaaaaatattggaataaaatatagtaagtatatattgtacctgatagtgcaaggtggacattccggtcaagcagttcagcaaagataaatggaagtagtcgctccataaatacatgacaatcatgacttttcatgcctaaaaactttccattatccagatctacacaactagccaaatctgaagaataaccatctggaaatctaatatcatatttcacacattgtaataaactctgtttggcttcttctgtcaatgtatacgctggaaatggagctttgccactactatcaatatgtaagcctgggcgtgaacaaaatttctcaatatccaatcttgacatgatattatcttttgatttacccttaactctcatgagagtgttcatgatgttgtcaagaaaattcttctctgtatgcatcacatcaatattatgtcgaagattgaggtctttccagtaagacaactcccacaagacgctttccttgtgccaattatgttccttcccatagcctcgcatcttcttttcatgaccgttcccaccaacatccttcgtttttggtggatttacactagccaacctctcgtaataaacttgctcccctgtcaaagactcaggtggatattcgctagaagcatcttttcctttcagaaagtcttttctgttcctacgggatggatgaccatgaggaagaaatctacggtgacaatcaaaccagcatgtcttccgtccattgggtagataaaaagactttgtactttccatgcaaacaggacaagacaatttaccatgagtagtccatgctgataacatgctatacgctggaaagtcgctaattgtccacaatagtactgcttttagattaaaattctgactcaatgaaacatcatacgcatcgactccagtagaccacaactcttttaactcctcaataagaggttggaggaagacatcaagactagctcgaggatgatttggaccagaattcagaatggtaagaaataagtactctgtattcatgcacataccagagggtaaattataaggagttaggatcacaggccacaacgaatgattacgagacatgccaaatggattgaacccatcagtacacaacccgagataaacgttacggggttcttcggtaaactggggatgtaacccttggaaatatctccactctgctgcatctgaaggatgattcatttctccctcctttaattggtgctcagcatgccatcgcattgccgcagctgtcttatggctctgatacattctcttcaaccggtccccaacaggtagataccacatacgactatatggtactttggttcttcgacggtcgtccttaggcttccatcttttcgcgccacaaaatcgacattgatcttctttttcgtcttctttccaaaatagcatgcgattgttctgacaaacatcaatcgtatgatatggaagtcctaaattacgcattaaattttcggtctggtaatgtgaagtggttgcctggtttccttctgataaaaaatctgtaaacatttcgcaaacggagtccaccaacttttcactcatattatactccgccttgttgtgcatgagtcgagatgctaaggataattgcgactgtccttcaccacaaccatcgtacaaaggattatttgcaccttctaacaagtcgtagaacttatttgaatggttacggaccggttcttccacattctgataactatcatcatgacgatagttatcatcataccccacgttaaattaaatgcatcgttcaccatatccacatatggatcttctacaatattacccacttcttcatgattctcactaaaatacgtcctattcgtgtaactcgttcctatatccttattcatttcttctccatgactaaacaaatgactactaactcttctacccgagatgatgtgtttttcattcttgcatacactacaaggacaatgaaatttacttcgactactttgtactattcgctgactattagcgaatgtcatgaattactcaactcctgcgacgtattcggctgacaaattccccgtcacttcatcaaatctcttgtacatccaatctcgatagaaaccgccagtactgccataattgtagtttcccgccattatacaataaagtaactaatattttttttttctctttgatgttgttgttgttttgatttgttggtgaaagaagagttgcgtgaacgtttattatataggccaatttttgtaactaatttacgactacaactaaataattaggtgtacctacttaccaatgcaaacacgttttccatctaccttatacgactacggtgcaacgtttctacgactacaggccgactaagacgtctaggcgtcctgtaatcgccaaattagcgactaaataaaatagacggtagaatagtcgttaattagcgactaagcaacgacaacattatcccttcaataatataatcgtcaaatagtcgttacttgccgactctttgccgattgcataagatagtcgtaaaacaacgactatgtaactacaatttttcgtgttgtcgcatgcgagtcgtaaatccgtcgccaaaaagtcatataatgttacgactacgtttgttgtcgctgattgtagtcgtcgtttacctgttttcttgtagtgttactagtcttttcgtatgttatgagtcatttcaggtacacttacacatttgggagctatggagcataataaggaattttggaagcttttggaagcttttcagcaatgaagattatcaaagacgtttttcactcgatggtgtcgatcgacacgacacctatgtcgatcgacacccttatttcggctgagggaatttctgttttctgccaagtctttgagaagccctagagttttcctgatttgcaatgtagtccttgcacgttttagtcacgaatatacctaattatttgttcattgttagacctaagttttgttttagagattgatatacatttgagagaagaatccaatccctacagagaggattttgaactccttttactctatttataattcatcaatgcaaactattcaaattatgatttgtgtttctgttgtcatgtctgagttatcactttgttgggtttagtgagtctctatagggatttagatggattagtagatcgaaaaccccttaggattaatcttagagttcttcatcttgattattcttattgctagttttagattgatcacccaaacccaaacctagactttctttcaagccctatatcacttgtgagtgtttgtgaggtcttattccgattaagcttggtagaaagtgttaggttcgtaacgacagagatagtgtctcatgtagttctagttcgcatttttcggactagataggactagctgggtgcttatactttgggttgggatgtgttttaaagaaaaaaaaaagggggttgattcattgataagaaaaagtaaaagactctaagtgaagtaagctaaagaagcagaaaaagtctagtaaaggttttgggatttgtaaaaaaaagaaagagttcctgttagctattgaagatgggcaaaagcccttggttttaaaatgttaaaaacaggaaccttagttgttaaagaaatccaaatccgctagatgtatcaaagtgttgagaaagcttctcctagagttaagagaaaagaaaagaatgattagaaaaagggcttaaaagattcatgaatgcaaagggtagagtttagttcttgtattgggattggagatgggattaccattagagcttcatttgatatactctgggtagatgggatcttatctctgtatgcatagattgggacttacctttagcattctactaaagcttaatcatttttttttagagatcccctgttacttaagcctattctgtaagggaccatctttgtctcttgaccttttaccttagccaaatgagttctttgatgatgcattgcttgattcacgttccagaactaatcaatgttaaaggaattggtagatttgaaaacttgggtaggtcgagcgtatgagtcggattgattgattgatgaggcatggctaacgtttttaagtagaattcgatcttgcagcttagaactttcaacttggacattgatttcatctcgtctatctggtgctttcgctctgagtcactgctttcaaacctcacctccagcttgttcttgattgtttgcttgagggcaagcaaagactaagtttgggggagttgataagtgtgtattttgcatgttttgagcatccatttgtcatcactttagcatcatatcatcactgttttataccatttcacatcatttgtcatcactttgcatgtttaggatagttttgcatgcatgttgcatatttgcgttgatttcaggtgatttggagctgttgacgagctatctggaagaagcggacctgatcatgacaaaccactcgacccagaggtcgagtaggagcttcaagatctcaagagaccactcgaccaccaggcgagtaaaggacatcaccactgcacttcaccactcgacctcagggtcgagtgccctcatctccatcaccagaccatcactcgatcacttcactcgaccatgaggtcgagtgtcttcacctccatcatcagaccaccactcgacctcgtcactcaacctggaagtcgagtatcttcttacaccactcgactgcatactcgatgacaagcttcagagccttcttcattctgcactcaaccagacactcgagcacaaggaagaaaagaggactccagctattcactcgaccacatgggtcgagtacagttcttaacccgtcccaatacttcgtcgttttgagtattagggtttcgggatatttggctataagtagcatgtacttctcattttcgcagacaagaagtttttatctagttttatttccgcagaccttgtgttctagaccttttgtaatccggatttctctttatctattcagtattcagcttttgttctagatttcgtttactgttgttcattctgttatcatcctgctgttacactgttgttatcatgttttcaacttgttcaacgtttatgctttctgttatgatgtctgagtagtgaataggtttctgaggatgggttagagtagtgtagaattctcagtatgctaggtgattgagtattggttgatagatcccttctggattagttgttcttaatgcctattgctttctgatcaactggaatttgagcccagacatttccgcgcccaaaaggtgttcgatgaaatgtctgaaccactaattccagagattcgtgaccctgtaccaaggtattggttgtagggagcgttttggctttaacttgttgattcgtaatgcctgttaggttagctctcgtcaatggtgattgagtctgggactaggttagcttgagagtctctgttgcggtggcacttagatttggttgatgaacttgttgtctagggttaatttattgagcatgtcaatcacctgtaaactgaggaaacgaaactactcaattaccccatccttaggaattctttatctgattgattttattgtttactctactgctgtgtactgctatcctgtcatctgttgcttagtttctgcaattctttactgttactcgacctcatactcgaccacccagttgtctggcaacagactgtgcagtcgagtatccctattacattatctgtctgttactcgacctgtcactcgaccacacctagtgctctgcaaagagctgtgttggtcgagtgtttatttatttctgcttgattttctgttttctgcatgttcacttaggactgttagaacgcaccaaaacctgttattgcttggcttgacttagtgacttctgatcacatcttgattgttagtatcacacccatttggattgacaatctaaaatactacaacgatatgattggtgttttaggataattgactaaaaaccttttatcaataacaatcctaatattagctagatctacaattcatctatctccagagacaattccttagacccgacgctttaatcacttgaatctacacatcgtttacttgcttatttgtcttttacattcatttactttatctagcttatttaaaaacatcataagtctattgtgtgaacatagagagctcagtggaattcgacccttaagtgctaacgacgatcttttatttgagggagtaagcttaaggcaatttgagctatatcaactgcctatttgtatctatactcgcacagagatgtaaagttggctatatctcaaccaatgtaatagatgtatcttctcttaaagttatttcaaagagactttgattcattttttcataagagtgacctttcaatatcttctacatgttgtctcgctactatttgctttggaccttttggcgaatagtcttccctgtgcatgtaagggattttatttttttgttcgattgaagattcacttacaatcatctaactatcctttggtgtatcaaaaacaggcagtgactttttcggacttgtttctagttgtttgtcttcaatgtgtaatgtatatattgataaaacctgtagaatatatttgttgttgttcaacacttgcattacacatatatagaggaaagacaaacaatagtgttacctttgacattgaagtcaggatatctttacggttaaattatgtataacacatgctcaatgagtctgataaattcgttgtaggtggctactattgcatggtttgatgcttctctgaatttacggatagaactcattccacatctcttcacttccttattccttttgatagtttcacaaatacatgtggtattgcaggctctcttgaatattaaagttctcaatgaagatctgaagaacaatacacaacgatttcaacaagttccttctacactgcaacattttcttaatgcttttgtgtcagagagcataaaaactgaggagtctagagttgcatcttgagcgacttacttactttcctagaagaagttatttccaaggttcgtcatttgtgtggagatgatatgcatctaagcattgtattataatcttttttgtcaataagctt

SEQ ID NO: 206 - DNA, 96371 bp, Arabidopsis thaliana
gaattctttatctgattgattttattgtttactctactgctgtgtactgctatcctgtcatctgttgcttagtttctgcaattctttactgttactcgacctcatactcgaccacccagttgtctggcaacagactgtgcagtcgagtatccctattacattatctgtctgttactcgacctgtcactcgaccacacctagtgctctgcaaagagctgtgttggtcgagtgtttatttatttctgcttgattttctgttttctgcatgttcacttaggactgttagaacgcaccaaaacctgttattgcttggcttgacttagtgacttctgatcacatcttgattgttagtatcacacccatttggattgacaatctaaaatactacaacgatatgattggtgttttaggataattgactaaaaaccttttatcaataacaatcctaatattagctagatctacaattcatctatctccagagacaattccttagacccgacgctttaatcacttgaatctacacatcgtttacttgcttatttgtcttttacattcatttactttatctagcttatttaaaaacatcataagtctattgtgtgaacatagagagctcagtggaattcgacccttaagtgctaacgacgatcttttatttgagggagtaagcttaaggcaatttgagctatatcaactgcctatttgtatctatactcgcacagagatgtaaagttggctatatctcaaccaatgtaatagatgtatcttctcttaaagttatttcaaagagactttgattcattttttcataagagtgacctttcaatatcttctacatgttgtctcgctactatttgctttggaccttttggcgaatagtcttccctgtgcatgtaagggattttatttttttgttcgattgaagattcacttacaatcatctaactatcctttggtgtatcaaaaacaggcagtgactttttcggacttgtttctagttgtttgtcttcaatgtgtaatgtatatattgataaaacctgtagaatatatttgttgttgttcaacacttgcattacacatatatagaggaaagacaaacaatagtgttacctttgacattgaagtcaggatatctttacggttaaattatgtataacacatgctcaatgagtctgataaattcgttgtaggtggctactattgcatggtttgatgcttctctgaatttacggatagaactcattccacatctcttcacttccttattccttttgatagtttcacaaatacatgtggtattgcaggctctcttgaatattaaagttctcaatgaagatctgaagaacaatacacaacgatttcaacaagttccttctacactgcaacattttcttaatgcttttgtgtcagagagcataaaaactgaggagtctagagttgcatcttgagcgacttacttactttcctagaagaagttatttccaaggttcgtcatttgtgtggagatgatatgcatctaagcattgtattataatcttttttgtcaataagcttaattgttattcttaaagtttttagattttttactctttgtagtcgagtgatgctgctaaggtagttgtagccatccttgagttttggtgttgctggaaaaatccaaaagtagaaagcttggtgactcgcctcgtaatctcttcaggcccgaaaccacatcatgtaatataagttttgtcccaagcgtcactcgaaccggcgacctctaaactttgcctaagatctttaccaattgagctaacgacatttggttgactcgcctttttacgttggcggagaatgaaagaatgagttgtagaaaatgcagatgtattacaaattatccagagaaaagttcttatgccattgttatgcctgcagattaaataagacaacttaaggtatgtagcattgatttctctctttattgttccttctgaaactggtacctcctcttataaagttgtcttgtgcttaaatatatacggtgtgctttgtgcttaaagttgtgttatgatttctttgggatcagtatgatccaagtatttctcagcaaagacgatatttcacaattcattatcattggagccttagagaggaaataaagagggagaggaataactatcgaaagaaaatgatgataatcagtgtgagctaaacagcttataactactacagtaaaaactctataaattaatactcgataaattaataaacacgataaattaataaattttcccggtcccaagtcgaggcaatgtaaaaattaaccaaaatcgataaaataataagataataatttttttgaaatccctatgtaaatttatagtcccaataatattataaattaataattatagatcttaagtacatattttaatactaatttttatataaaattttgttcactctacaattacaactctttttaaaatacaactattatgatctctgttttactcatgtaactatttgcgtatttgatttgtcatagttgattttgtaaaatcttttatttgagaaagcattgctaagatttgtgtaaagagaaattggattaagcttcatgtttacgtttacgttcacgttaatgtcatagatatacagaatatagcatatagaaaattaatttaagaaacattttaaaaagaatatagcattgtattttacgtaaatatttattaatttatacgataaattaatatcactataaattaataaaatttcatggtcccaacattattagtttataaagtttctactgtatataagcagcttaacatcaatgtaaatcccaaatcctctgaacctactactgtctctttccttaaagcgcaaaatcgaagcttctttgtcaccagggtcttccaccatctaccttttcccagttgttttttgtttagtgttttgaatttccaatagttagttggtgtctcatatgcaaaataaagtatagattctgatatgatcttctttttttttgacaaaaaggttactctttgaaacatttcataacccaatataagtctaattacgtgtagaaaactctttttgaagaaatatttggaattgttggtattcataatgtcatctgtaaccgtatcattgcgattttaatcctctcttaagcgtttatttgttgatttgtaattttaagatgttatattcgtataagtgcctttatgcctactattgtcaatttgtcatgtgtaccactaccacccctctcccatactatagggcctatctgttttgaaaataatgatgttagccaattaagactcatatgcgcagctgtatcctccaaaaagttgaaaagaaacagagataagtcgagcaagtcccaaccttgataaacttgacacaatgaaggagaaatgactcttggtccaagaaaaacgttgtttatggttgaaatatctactgcgaattattggctacaattctcatgagttatttagacgaggagagttaatcaaaatcaaacatttatagctttggtgtggtgattcatgaaatgctaaccgggaactcaactttaactcagcttggtcttgaggatgagtgtgtggtcactgatgttctaaggtgggttcggtctgctgcgaatgaataatgccctccagaggtttttcatgtagagctattcaagtttcaaaaaatagaagaggagatagttcagatgctttagctagcgttggcttgtgtcgcaaggaatccagagttaaggccaaagatagaagaggttgcgatgaggattatgtgaggagatgtgattagtcgtagcctacaaaacagaagatcctcagaggctatttcgaatgtctccgaatgagtttttgattttttcattccgccaaaagtttctttgatcaattctacttcggtcttattgaatggtgttactttgtatctggtagtttagtgcatctaattacattctcatgggaaagatttatcgcatttggttcgaatcacatattggccaattaaaatcacatattggtaagcaaagacctcatgtcacgtcaactgggacttgattatcaagatgactagattttcagagatgttcgaagccacattgcagagatccttttatcagaatttacgtgttggtccttctgatgggttttaattaaaccgaatcatataaagagccaatgtttgtcattttaacggcccacttttgttatcatggaaagtctgatttacaagaatttgttacaataaattaagacgccagttactcgagttaatagtgattttgtggagtattatgatgaatttagaacaaaattatgagatttccattacgatcttccgtgttttggagaaccatggtcgcagtttgagtaagctataatccttacaatatatcttttcttaaatcgactgtcgttcaaaatatataacctcatgcggtcgtaccatgcaacatttttattttattttcttcgatcttcgaccgaatcgttggtgaagatgttatgtatgaaaccatcaatgtgaattgatccacaaaattcagattatgtttcctcatatgagcaactgatttatcatctaactttaatctctctattttttttttttagctgtatgatgcgctttaattttgtttgagtataaactaggatcggacccgcgctacagcgcgagggaatttttttggttctgaatattttaggagtattgttacgtgcttacaaatttttaaaacagaacatatttggaaatgacgtaaacaaaaatataagattagtatagagataattgacgattacgaaagagaaaggtaaaaatttaaatcgttaacacgaaacaaaagtacgcaatgatattagcgaataacgtataacgaaaaaactttgtttacataaattaaaaatataaattgtaaacacgaaacaaagtatgcactaattgattacagcgcggaggaattttcaatgagtgtttatggtgtgaatttaaacgtgtgagtatatttttaaaatggtatgtgtctgcaaaagttacgttggaatatattactttgtgttaaaaaacaaaacaaaactttctatttcaatatccgaggtttttatattaaaactataagtattatacgaaaagtacgtaatgataatattagaggtgtcaaactggccagcatccactctggccatcccgtgataagcattattttttgtgagattgcgacggactggcctggccagaagtgcatgtagaaataatatgtccaaacccgccctgctaagcccatcagattagtagccaccctgcatgcttagtttttatatttaaaatttgatttcaaaaataaggttaatcttaattttagttaacaattcatatttattttttgtaaatcttataattaatacattaaattttgttacattatcatatctttcagatttattttttcagaatcatgtaaaagtatttatttatcaattgttttgtttatatattgtttaggttctctattgagatttattgttgtaaatagtgagtatttttgccaacaaaatttataattctagtatttagaataccgcaaatctttgatttttattttaatacatttcatatatatatatatatttattaatttagttagtttctatgaattcatgtttataaaaattatgataagccgcacaaattatgtctcaaagtctccactgtgctcaatgtttttatttggacatcttcaaaactacatcaaaattgattaaaaaaaattaaaaaaataacctacttatgttgccaaaattatttcaatatattgcattgctaaaaccacgtcattcacgattatgattgatgctctttgtcgtccattggtcaagtttggcctacacatacaatataatcacatgatccgaaagaaaaaagtataatcgacctaccctttcttaaaaaaatatttaaatataaaaataataaagctaatgtattttatgcatatacattaatatattataatcacatgatcaaaaagaaaaaaagtaaacctacaatttcttttaaaaaatgaaatataaacactaataaattaattaatgtattttatgttgtgcacaattttttttttttttaatgcatatggttgttgcatacatcaaaatttatttaaaaaaatagaaaaaaatataacctacttatgttgccaacattatttcaatatattgcattgctaaaaccacgtcacgtcattcacgattatgatttacgctctttgtcgtccattagtcaagtttggcctacatattcattataatcacatgaaagaaaaaatataatcaacctacactttcttaagaaactatttagatataaaaataataaagctaatgtattttatgaatatacattaatattataaacacatgatcaaaaagaaaaaaagtaaacctacaatttcttattaaaaaaatgaaatataaacactaataaattaattaatgtattttatgcatatgattgttgcatatagcataaactgtttttcaagtgaacacaaattatatagatttagtgaagcaactaaaaaaagaagaaagatggaaaacataatagcattttaaaaaataggctattatgcaacaatcattagcataaacatactattatttacccaaaaaatagtattttaaaaaataggctgagaagaagaagaattggatcacttacatatgaattttatcaactcatcataattaattgcaatgtacttatccatggcatttttatatttttcagtcctgtaatatggttaaaacagatagcaaagtagtttcaattaactttaatcatcacatcccaatcaagtctataattttgcctttccattaacatctttactaaggatctgcataaataataaaatgattatattagaaacgataagaatatataaagctatatgaaattataaatgataaacaacatgaactaaattagtagaaaaaaaaagaaacaaaaaaactaatggatgtcttgttcagtgaatcgatgactttatacagagaagagagggtgtcaatttagggctaataaattatctcctagcgaaatattctgttaacttaaaagaacaatctaaatgattgttaacgatgaataaggaatatgcatagattaagaccttctaattagggcaatctaaaccatatttttttcctgtttatgttatatttttgaatttgtaaaaattaacattattagtttccatagttaaagatcatatatcagatttgattgttaatcaaacaaatataaccttgtataattcgttgatatattatacgcaaataatgtttcatatttatttggctttcatataaattggaattgtgttaatggccataaacgacaattattagttgccatttgttgaagatatgattgaagatttggtaaataaaatatttattcgaataatttatttgttaaacgaaaagcaactaagttacctaattaataggatttgttatgtagggtgaatatatttgatccgaatttatatcagtttgttattgttattttcttatataattgatttgaaatcgaattgaaattaaaaaatccaattagccaaattacccgtaaatgcacttaaattgaagcttagtttttaatttaacccgacttgttctctaaatatacttctcttttaatagtatagttaatattgtaatcaaatctttccgaaactgcatataaagaatattaagattatcatgttagcatttttttctaaattctaataggaatccatatgtttagttgctatatattgaagattttattgttgattttgtagttaagagaatatttaatcgagtaaaacagttgttaatattcgaattgtaggaattgccttatttgtaggaattgttatgcatggtaaatatagatagatcctgtttttataaaagctatgtgttgatcaaattgtggatatttccttttaaatctcgaactgccatatacacaaaatctttgatcgtatattaagttgttaacaaaaatatagtaaccttccttaatagtaggaatgtatatgaaagagataattattcgagtattattgttaaggtcggattttctaaagattgtctaacgtgtatttatgtacaatacttattagaattgaaatcaatttgaaatcaaatgacccgatttgtaaaattacccgttaattagcccaatttcactctaattttactctaattttaattgtaacccgacccgtttactaaacgtacttctcttttaatagtatagggatgtgtttttttatccatatcaatttgttgcgtttcgaatttgtcacgattgtttcttagagatgttaatagtctttactataggaggttggatgtgtgtacttctcattttgtttttttttaatgtatctaccttttcgccactaattaggtgtgaatccgaaaattttatttggacgaagcattattgctatcgatggaagaaaatcttgggtttatttatgttctatctaaaatatattgttttgttaaatttatgctctttttgtttcaaaatattaaaaatagggtttacctctatatctttcatctaattttttttttctttaaagttatttgatgtgttttaatttctttggtttcaatgttgttcatgtatttcagtgcttgaaaaaccagattagtaattaagaaaaacaatataatcacatgcaattatcatgttaattacaaaacaatttgatatgcgaattgggatacaaggatctgatacattacaaccatcacattcaattaccaaagacttcacattgtggtgatgaagttttgaatgatatagtgaacttggaggagtcaatatacaaaggtctacgaagagaatgcaatattggaagaagaaaactcaaatttcaattttctaaataaaatggtgaacttcttcttaaaaaggttatcttgaaaaggcggtaatgataataattttgggtacaatatatcgataagtctacttttgtatatacaattattacgtttctttatagttctcgatttttaaatttttgtttcttaacttttgatcgattctcattcatcggtatagttatatggggattcagtcataagactattcttcaattttgaagatgatgactttgttcttggtagtttggaaactaacaaaatgataagttgatgaaattccggtttgagaatttctcacatcaatcgatcaaagaagcgagggagttactagaaaaagtgtaagcacatcgataaaattcagctaacgtacgatgaatggtgtgcaaacatctctgacattgaaccagtcacttgtaactgaagataaaagggcatatatggataagtttccatatgcttatgctatgtacgcgatgttatgtacaaggtcagacattgcacatgtagttagagttattagcagatttttgagcaatctaggtagaaaacatgagatgatatgaagtggattctaagttacccgaaagtgaatttgagttcagcgttatgcttcaagaagcctgagatgaaattgtaggagtatgttgatgctgaaaattgaggtgacattgatagcatgaagagcacatctggatatgtttaaacttttggtggtacatgttgaggaaggttttgtcgtatgacaagtttaggttgtgtgcaacctcaattggtcttctaaattggagagaagacgccgctacagatgaagacttggagattttgattaatttccaagtgggaaattgttgagttgaggaaacaaatctcaatgtaaacacatggttgcttatgtgaacccatagctgattacgtgaacgtatggttgaagctgtgaagatatgttatattctatgaacttatggttggttatgtaaacgcatgttctattttgtgaactatgtttttaaaatgttttagcaagagtatcttaaagatagagagcggtagagcaagaagttttttggcccatatttagtcgtcctaaatattttctttatatgtatttgttgtactcgccactttttattattgaagatagagagcggtagagcgagaaattgagaaaaattgtagcttccgattttctttgatcggattgaaatctgtagtggaagaaagtggatgtagctttcacgagtgaacaattataaaacttatgcttactttatctattgcttttattccgtgttgttgatgaagaattagatttgcaattcttaacatgatcaacatttgaaaagtagaagtttaactgttagtatacaacaagatttcttagcttcattttcacctttgacattacttacaaagttttaaaagagattaattttcttacttttggatggaaacatgttttaaattccgagttatttgaaataatggtacaaacactttgttgaagaatatagagctgacggttatattttggacattattaatttttttaatacgcaactaaaagtccaagaaaactctttattcctaattcgttggatttatataacattggattgtcatcaatcttataacatagttatattatatttaaattgatttataacatgaatttatttggaactctgtattggtttgtactaggacacgatgaatgtctttacaaaatattttcttacaatgtttattcccgcggatataaaatcatgagatactacttttttgaggggagaattaaaatattatttgaatagaagaacaaagcaagaatttataatgggaaaattgtcaaaaaaattacgaactttcaaatttgggacgatttaatcttgaacttcacggaagacaaataaatcgtaaagtttttgttgactttcgaaataaatgacaaagtttttgttgatttcccatttgaatcatgtcgttaaataggttaacagaattattttacggcgttaatgtctcgtgtatatgctctgttagaacaaaacgacgtcgtttattgagagacaaaagaacgtcgttttgtctgttaaaacaaatttaaaccctgaatctccaattcgattttattatctgcgattttgaggtcaaggtgggtctgtgatttcgagataatgaaatcgatttggggatataaggtttaaatttgttttaagacaaaacgacgttgttttgtctctgcaataaatgacgttgttttgttctaatagagcaaataaacgagtcattaacgttgtaatttctttttgtgaacctatttaacgacatgactcaaatggcaagtcaacaaacactttctcatttatttcgaaagtcaacaaaaactttacgatttatttgttttccgtgaagttcaagattaaatcgtcccaaatttgaaagttcgtgatttttttgacatttttcccaatttataatgtaacaaagaaatgattaaaaaatcagaataacaaagtatatgcaaacacatatctttaaaacatttagtttaatttctcggaggaggatgaatgaaagacgactcacaaattactcacaccatcactagaaaaataatgattgagatagaatcctataacatgtttataagaaatccacaatgaaatacagtccaagtacgatatgcgaccgcaatcattttgttgctataatttgacataaaaaaaatatgtaaagaaggatattgcaatattgttaagaaacacggtgttagtctctaatatcaaagattattttgttggttttatggtgttttcaataaaagttttggtattttgtgttttcttacttagaaataatttacacaaatatcattgcattgatttttttgataacactagattttaaccattttaagcccttgtttttcatgcatttagcttagtttcatgtctcttttcatgcattcttagtccatttttcttccttttcatattttgcattgcatcgcatagcatagttgtatttggagtgttttagaggtgaaaccaacacttttggactcgattgggagtgtttctagcacaatggatggaagggctcaagttatgcgatcaaaggaaggacatggagtatactcggggtttctactcggctgtagatcgagtagagcacacaagggggaagcaaggactatactcggccaagacactcagctggagctctagtggtgcacatgaggaagaagggaagctgctcgattgaagctactcggcctggacccgagtaatgtgaccaaaggaggctattcgactttcctactcggcctaaacccgagtggttctgcgccgactttcctattttgtctttttcctaattagggcatcctagtattgcctataaatagacctcctatgtttttgcccaaaatatctttgtttgtctgctggatattagggttcttagatttgtttttagattttctggttgttgtgttgagaatttggatttgatttcttctacaaacttgtttatcttattgagattaatcatttcctaagtttataatgatttctgggttttataatttttctgagttttgttctatgatgttcttcattgttcttgagtagtcttcttcagagttcttgaagatgggttaggtttaggtggatttctctgttatttagctagctaagtttataaatgcatgattcccttctgttttaggagttcttaatgctaatttttttctaatcaattgaaaattgatttcagactttctccacctaataagtgtttgacgaaatgtctgaaccaactaatttcagagatttgtaaattctaacccaagaccttggatgtttagactgcttattgattttaatagattggtgtttaaagcctgttttgctatgtttcatcaatgaaaatttagattaggaagtggtaaagttatgaggatcattgtcacgaaagtggattgatttggttatgaatctattgtctagggatagcttgattgagtttgttagttagctaatggattgaggagtccactagaaccaattaccccattcttaagagctctgtttcattttattgtgctaaactcgtgtctttagtactctgttcgttttgtttagttcgtgtgcaaaattggtgtttttagtcttctactcgacatgttttagtagtatgctcggccgagtacttcactttgtgcttggtttactttcttgttcttgcatttgacagttcctagtctttagcttcatttctgcttttatcacttgtgttctttaccttctgcttagtatagttcatttctgaattttatttgcatgttaacatgttgcttaggtttagtagaaacacaccaaacctactcacacttggcttgacttagtattctctgatcacatcctgattgttagcaattccacccaattggattgacaccttaaatgctataatgacataagatgcatttagggaattgacacacaaaacccttgtatcaatttggcgccgttgccgtttgggtgttttcttgttacatttaggatttctgagttattaagatcaagttctatttccttctttctggttactcacttctatcttcatttgcttgtttttgtcttgcatgtactcatactcgactagcacgtcgagtacataagtcgagtaagatcaaaacgtatgcaaactcgttcttaaggttttggtaatctcctgcggtatagagacgacatacacaagattcagcgtgaactcagagaacaacaagccacttcaaaaccagtagtaatggctaatgatgcgtatgctaatgagttgccaggcaacattggtgctagagatgcacctagaaaccaccatcagagcgctggtattgtcccccctcctattcaaaacaacaactttgagatcaagaatggtcttatctccatgattcaaggcaataagtttcatggactgctaatggaggacccattggatcatcttgataattttgatagactctatagtctaacgaagaaaaatggagttagtgaggtcaacttcaagctcaggttattccctttctcacttggagataaagctcatctttgggaaaagattttgcctgttgaatctatagacacttgggatgattgtaaaaaggctttcctagctaagttcttctctaactcaagaacagctcgattgaggaatgagatttcaggattcactcagaagaattctgaatcattctctgaagcatgggaacgcttcaagggctacactactcaatgcccttaccatggtttcaagaaagcctcacttcttagtactctctacaaaggagcattgcccaagatcaggatgctattggatacaatttctaatggcaactttctcaacaaagatgtagctgaaggttgggaacttgttgaaaacctagctcaatctgatgggaattacaatgaagactatgatcgctctaaccgaggaagcaacgattctgaagacaagcacaagaaggagatcaaagctcttaatgataagattgacaagttggtgcttgcttagcagagaaatgttcacttcattagagaggaagagcttacccaaatccaagatggggagaatctgactattgaggaggtgagctacctacagaatcaaggtggctacaacaaaggtttcaacaactacaaaccccctcatcctaatctctcttacagaagcaacaatgtggccaacccacaagatcaagtctaccctcaacagaaccaacagactcaagctaagccctttgtgtcctacaaccaagggtacaaccgaaagcagaactttggacctcaggcttcacctagcaacaacagactacttctgcacaagactcagagataaagactctacttcaacaacttgtgcaaggacaagcctcatgttccatgaccatggataagaagctggttgagctcaccactaggattgattgctcttataatgacctgaacatcaagattgatgagcttaacactagaatgaagagcatggggggacacattgcttctacttcagctcctaagcatcctggccaacttcctggcaaagctgttcaaaacccaaaggaatatgctcatgctatctccacagttcatacttctgtcactgaggacagtgagattcaaaagggggaggttttgagaccaagatcaagacaggaaattgaactcggcttctttgctcggcttgttgaacgagcacatgacccgagtaacccaagccctattccacctccttatgtccctgtactgccatttctagaaaggattgcacagattgaagaaaggatcttcaagaaacacaagatgatgttcatcaagtgcatcaaagagttagaagagaaggtacccttggttgatactcccaaggaagtgattatggaaagaccccaagaagctcaggaaatagttgaattgagttttgagtgcaatgctatcatacaaaggaaggtgataccaaagaagctaggtgatccaggttctttcactctaccttgttctctaggacccctagtgttgaacaagagtctttgtgatttgggagcttcagttagtttgatgcatttgtctgttgcaaagagattggggtttgataagttcaagcctagctgcatccacctgattctagctgacagatcagtgagagtgcctcatgggatgctagaagacttaccaaaaaagattggatcagttgagattacaatcgactttgtggttttagagatggatgaggaaccaaaagaccctctcattcttgggagactatttttagcaactgcatgcgctctaatcgatttacaaatggggaagatagatttgaaccttggtaagaatctcaatatgagctttgacatctccaagaaaatgaagaagcccaccatagaagggcagcttttcttcattgaagaagaaagaaggattacctaagtcctgcaattgaggaatactttgaggaatctgattcagagaaggagactatactgctgatgaaaaggaggcttactttgaggaaagatccaatgagtactctactctccagctatctagagaaaatgcagagtatgattcagactttgaggattcagcaagtgaagatgaggagttctcagttcctctcttcaatctcttctctacctaaaacattctgagagtcaagcttagtgactttaaacaagctcacttggtaggaagtcccatgtctatccttgtatatattgttttcttgttatttttgatgtttttgtttaagtgtttcaggaaaaaggacctttgacaattttcgggccccactcgaccgaaccactcggctacagggcgagtgtgggcttcaattgattaaagcccagacatgaaccatactcggcccatagtcgagtatgagcctcactgttcaagcccaaaaagatgcaccactcggccagaagccgagtaagaaagaagtccactaagcccaacattgtactcgacacgcgcgccgagtatgtcggccgagttcacatgtgcgaggtcaacacaatttaaattcaaatttgaattcgaatctacttggccccacacgtcaatcctgctctccaaaggccatcaaagattcttctgcaaatactgaaagcttgtccccttgaccaaatgaagggtgaagatctagggtgtttgaagggctaggataaaatcttcttgtctataaaccaccctcaacaagctaagtcacttactctctctctttactcaatcaatttcgtattttgctacttctctctagatatttcaagattttactctcacttctctttagaattcccagaaactgatccataatttcttacttccttttcatacaatccatttcaaaacctctcttaaagcttttgatcagtttaaaacttcaaattctcttctactttgacctgctttgggttgttttgggtgactatctgtagtaactcaccacaagaccatggattctgaagaagcaagaagaatagcctctgctcgtgctgtagctagaggatttgccatgatcaacgagaaaggtccggttttgaatcaggaagctgtgagtcctggttttactcggttgacaggtcgagtacagtggccgagtatgactccagaatcttctgtgggttgttctgctgctgccagagaggaagttgcataggggaaaatggtttgggaagctgaaccagttacagaagaagaagtgcctgtgttagagggggaagcatctgaagaagatgaggagattgttgaggaggttttgccagttcatgtaagaaggagaaggaacaatccaaggaagaaagagccaaccattgaagagttaccagtacctaatggagctgagttttgaagggacaagatatccccatagaccaaccatgcaagcattggggatctgtagggatattgaatatctcatggagatggccaagctagagacattcttttgtgaaggatacaaggaggagagctgccagttcctagccaccttgaagctccacttttatgccgatgagagagagaaagaactacataaaggagtggggtatatcacattcatggtgtatggaaaccactactcccttgctattaggcagctaagtgctgttttcaagttccctaccaagtatggaatccgccagaacttcaacaaggaagagctccatgatttgtggttaacaatagccggtccgcttccctacaagtcagctagggccaaaagttcagcaataaggagtcatgtgcttaggtatcttcacctttgtattgcaaatgccttcttcccaaagaagacaactggccatgtcaatgagggagagctgaagatgcttgatcttactctattcttcattttggggaaaataatgaagaaaatagagatggaaggggataggtccgatacatccctttcggtggtgttgattgatcatttgataagctttagggaatatgcaaccggcatccaccaatccggttatggaggcagcttgtgtgatggaggagtgatcacacccatcctcatagctgctgaagtccctcttcatactcccaatgtcacaaccaattacattaatatggagcatttgaggaagaaaggcttcctggataggtcagctccagctgatcaatttcagttcaagtttaagcaccccaagctacgcctctctaggctagcacttacatgcaaggagtacaccaccgttagaactggaaacaacattgactttgatcctcctccatcaatcttagtcaatgtccatgtgcctttccacgatgagccgagcatagggagtgagtcaccagaagaagaagcggagttcaaccaagcggaagctgagcaggaagaacatactcggccgagtacatttcagcaggccgagtatggccaggccgagtatgaccagtctgaattcagtctagcagagcagtttgatgagcaagaggattcgtgtgaagctgcagtagagcagtatttctttgaagattatgctgagtccgatcaagaaagggatcccggccaagtacacaagaagatgggaattctaaagggtctagggaagtttcagagaaagttcatttgtgggttgaaaaagaaggtgagaaagatgaagagggcaatgaacggtatggcggttcaaattctggaggtccaaagaaggcagagattaccaccacctccatctgagttcaggagaagcaactcgatgagtgtggcggcacaaaggaacgttcgttttgacccaccaagagcctcatcttatgagcgtgggaggagctccaccttctcagaccgccgcttcaacacacgcccacccggtatagcgaaccagttggttctgaatgctgacccgagccgcaaagagttatactcggggtacatgctcgaccggtcaaccgagtataaccccagcacttccacccatgatcctgagtacacacaagaccgcctggacgagtttgtccagaacctcttcgtctaaacactgaggtatcactccatttcactgttaataccattgcatttcttttgtttttgcttagtgtggttatttctcttgaattctccttcgaatttttattacacaagggactgtgtaatttaagtttggaggagagttcagaatgtatctaacattgtttcttgttttcttattcaaatttttgcatcatctaaggcatagaaaacccataaaaatttgaaaattttttgaaaataattccaaaaaaattagagtgccatgtagtttccatttgaattatagggctgttttttgaatgatatcatataggttgttgcatcatgcacttgcataggggataatgatgatcatagccttgtaaatttgcaatgttcactagatagttttaatgcctttgttgttagttgtctagttcttaaccgattgaacttgaagtaagaccgcaccatcttttgaattcatatacttgaccttccttagtcgaaactcgctgtgatttgaagctattccctatcaatttaaaccataatttgacttgtaattatcatactatgcattgcttgttaaactcatggttaccctaaaaatatttggatcttcttattcatttcaccacacttgttgatccaaatagctgactctcatctttagagcagttctcccacaccctaacctaagccttctttcaagccatatatcacttgtgagtgtttgtgaggtcttatttcgattaagcttggtagaaagtgttaggtttgtaacgacaaagatagtatctcatgtagttctagttcgcgttatccagactagataggattaggtgggtacttatactatgggttgggaagagtttaaaagagaaaaagggttgaattcattgtttacaagaaaagggaaaagaattctaggagaagtaagctaaagaagttagaaaagtctagtaaagggtttgagattgttaaagaaaaagattgggttctagttaggtaatgaagaagggtaaaaagccctaagtttaaagagattaaaatcagaaccttagtgctaatgaaagtcaaacccgctagaagtctcaaagaaaaaagaaagcttctcctagagttaagagaaaaaaagaaaagaatgggttaagaaagaattcaaaagatcatgaatgcaaatggtagagttaagttcttaattgggatgtgagatgggatttccattagatcttcattgattatactttgggtagatgagatcttatctttgtaagcataacttgggacttacctttagcattctattaaagcttaatcattcttgagagatcttttgttactaaagcctattctttaagggaccatttttgtctcttgaccctttacccttagccaaatgagtttaatatgcattttatagtatgatccatggttcttgcttaatgaatgttaaagggaatatgctgattcgaatgcttgaatagactaagttaaaggttaggttgtgttgtgaagatgatggctaaagtttttaagtagagatcattcaacctatcactctagaattagcaacatggacattgagaccatttattttacatgcatttttggctctgaatccccaccttcaaacctcactcctaacctagttttatttgttgcttgaggacaagcaaagagctaagtttgggggtgttgataacactagattttaaccattttaagcccttgtttcatgcatttagcttagtttcatgtctcttttcatgcattcttagtccattttccttccttttcacattttgcattgcattgcatagcatacttgcatttggagtgttttacaggtgaaaccagcacttttggactcgattgggagtgtttctagcacaagggatggaagagctcaagttgtgcgatcaaaggaaggacatggagtttacttggggtttctactcggctggagatcgagtggagcacacaagggggaagcaaggactatactcggccaagacactcggctggagctcgagtggtgcacatgatgaagaagggaagctgctcgattgaagctactcagcctggacccgagtgatgtgcccaaaggaggctactcgactttcctactctgcctagaccccagtggtgctgcgccgactttcctattttgtctttttcctaattagggcatcctaatattgcctataaataaacctcttatgtttttgcctaaaatatctttgctgtgtttgctggatattagggttcttatatttgttttgcattttctggttgttgtgttgagaatttggatttaatttcttctacaaacttgtttatcttattgagatctatcatttgctaagtatataatgatttctgggttttatgatttttctgagttttgttttatcatgttcttcattgttcttgagtagttttcttcagagttcttgaggatgggttaggtttaggtggatttctctgttctttagctagctaagtttataaatgcatgattcccttttgttttagaagttcttaatgctattttctttctaatcaattgaaaattgatttcagactttctccacctaataagtgtttgatgaaatgtctgaaccaactaatttcagagatttgtagattctagcccaagaccttggatgtttagactgcttattgactttaataaattggtgtttaaagcctgctttgctacgtttcatcaatgaaaatttagattaggaaatggtaaagttatgagaatcattgtcacgaaagtggattgatttggttctgaatctattgtttagggatagcttgattgagtttgttagttagctaatggattgaggaatctactagaaccaattaccccattcttaagagctctgtttcgttttattgtgcaaaagtcgtgtctttagtactctgttcgttttgtttagttcttgtgcaaaattggtgtttttagtattctactcgacctgttttagtagtatgctcggccgagtacttcactttgtgcttggtttactttcttgttcttgcatttgacagttcctggtcttgtgtttcatttctgcttttatcacttgtgttctttaccttctgcttagtatagtttcatttctgaatttgatttgcatgttaacatgttgcttaggtttagtagaaacacaccaaacctactcacacttggcttgacttagtattctctgatcacatcctgattgttagcaattccacccaattggattgacaccttaaatgctaaaatgacattagatgcatttagggaatggacacacagaacccttgtatcacttttaatataatgatggatgttgattatgtaaaaaattaatgttatttcagtgatatctataaaatctctcaacaaccatgtctaacatacaaatgtttttaatttcaatactaatacttaaattagttaatttagtaaaactattttattaaataatcgaaaaaaactttttaccctgcgcaaggggacaacacctagttctcattgtataagacgagtgtactcacaacaacattcattaatgagaataacataatttcttgattctctctctaacaaacttttctagaataaatgaaaccaataatcaaatcttaccttaaactcacgcaccagagaatgaaacgttcggagagaaatgacacgagatagagcgaagaagaaatccggcgagagagaaagagagatccggtgagagagagagagatccgatggagagagagagatccggggaagtgtttgtttgcggcgaagaagagagggcaatggcgtcgagagaatgagagaaatagattaggtttttgggatgtaattctttaaattatttaggggtatttaggtcattttgtattttggactgaatcagttccagttaactggtcgatcagactcagccggattccgatcattttgaaatgagttttataaaaaaaatccaactgatccatctcactccagtgttaaattgctctaaacgaacatcattattcatctacattcaactggatcatctgactggacaaacaaacatcaccttacttttgaatgtttttttttatataattacatcaaagaatatttttattttcttattgacctctctacgatcaaaatacaatttctaattgaagaatattttttgttgttatgtatttgtctaaatcgtattgatgattaaagttttattgacttcatgaaaagaactttctattcttttttatttacgctctgaatggagaaagcgtacagggtagagcggatcaagcacatcaagcagaacaaaagcagatcaagcagatctagcggtagaagtgtgagtcaagcggttcaaacgcttcaaaagatattttgaatggtgaaagcagatcatatagtgcggatgaaatatgtactttttaaaaaaatagaaaatctaaattaataaaaatatagattaaattttcttagataatagtatatggcacaccttccaaatttatctacttttatgcttacattcaacttttaatcatttgtgtttatacattgatgggagaaacgttattctatgggtttttttttgccttttagcaacaaaagtggatgaaccacttacataacaaaaatgagacggatcatctatataatgccacacacaattcaaaaacaattttatatttacttttaatatcatttatggctatataatacattgtaaagaaacacttttacacacaccaaaaaaaaaactctttctattacttataccaaaaaattaaaatctcttacatacaacaaaggaatgaaggtcatatttcatttttgaaatcaaattatgttttattttatatataatatatgtatgtattaagaatattgtactataattaatacatatcgattaattaaaactagagtagttttattgattaatttatttatagcttcaaacttttgtataaaattattgaaatacaaacatatatacttataagtacaatttgtgaactattacaattttgatttctaatgttaacttttcatgaaatataacaataacttgatgtatgttaccaattgtttctaaacttttttgttagctgtctataaagtagaaattcagtaatttttatcttttttatgtaacaaaaaaaattactattactatttattttttattaatagttaaatagtatcaaaattaatatatacataattacatgtatttttaaaagaaaattaactattatatggtataatttgaaaatggttctcctcctaggaataagtaggaactgtttaaccaatgtcatgcatatttaagttctgttattgacaagacatttggagttcggaagaaaaaatggaggattccttgtgaattttctagatataatactcatgtgcaaaagagagtagtaatggctacaatggggctacataattttatcagaatttcaaatttttcaaatgaagcttttgcaaaagtaatgcgaaaaacagagattactgacaaattttgaaactagttaagagaatatctaagctgcagagatagttgatgacgatctaatggcaaatacgtgatagagcatatggatgaaccatgacagcaaacagactttttttagaaaaatataaagaataacctcctgtaacctcgtttcttccaccttaaacctgttggttttcatcccaagaagcagaagacctcacacaactgtgatcaccatcactgttaagcaagagcagaagagcgttgtagcggttcaccccccagctaaatgcagcagtacccattttttagagaaactgaaaactgaatgaaaaagaaagaaactggagagaaagaaagtgagggttataagttgattttcttattaatttatcatgtaatattgtgtgttagggcatccccaaggctaaacaccattttggtgttcaaattacaccaattttagcgctaaaacttgtgtcctctccaaccataacaccataactcacactaaaagaataatctactattatattatttatttaaaagatttcttttattatttaatagttttgattagtatttataattagtatagaattacataacattataaacatagtacattgaaatatatatttaaaatacataaaatttttaactattttgagtattttcatatataataatataaatatatcataattaaataaactatttcaagagatataatatattaatgtatacattcattttttcattttatatctattaatcattagtaattttattgcagatatgttatgggaaaatcaaaatagtagggtattgtttgtttgatcaattaggtagtgcatctgggtgatcatctagaagatccattcagatacattatttggatgatgttgatttctaaagttgaaagtacatctggataaatcatatgaatgcagatgtgttcgtttgaattattttttaataatgtgcatctgcatctcaatgcataatgtaccaaataactaaaaaggacatatatttatcttagtgttatttttatgatgtaaattatatttacatcttcattattcttctaataatatgtctctcccgcttgaatataagacctgtaataaaaataaagcatatcaccaaataaaagtgtaatacttaattctctatatatttgtaatacttcaaaaagccaaacgtgacaaatctccttcacatgacaaaaatctccttcacatgacaaaggcaaataatgctaaatcacaatggaatgaagaggattaagcaagtagcaagaacaattgctaattatagatattgagtcataaggtttaactagccaaaagtgttaatttggagcttccagtctataaagtgattctgattcataaaaataagagtggctgagacgttatagttagaccgagagtgaagtaaagtaatactactttaaaaggaagttcatggacgtcaaaccaagaacgcatcaccgcaccatctgcataagaaagaatagacataaggttttttcaaacacatatggattaagaggcatgacaccaacatgtaccacagagaaatcatagataatcaaaccataagtcatgaacaacgaaatcaataacagtaagaaacattaacatgaatgcagatcaaaaatagaaaaggaagaacgtactgttgcagcctacaacttatagatcaaaaatagaaaaggaagaacagatacatacatagattcctttcaaatatcattataagagaaaaagggaacaccccatagaaattttaactaaagtagctaagtaaaacagctttgtaatctctaaaatttttaacatctgcagcaagcatgagagatatatagagaccaattctgaaattctaaaacagttaagaaactaacaacacttaaaagtctataatcagttcaaaagtcatgaaacctaaacactcctaatagagataaaactcctaatagaggagacaagtagaaaaagaatcataacaacaaatctactgcaaacttgacctaatcaggaagaagataactcaaacaatctataacagaaattagaaaaacaaaagcggggaacaaaaataatcagtgaacaaactcatcaagcaaaaaatgcaacttcaatcacaatctaccctaattcagactcgaaagtaactcctgcggtgaaaaatcttaactttacccaaagaaaaaacacctcttgaaatcaactaaacaagctaagaagtaagaatcaatgtgttacgaagctatatacaagacttaaaatgggtttacgaaataactcaccaaggtcacactgttggtaaaacttgtgtacatctgcaaaacataaaacatgaataaacccataatcgtcaaatctcagctaatgaataaaccgaggctaggaagaagaaagccgaaatctttgagttttttcctcagcaaattaagaaaacccaattgaataaacgagcaataaacatacaacaaacttgcaaatctacaaaaagtattttagattcgagcaaacgaaacagagtatatagaaagagagattgagctgaccagtagagagagccttgtgttgaatagaagcttgacccagaaaggagaatggtgtaagtagagactggagttttcgatttttgattttcctcttcacttttctgaaatcgagaacaagcgatccaattttgaactacacccaaaaaatctattacaagtaagaatcgaaaagagatatgtatacctagaaccgagctaaagctaatggagaagcagatcgagagctaacgataatggagaagcagatcgaagagtgagagataaagggaagtgaagtaccctaaaaatctatttttcttcttttgtctagaattgttgagaaccgagggataagaaatggttccgtgcaattttcaaattttaaagagatatttaagtcatttgctatttttggctacagctaatgcatctcaatgcaccgatcaaactcagctgaatttgttgatttttttggatgagttttataaactctactaactaatgcattcaactgttctaacaaattgtgttcaaacaaacatcaattgtcatctgcacctagatggatcagtcaactgatcaaacgaacaacacctagatattacaatttttgtacttttgtatttgaattaaaaatattaaatattgtaataattatcacaataaatctatttactatatttataaataaaataataatttaatattctataataagatccgtaataattgatccgttttcaccattcaacatttatttggaaccgcttgatccgctcttgttccgctagaaccgcttgatccgctcttgttccgctagaaccgcttgatccgcttgatagagcatatgaatgaagattgtgatagagcatatggatgaaccataacagtaatccgaccatttttagaaaaacataaagaataaccttctttaaccacgtttcttccaccgtaaacttgttggtttttatcccaagaaacagcaaccatcacacaactgtgatcattatcacaatcatgcaagagcagaagagcgtaatagcggttcaccccccatctaaatgcggaagtgtccattttttagagaaagtgaaaaccaaatgagaaagaaagaaactgagggttataagttgattttcttataaatttatcatgtaatattgtgtgttagggcatctccaaggctaaataccattatggtgtttcaattataccatttttagcgttaagacttgtatcctctccaaccataacaccaaaaatcacactaaaagaataatctactattatattatttatttaaaattatttttattatttaatagtttcggtaagtatttattattagtatagaattacataacattataaacataatacaatgaaatatatatttaaaatacataaatttttaactattttaagtattttcatacataataatataaaaatataatatttaaataaactatttgaagagataaaatatattcatgcataaatttatttttttattttatatctattaatcatttgtaattttattgcagatctgttttgggaaaattaaaatattagatatttattttttttactgttgaatttgaattaaaaaatattaaatattttaataattatcacaataaatctatttactacatttaaaataaaatcataatttaataatatataataggatccgtaataactgatccgcttttatcattcaacatttatttggaaccgcttgatccgctcttgttccaccagaaccgcttaatccgcttgataaagcatatagatgaagattgtgataaggcatatggatgaacaataacagcaatccgaccatttttagagaaacagaaagaataacttctggtaacctcatttcttccaccgtaaacctgttggttttcatcccaaaaaactggagaaatcactgaactgtgattatcatcactgttatgcaagagcagaaaaacgtaatagcggctcaccccccagctaaatgcggaagtgtccattttttagagaaagtgaaaaccaaatgagaaagaaagaaactgagggttataagttgattttcttataaatttatcatgtaatattgtgtgttagggcatctccaaggctaaataccattatggtattccaattacaccatttttagcgttaaaacttgtatcctctccaaccataacaccaaaaatcacactaaaagaataatctactattatattatttatttaaaattatttttattatttaatagtttcggtaagtatttattattagtatagaattacataacattataaacataatacaatgaaatatatatttaaaatacataaacttttaaatattttgagtattttcatgcataataatataaaaatatcatatttaaataaactatttgaagagataaaatatattcatgcataaatttatttttttattttatatctattaatcatttgtaattttattgcagatctgttttggaaaaatcaaaatattagatatttattttttttactgttgaatttgaattaaaaaatattaaatattttaataattatcacaataaatctatttactaccgttcttgttccagtagaaccgcttaatccgcttgataaagcatatagatgaagattgtgataaggcatatggatgaacaataacagcaattcaaccacttatagaaaaacataaaaaataactttttgtaacctcgtttcttccaccgtaaacctgttggttttcatctcaagaagcagcagacctcacacaactgtgatcatcatcaatgttctgcaaaagcagaagagggtaaatgcggaagtacctattttttagagaaagtgaaaaccgaatgagaaagaaagaaactgggtagaaagaaactgagggttataagttaattttcttataaatttatcatgtaatattatgtgttaggatatctccaacgctaatcaccattatggtgtttaaattacaccatttttggcgctaaaacttgtgtcctctccaaccataacaccaaaaatcacactaaaagaataatctattattatattatttatttaacagatttcatttattatttaatagttttgattagtatttattattagtatagaattacaatatattataaacatagtaccttttttttctgcaaactgaaatatattaaccaattgagattttacaaagtagtttttgtaaccaaggtggttgacaacctgattcagaataaaaatctccatgaatacaattggaggttgagaggtaatgagctatactattatttacacgctttgtgaaaccaaaggagattgaagaaaattttgacgcccaataatctatgtcaagcagatggttctctatctctgaattattagagtgcccattaatcgattttatgagtatttcacaatctctttcaaattgtatcttcctaaaccctcttatccaagcttgttaaagtgctactagaagagctttcgtttctgcctctaaaggagacgttacattaggtagttgtgatgaaccccaagcttttggtatcccttgatcatctctgataatccacccgcatgtagcttgacccgaacgcatatcaaatcctgcatcaaaattacatttgaccgtcgacaagggaggttaatccaaatagggtgcgagatcataaccggttgagtgtctttggctgggattaaagcacttcttaaagttgtaatccattcatgaacctcagcttgtacttgtagaaccatccgtgaagggctttcccaatatttgttaaaaacaaaattatttctcgccttccaaattctccataatagccatatcggaaccaactatttattttttgtgagttgctggttaaagtacgaatctattatataagagatattctcctttagatcattcaaaaaatgatgggtttgaaggatagtcaaatttgacagacgccacaccatatttgcgtaaggacacgtaaacagaacatgatttatggtttcttcttctctacggcaccgagaacacaaagaatcaattttcatacctcttgtgattagtctgaaacaggttggtaatgcccgtgaaacgtcctccataagatgtattttattttagggattattggaagtttccatatcttgttctttaattcaacagagccatgaggaatcgctggtttccagtgggtatcagttggatcatgtgtgagtagccaatatcccgatcgaacagtgtactctccattagtgttgtagtttcaaaccaacttgtcttcttgccttagcatctaacacagactcatctttgaagtatctagctttcattattcgtgcaaacaaggagttaggattttgaattatccgtcatgcttgttttgccaatagagcatcattgaatttggagaggtctctgaatcctaagtcgccttcttttttagagtattgtaatcttttccaaccaatccatggaattcctttctttttcgcattcttctcccaccaatagttcataaggatagactctatttcacagataacttccgccgggagtttgaaacatgacattgcataaatcggcattgccatgaccataaattttagcattatttccttttcagctagtgatagaaactttgcactccaactagacgtacgttttttaacccgatcaataatattctcaacatttctctttttttccttctgaactgttccggtagtcctaaatatttgcctccgcctccatgattttgaatgcctaaaatgtgcttaggacgattttgtgttgtaccatggacttttgatctgaacgtaatcatcgattttgtcatgtttatcttttgcctagagtagtaatcatagacatcaaagacatcctttaacgcttgacaatttcggacatttgcttggcaaaaaaacagagaatcgtctacgaattgagatgagttatacttgaatctccaagccctatacgaatgcctctactatctccatccgagactcttgatttgatgaggtgacttaacacatccgcacaaagtataaaaagataaggtgaaagaggatctccttgtcggattccacgttccggtttgatagtaccatgtggtactccattaattaaaacggagtaacggactgtgcaaactgcccccataatccaatcaatccatctctcacaaaaaccaaacaacctcattgtcgtctccaaaaagttccactccactctgtcgtaagctttgctaacatcagttttaatagccatgtatgattttgctacacgctttctcaccattaaagaatgcataatctcatgtgttatcatgacattatcattaattagtctccctgggatgaaagcagcttgagagtcataaacaatagaatccagatgagtctttagccttgctactaaacatttagagattatcttatagagcacattacataaagcaatttgtttataatcagaaagtgtttctggattgtttattttgggaatcatacaaatatttgtgtggtttattgatggtttcatataggaagtcctaaaataatttttgacttcttttatcacgttaggaccagcgacatcccagcatgatttgtagaaccttgctgttagaccgtctggtcccggtgctctgtcctcacctaccgcactcacagcattaaagatttcctcatcgctaaactctcgatttaaattatcatttttcgttgatgtcactgttggtgtaaaatctgcaaaatctataacggatacgggtcgtccattactcttataaattttggtgaagaattgttgagcatgtcgtcctattgtttgatctcctctatagatttcaccatggtcatcactaatggagtttattctattttttgagaacctggttttggcgcaagcgttaaaaaactctgtcttacgatctctttctctcatccattgattgcgacttttctgctgccaataaatctcctcatctttgtaagttttggttagatctctctgaatttgtggaatcaattgtcgttcagaatgtacgaggcttgatatagctctatttagcactgcttgtagatgtttgattcttgtttctgcattcaaatttgttttatgttttaatcttgacatggcttgtcgacacgttcttacttgatccataattgtaacatctcgcttcaacttttctctattcgaaccttctttaacgtgatgtttgaagtttggtatctcaatcagccgcttgtcaaaccggaaaggtttcatcttaggtggctctgaaattcctaaggttaataacaaaggcttatgatctgaagcagtaaattccagaaactctaattccgagagtggaaaagaggcagcgccttcagtattgatgaatgctctatctaagcagctttttactgtatgagtatgtcgttctcccacccaagagaacttgtaaccacttgatcgaatgtcaaccaaatcacacattgaaaccatgttgcaaaaatctctgaaagtccattcatctcttggtggtccgcctatcttttcagagtttgataatatctcattgaagtctcctatgagaacccatgagtcattacgtgtaagtgaaatattttcaaagtgtttccaaagatgatgtctttcactttgagaagggtgaccatacacgcaagacaaatagaaacttatgttattaatagatatatgtacatcgatatggcgttcatcctgaaaattcttagataaacgcacattatccttccacatcaaggccaagccaccgcttctaccttgagtgggctgagttgttagagaatcctaatacacacgctagattatgtacaacatcacacttattaagcgtttcaataagaaataaaacatcacacttagttattttacataaacgtactagaggggattgagtcagcggcgggaggccctgacagttccaggagacgatcctcatggtggttgtgggggtaccgggccccccgcgcctccgtcaagtcgctgtgttatggcacatgttgcagcagaatccgttctcctctctttcttgcggagatggctcaggaccgccgcttcttcctctgcttctgcgtggttgtatagagtttcaaaacttactctctttctcttcatgaacacaaagtcatttccatcattgtctgagacctcctccatcttcattgtctcacgattgttcattttgctctctcttgttaacttggcatgaaggtaccttaatctctcaacagttaaatctgtgtcttcaaaggcacttggaacataagatgaaactgaatcagaggggagattggtgctatgtgccactgtgctttgacattggattccgggaattagagttgtcggatcaacgcttggaatagagtcatcattatacatctcgttgtctcactcatcattgttgtgatgatcatcattattgccttcatcatactctgcaggatcagcctcttcaaacaccaatgaacattcttcgacatcatgtttcaaggatccacatttagtgcagaactttcttagcctttcaaatctatactttatgattgtgttctttcatgcatcgaaacgaaagttcctctggaaacgaagtgggtcatctaaattccagtttatcttaacccttacaaatcccacatgattagcattctcgtcaaagtcgacatcatcaacatatcctagtcgattccccacagcacgagccattgcgtttgtcaagtagagaaggggaataccttgaattttgacccagaagggtatgattttcatctccgcatcactgatgtttggatcccatcgatgaattgaaagcatccaatcgtcgaataacatagggcttcttcgcagaaccaagttcattgattcttcggtctgaaacttgaactggactttcccctgtccaaggattcgtcctacacatgtctgcaaatccccaaacgcaaggcatctgaccaattagcaccctcagattttgctttctcggattcactgttgtggcaatgagagagaaacggtttacagatgccgcttgagagcataactccggtgacagagtgatagggtcatcattgatgcccaaggcgatatcttgtactgactttttgaaaaagtcactcatctctgttattaggattaacagatttttaatagaatggaagtgttggagcgagagaagatgacagaagcctttatacttgcggatccatggcagttttggcaagcggttagctcccgaaaaattgcggtcatcatcactgttatgcaagagaagaagagcttaatagcgggtcaccccctagctaaatgcataagtacccattttttaaagaaagtgaaaaccgaatgagaaagaaagaaactggggagaaaaaaaaatgagggttataagttgattttcttataaatttatcatttaatattgtgtgttagggcatcttcaaggctaaacaccattatggtgtttaaattacaccatttctagcgctaaaacttgtgtcctctccaaccataacaccaaaaaatcacactaaaaaaataatttactattaaattttttatttaaaagatttcttttactatttattagttttgattagtatttattattagtatagaattacataacattataaacataatacattgaaatatatatttaaaatacataaaattttaactattttgagtattttcatacataataatataaaaatatcataattcaataaactatttcaagagatataatatattaatgtatacattcttttttcattttatatctatgaattatttgttatgttatggaaaaatcaaaatactagatattaattgtttttactattgtattttatttaaaaaaattaaatacttcaataattatcacaataaatctatttactatatttataaataaaattgtaattaatattatataataagatccgtaataattgatccgctttcaccattcaacatttatttggaaccgcttgatccgctcttgttccgctagaaccgtttgatccaattgatagatcatatggatgaagattgtgatagagcatatggatgaaccataacatgcaatccgaccatcaaatcatttacgaattgtttcatttactcttctcgagacacaaaacaaacatcaaatcaagttaattaacaacaatctctttttctattgtagatgaagaagaatttatgatgatacttctctgtcgaaaagcaaaaaaaaaacagaaaacaaggtaaaattgtcgaaactgttggagatcttttttgctatgctatcttatttgaaatggcagtcaagtgtatttataacgggttttctaattcaaacaccatggtctcgggatgagggtagttcctaaaaactcattgcgcttcagcagcttgtagtactcgtttcgagttgcacacttctctgattccaaatcatcaccacctcctctctctgtttgatcagcttcctctcgtgaagccatttcttcctcagagtcttcatctacaagttccaacctcctccccacgggcttttttcctcgagtgatgtctgccttgttccttgagaattctcttgcagaggacttactcgaccttcgggatcgagtatttccagcgggagggctgaaagtttcttcttcttccatcacttcctcctcttggcttgattcgctatgatcgatctcgaaacttgcttgttctctccttctcgaccccttaggtgatggttcagaaagtcctcgagctgctgcatgcgaagaaggtgttgggtacctcttcgatggggagagagttctgttccggatccttgacaggagcgtgcgcctgtttgtcattgagaaagagagactcaaaggttaagagatcgagtgatgaagaaaatagatgtattatgttgagtttttgatagaaagcggaagtgcaagaaaaagagatagagagagagatataagaattcgagattgctttggtatgagaggtggagagatgaggttgttgagttcgggaattgcaatggggggaccaaagcaactatggggggttaagaagacaaagagacaacatcgtttcaatggaggcgggtcacgaggcgtcggagtccagaaggtggtctctttggtttcttcacttgatcggacagtggagaatgcttcgcttttaatcactcgatcaaacggaccagaataaacctcaagaagtcactcgatcaaacggtagtgatgcttctctcatttggtcattcaaatcaccggcttaaagctctcttccgcactttactcgatcaacggttgagatgattgttgacttgttttgaatttactcgactgttgacttccttagggtcaataaaacaaacctgaaacacttaaacaaaaacatcaaaaataacaaaaaagatagaaagttatatacatggatagacatgggacttccacccacgtgagcttgttttaagttactaagcttgactcttactgagcttagtgagaaaaaaggttgaaggcgaaacagagaagtcctcatcttcagtggttgaatttttaatgcctgaatcatactctgcatcctctcatgacgtatggtatgatgagtactcatttgatttttcttcacaataaacctctttttgatcagcagagtagtcttcttcttctaaactaggcttctttcaccaatcctcaatttcaaagttcgggtagcctttaaccatttcttgaagttccataatggtgctatttaacttttccatcttatgagttaactttccaattgtatcctcctgagctttatatccaatctagagctccaggagttctttagcaacagaatcaagaatcaagtgttcttcttcagcataggggttggtgggaggtttaggcactcctggagaataagtcggaataggaatttcctcctcactcaacaacttgctctctaggcttctttcctctaagtgaactgctttctgatcttctggtgcaaaccatttctgttgtaaaatcttcgtcctccttgataactagtgcagtttccatcttctctcggtcaatacccattgaaaacttattaactctttttcaaacatccatagttgatctttcagcttcatcacccttgattataatccctctatgactctgctttgccatttaaatttttttctcatctcataccagtcatcttctgtaggatcttcagtctgagctaacccttctattactctcttcttatggtcaaaagttctctttaacttgctgagttgagaagtatagttaactcttggtgggttccagcttctgtttcttcatcaacatccatgtcttgaatcccaaaattcttacctcctgttgttgatttccctgaagcttttctgatgtcaaatctcatcttgatacctttttcaaggtttagatcaaattttccattcctgacatctatgactgctccagctgaagctaagaatggtctacctaggattcggagatccttgccttcttcatctacgtccaataccataaaatctgtaggtatctcgacatttccaatcttgacaggcatattttctattagaccatgaggatgtgcaacagaaccatcagctaagagtaaagctaagttgtagaacttgtatttcatgatccctagccttttagctttagagagaggcataaggctaacagatgctcccaaatcacaaaggcacatattgaatgtcaatggtcctagagggcatggcaaagtgaataaaccgggatcatcaagcttttcttggataactttcttcttgtacgtttcttgagtgatgactctactaatcatctcttgattctgatctttcttgagtttttcaattttgagcttttttccataatggtgagtattcagcaaaggtatgtgctctatagtccagatgaattgctgggtggcaggtgcaacaatttgagttgaatccccccttcttgaatcttgaatcatacaatcctcagtattgggagtctgatgacttggtggaaactcatcttcttggtggatggtgatagcattagcagtagcatagtccttaggattctggactgctttttctggaagttgctaaggatgcttcggagcagaggttgatgcaaattgactctccacatacttgatttttgaatgcagagctttgaacttgacatttagatcgttgtaagaacaatcgatcttattgtgtaattcagctatcttcttgtcaaaagccatagctccagtagcttgtccttgaatgatttttgaatgacttgcttaatttcaggatcttgagttgctggcgcttgttgtggttgttgagtgaaccctggtggtggattctgttgttggtagcctccattaaactgttgtttagggacataaccttggttgtactgaacaaaaggctttagactgattctgttgtggtggatacacttgatcttgggggttagctacattagtgcttatgtaggagaggtttgggttaggcttgtagttgttctagcgcttattgaaccctccttggttctgaatgtagcacagctcttcaatttgatcattccccccttcttgcatttggaagtgttcttcatcagtgatgtagtgtatctgcttctcatgagccagcaacagcttgtctagcttttcattcagagccttcatatctttgctagtttatcctcatttcttccagttcctctcaatgagcgatcatagtcttcattgtagcacccatcagattgtgccagattttcgactaactcccagccttcttctacatccttgttcagaaagtttccattggaggcagtgtcgagaagcattctgatatttggtaaagcccctctatagagtgtgcttaataaagaagttttcttgaaaccgtgatgggggcactgagtggtgtagcttttaaacctctcccaagcttcacagaaagtttcattgtttttctgtgtgaagcctgagaatctcgttcctcaatctagctgtgcgagcattagagaagaacttggcaagaaaagctttcttacaatcgtcccatgaggtgatggagttagggggcagagtcttctcccaatggtgtgccttgtctcccaaagagaagggaaatagtctaagctgtcaagatggtccaggggatcttcaataggtaaaccatgaaacttgtttccttggatcattgagatgagaccactcttgatctcaaagttgttgttctgaactagtggaggcactatcctttgtctttggtgatgattccttggggcatcaccaacaccaatgtttcttggttgatcaacattaggtgggtcttgaacatcaactcgtctgttcagttgatccatagcagctggtctttattgatcacaggctgcctttgctttggtttcttgtaatgtaacttgataaatgtaaaagaacttgatcttaactttttctgatatcttgaatgtaacaatgcaacaatgaattggcaacggcgccaaattgataagtaggtttttacgcctacttaatgtgctgaagtgtggtgtgttcagttcaattctgcttaaacactaacatatcgatgcagctatagggggtgtcaatccagtccactgttattactagcaatcaagatgtgtacagaagcaactaagtcaaaccagattatagagatggttggtttctagtaacaatcctaggtcaggattcaaacaacgaaaatgagaactttaaaagcttttctcgatcattgggtcgagtagaaccaacatgtaacaaatttaagaactaaaatgcaatcaacaagtgacacaaataacagttaaatagaagtgcaatgagggggtgaatacaaataaatctaagaagaatagaagtcctaaggatggattcattgataagggcaactctagggctcatccgtggctaacaggtgaaaggcagaaaccctagacgatagattcaaaaaaaccgggtcaatccactctcgtgacagagacccccataactctaatacttcctaatctcaactctcgttgatgaaacatagcagagcagggtttgagcaacaatctaccaaagccaataagcagactagccaatatcttggtctatagcctacaaatctctagaatctctggaaggtctgaagtagagctagaatcgggaggagctgaacaaacataaccgttcaggttactactttgtacccgtttgaccacaaaaccgagcatcaagtcaaaaatgaaagctcgtacctataggagggatgaccaaaggagttggttggacccgtggaacctcttcaactagattctatggagctgctggaagagcttgatatgtctataatttgcatgttttcagtgttcattcatcattatttggagtctagtttcatatcattcatcactgttttatatcatttctcatcattctcgcacactttgcatgattaggatagctgttggagctggattcccctccaggaatccacctgcgaaaataccaagccagcccacaaaagtccactaagcccattaagtagaggacctacgcagctgacgaaatgacctaggaactgacgaagagatattcgtggagcggacctgatatctcggaactgacctgccgaatatccaggaggatctccgcagatcccggacggagctaccacgtgcgtagacctatataagggaggtaggacgacttggaagagacattcaatccaacttacattgatacacacacttttacacttgtaatcccttttcacattgtaaaagctttgtcataattaatacaaaagtccattcgttcttagcaatacaactctcaaggtttcagtgaagatctagccctcctttctcataatcttaaatacaaatatctagtgtggatttcagaacccacatttggcgccgtctgtggggacgacaatatatcattccaacaccaaaactaacacatcaattgtgaccaacgatcatggatcccaattcatccaattcatcgggatctggcctaccagttcagattccaaacgatgacgttacggacgggcacctcccaacggatctccctcccggagcccaggttgatgctatccataacactgacacagagaacatctcccaaaactcgaattcttctggatctgaccgaatcactccccctccgcaaacaaggggcggagaacgaaatgtcacgatacagcctccaaacggagataacccggccaacatgtctaatcaggtcgccccgctacctgccagcgaattggccgagctccgcgcaatgatcatgaacttgatcaacttaaccaaaaaccatgaaattacgcatcgtaacctcgccgcaattgtgggtcagcagagacgcgattccactcgcatggcacatgaggaagagcgcgatatcgcgggtaaagaggttccccccccccccccccccgaaacagggattcctgcccaggtctccatagatctgacaggtaccgtctccccgaccgatcctactccgagaactcgtctggatttcgcctcgatagacgtctcacctcctatcaaccggcaggtcgcctttttgcaagcacctgcgaacgctctcgtcgaaaacctggcaacaggaaacgaaacaagcacaacacctgccttcccaaggttaccggccccacctttgttaccgatgggctgttcgccccctaggtacatgtggactagaaaccaaacaaccgcatccagttcccgcattcccgggaactcaacgcaacaacggacctcaatcgctaatccgccatccgttccccggataccaggaagcgacctccttaacagtccccaagcaccggtttatcagcgtaacgtcgtggatatggaaacattccgcaattacacagctcaaacaaacgcgaacatggctcaaatgcattctcgaatgcacctagcagtgagcgatgctcccgacatagatcgcgtgattgaagaaacctggcgcaccccgttcacggataggatcgctcgttttcgcctccgagacgtcgggagactccgtttcccggagtacgacggaacgagcgacccaaaggctcatctgagatccttctgtttcgctataacacgagcgtagctgaaagatgaagaaaacgaagcaggtcattgccgtttctttgcagaaaacctcgtaggtcacgccctcgaatggtttgctagcctcgaagggaactccattgataccttcgaccagctcgccgccgctttcttaaaacagtattcggtacttatcgaacataggacgtccgaagccgacctctggagtctcactcaacttcaaaacgaatccctgcgatctaacgtcgaaaaattcaaagcaatcaaatcgaaaattgcaaacctaaacgaagaggtagccatagcagcccttcgtaacggcctttggttctcctctaggttctgtgaagaactcactgttaggcaaccagtctctttagacgatggtcttcacaaagctctccacttcgccaaagccgaagaggagctcgctgtgctgaccttacgattcaaagaatctaaaacgcaaaatgctccccttgcaattaagaaacccttcaaaaaggaaaaccaaacgcaggggcatcataccttattcgcaatagacaaggcagctgaggacgagagtccagaacttgacctcggaaaatattgcaagtaccacaagaaaagagtacattccaccaaggagtgtcgcgccgttagaaagttaatcgcagctgggggaaagactaaaaaaggttcaaaccccaaagttgaaacccctcctcccgacgaacaggaggaggagcaaactcccaagcaaaaaaaacgagaacgaacaccggagggaagtgactctcccccacctgctaggagagaacgcatagacctagtttttgtagaactcgatctatgtggcgggacaggaaggtcagtcaccacacctccccccgcccccgcataagaaaaacatgaggtttccattacgtctctcgaaattctgcagaagcgcaaccgagcacctctccccgaaacgcatcgattttattatgggagggtctcagctctgcaacgactcaatcaattcgatcaaaactcatcagaggaaggcagattcttacacaaaaggcaagagtccgatgatgggacctaaccaccagatcacattctgggaaagcgaaaccaccgacctcgataaacctcacgatgacgctctcgttattcgaatcaatgtaggcaactacgaactctcccgtataatgatcgacacgggaagctcagttgacgtactcttttacgacgccttcaaaagaatggggcacctcgattccgagctgcaaggcaggaaagcgccacttaccgggttcgccggagatacggccttttctctaggaaccatccagctcccaaccatcgcacgaggagtgaggcgactcacgagtttcctcgtagtcgacaagaaagctcctttcaacgcaatactgggaagaccatggctacacgccatgaaagccgtcccatcaacctaccaccaatgcatgaaattcccctcagacaagggaatagcagtcgtgtacggcagccaacgcagctcccgaaaatgctatatggggagctacgatcttatcaaaaaggctgaccccgtagtattactgatagaagataaactcgcagaaatgaaaacagttagatcctctgatctttctcaacgcggacctcgaaagtcattgatcacacaggtctgcatagacgaatcatatcccaaacgatgcgtaaggataggtcaagacctcgacccagcgattcgagaggatctcataacctttctcaaagaaaacaaagacagctttgcctggtcaagtgcgaacctccgaggaataagcctcaaagtaacctcacacgaattcaacgtcgatccgacctaccgacctataaagcagaaacgttgcaaggtaggtcccgagagggctaaagctgtgcatgatgaggtcgatcgattgctcaagatcggatcgataagagaagtaaaataccctgactggctcgccaattcggtcatcattacaaagaaaaacgggaagtggagagtatgcatcgactttacggacctgaataaggcatgtcctaaagacagtttcccactcccacatatcgaccgactagttgaagccactgcgggacacgaactattgtccttcatggatgcattctccgggtacaaccaaatacttatgcgcccagatgaccaagaaaaaacagcttttataactgaccgaggcaccaactgttataaagtaatgccctttggtttaaaaacgatggagctacttaccaaagattggtgaatagaatgttcgccgaccaactaggtaaaacgatggaggtctatatcaacgatatgctggtcaagtcggctcgcgaaaaaaccacgtcccgcaattaagagaatgcttcaaaatcctaaacaaattcgaaatgaagctaaaccacgagaaatgctctttcggagttccctcaggagaattcctcggatacctagtaaccgaaagaggcatcgacgccaatcctaagcagattgcagccttcatcgacatgccatcgccaaagacggcacgggaggtccaatgactaaccggccgtatcgccgccctcaacaggttcatatccaggtctaccgataaatgcgtctctttctatcagctcctccgaaaggataaaaagttcgattggaatgaggagtgcgagaaagccttcaaacaattgaaagtgtacctgtccgaaccacccatactcgcaaaacccgaagaaggagaaccgttgtacctgtacacggcagtctcccgaaccgcgataagcggtgtcctggtgagagaagatcacgaaggacagaaaccgatctattacgttagcaaaacgttgatagacgctgaaactcgttattcagcaatggaaaaactggcactggctgtagtcatgtcagctcgaaaactgagaccatattttcaatcacatcccatcgtagtgatgacgtctcaaccaatcagaaccattctgcacagtccaactcaatcaggtcgacttgcaaaatgggctatagaactaagtgagtacgatatagaatatcgcaccagaaccagtttgaaagcacaggtcctagccaactttgtaatcgagctcccgttagcggacctggatggaaccaactccaataagaaatggctcctccacgtcgatggctcctccacgtcgatggctcctccaacagacagggatctggagtaggaatacaactcacctcccctaccagggaagtcatccaacaatcattccgactcggattcggcacatcaaacaacgagtctgagtacgaagccctcattgctggcattaagctagctcaaacaatggggattcgcgatatacacgcccatagcgactcccaactcgtcaccatccagttccatggggaatatgaagctaaagacgagcgcatggaagcgtacctcgaactagtcaaaaacttgacccaacagttcgaatcgttcgaactgaccaggatccctagaggagaaaacacctctgcggacgccttggcagctctcgcctccacgtcaaatcctttcgtcaaaagaattatcccggtcgaaggaatagaacacccaagcatcgacctaacggtcaaacacgctgggacggaaacctcggcaacttgcaactttacgcgagtaacccgaagcaccaccgccgcggctagagcccttgcagcggccgcggaggcaggtgcaatggaggaagagccggagctcggaaccccggaacaacctgcctcgcacgaaactgaaccgtacaatgacaggagaatcccaatcatcgattacatcgaacgagggatcacacctcccgacaaatgggagaccagaaaactcaaagcccagagcgcaaggtactgcatcatggaggggagactgatgaaacgcagcggcgtaggtccctatatggtatgtacctacgggcaacaaacgaaagacctcatgtaaagcatgcacgaggggcaatgtggtagccactgtagtggacgtaccctcgccctcagtattaaaaagcaaggctacttctggccaacaatgctagccgattgcatagctaattcactcaggtgcgataaatgccaatgacatgcacctactcttcatcaacctcccgaggaaatgtcctcgatatcttctccttacccgtttatgaagaggtccatggacgtcgtaggtcccatggaagcctccggtgggaagaagaaactaaaaaacctgctagtcctcaccgactactctaccaaatggattgaggctaaagccttccaacaggtaaccgagaaacaagtcgaggacttcctatgggaaaatatcgtacgccgacatggcataccttatgagatcgtcaccgataacgggactaacctcacctcgggaagaatcaaaacattttgcgacaagtggaagatccgtcttaccacatccaccctcgttacccacaaggtaacggacaggcagaagccgccaacaaagctatacttagcaacatcaagaaaagacttgattccaaaaaatcaatgtggtccgacgtactccacggagttctctgggcctaccgaactacacctcgcaaatcaacgcaagaaacaccgttctctctcgcctatggtttagaagcagtaatccctgtcgaaacaataataccaagcgtgagaatgaccaccagtcctgctaactcggacctgaacacgcaaatgttacgggacaacatggacttcatcgatgaacgcagagatcaggcaatgatccgagttcaaaattatcaacaagctgtcgcccgctactataactccaatatcaaaatccagagattcgaagtgggagagctcgttttgcgaaaagtgttcagcaacacgagagagctaaacgctggaaaactagaaactaactgggaaggtccctatcgaataaccaaggtggtacgtgacggcgtctataagctcgtaaaaatcatcaacggagtacctgagttacggtcttggaatgccatgcatctcaagaaataccacgaataggtacccaaaaacaatcgaactacgataaggcttgatcccttggcagggtacgtaggcaactccccccaagagcgcagccaccacttcaatcaaatcacaaaagggcttaatcccttaaccaggtatggaggcagtcacctccgcaaacgcaattaccacctcaacccttccatctgaaaggcgaaacttcaataagggaaatagatatcgcatcccccatcaacaaaaatcagctgctcacctgacagttctacctctcttcggtatcgaccaggtccttgctcaatgaccaaacgccagatggtcgctttctttacctccttttgtacttaacaatttggagataagaataaaagaaaatgttgatactcattatcatatttcgcaaagacagtcatttacactatgatttaaactcattcgtaatcttacgatacccaaagcccaacgcctgaacgttggcggatccattttgtgatctcgcttccaaaaagccgatagtgaactaaacttataagaacacatcacttcggcttcatcggagctcacctactacaaccaaatctaattctttcgctatcaacacataacatagtaaataaggaagaaacgaaggtttcattcgcgacctggcgataccagaagcccagctcccaaaatctggcaggtcccatgtatgacctcacttcaacaggttcccaagacaaaacaactcaagctcactcaaagtcttaaccttcgaagaatataccatatcacatccgaaataacttggattcaaaacaagtccaattattatccgaaacgtggacaaagtgaggtgatcatacaccaaaatcaacgaagtgtcaacactcgaacgaaagacaaaaaatacttgataaaaaggataaaagccttcccaggcacccaagtacttaaaggaacaaaggataaaagccttcccaggcagcaagttcaaaaagcaataaacgaaaggataaaagccttcccaggcattaagtatgaaacaaaacgcaaaatcctaaaacaagcaaggagcgaaagtgattactccctcgattctccggttggcgtagcaaagacagtactagaaccttccgcgagacctcccgaaaacgcgtctttgttgcccccaaactcatccaagccaattggtgtcccttgttcgtcgacgtccatcggacgtaccactgaaatctctgaaacctacgggagatccaacttgcttagagtaaagtctgatacctccttcgatttgcaccgcgcctccaggttatccagctctacttgcagccgaggtttctccacggtcagatcgatagcagccttggtgatctggtcgatcaaagccaagttcgactccacctcggccgcttgaccctccagaaccgtgtactcctttttggcgacccccttctccttgatcccagctagcagcttcgaatacgcagcagccagctcaaccttagcatcgttaaccgccttcttcgccccttgtgcagtcgaagtcaggtccattacctttttggagatctcttccctcttctgctccaagcgatgaatctggctcctcgccgtctgcttgtcagcttgcaaccccccgatctccatctccatgaacccgatcttctcagcataacctttctcgaggtcttttgaagtggacagctccattttcagcctctcgatctccgcctgaaataacaatcaggttagaatcatcgaatcatcgacgaattatttacaaacaagtcaaaaccaaggtgtacctggaacgagacttcacaatcctgaccagccttcacactcgacatcagctcctggatgagggtctttccttcttcgagctcgctcgccgaggggacctggctcagatgctgctcatagagagcgaccagcttgtttgtggcagctatcgcctaccgaaagcaaaacagaaagtcacaactagcataaagataaaaattagaaggagacagttatcgataattacttggccctccttcgccatcatgtcagcataggccgccgcctcggccatgttcttcactccaagaacctggcagttcctccccttgatgtggcgaagcaggttcgccaacccagcctcgtcctcaacgatcgggtgatcacggtcatgagtgtaagaccagtggaaaagcctgcttcccgcagatcctccgccggagttggacgtctacctcacttcttgagaccggtttgaagacctgcccccacctctggagcctcgtcctccgccatgggacctgcccgaggatcgcatatccgcagacgcagctgcctccggagtagcagccgcaggttccatcctctcttctctgggagaggcgaccctctggtcgctcacgaccaactcagccgccagattcacctccggctgggtccaagctctcttcggagaggacggtgcaccgtcagaacgaacaactgcagatggctcatttacctgagcgacctgattgttaccctgttaacctgctgcggcagaggtcccggcgttgacctcaggaagcgagggatgagatgctgaggcagaagagctggaaacagctagagtgtttcgagccgcggccaccgcggtcgacagatccccagcaggagcaggagccttggcattggctcgttaaacacgaaggcttggacgtctcattcttctgatgagcgggagttctgaagtggagctggagtctcgaggaactgaacaaatagagcacgacatttgttagttagcaattcgagttgcgcagctgtctcgataactcgtacattttttaaaccaaagaaaatataacggaactcgtatctataggcagatcagcctcgggaactggttcaatccgcgggacctcttcgatcgaatctagcagtggtgctggaggaacgattgcgggaactgctggaactacgggaactgctggagctacggcaagagcagctacgatgtgatttctgctgaaaatggaccagtcagtctgaccacgtcggagaagggttaacagctcaagttccgtctccgagagagtaacttccttggtccttgctgcaaatcatcaaaaacaagcaattagtttcagtactaacgtttagcaaaagcagtcaaggattcgacacaaacaacaaagaaaaatcaagaagctcaggtctccatctgacccaggttggtagaccaggtccttgttatcctcgcgggatcaaaactgccaactgaatgacgatctactctgaaaaagaagtacttggatcgccaattggtttctcgacaggctttcaaaccgccaaggaccagagatccgggacgtgcacttatgtagtacgtcccttggtcactcctagcattggtcttgacctcgcagagctgaagcaggtcttggcagctgaattctctgtttatttccagagcccggctgaataacgccagcacacggcggacgaagttcggacacatctggggaaaggcgaggccaagacagtagagcatcttgaggatacacgtcggaattgggaaaaataggccgcatttctcgaagaaattggcataagcgcagcaccacccgaccggcacgttctcaggatgcagcggcggccttgggagtatcatatgtacctccaccaaaacctggcatctcctccggaggtcgaccaggtcgtcattcgtcatctgcgtgcctctcccttgcttggcagcctttttcttcttcggcttgtcggctctgattgacggcggacgaattggacccattccgcctagggttatgccgcgtctttgtactcgcggcagtgacgccgccgacctcgtctcgaacgaacttgaatcgtcgccgtaactgtggttgcttttgttctgagaatcttcgaagtcgcttatctttgggtttcgacggagaaagacgagagagatgaaagaaaagagcaatgaaggcagatcgagaaagagggaatagcagaaaaacgaaggagatagcaaaaaaaataaaggcgagatttttctacgtctacaaaacaaagcgcagtaaataataaaggaggagagaagttaccttgagagttgtgtgagttgacgtgacgtcaagtggagagatgggaagttatttaaagccatcatcaccataattttcgagattccagagatctcttctccgcgtccgatctggaccgtcagatgcggtgcgctgaagagatgctccatctcagccgtccacatcagtagcgactcatctcgcgtatctcctcgaaatctttcggttggggggaatctgaaattaaatcgaaattgttgagtttatcctcaaaaccgactgatcttgtcacatttatctcctcatcaagaatattttcgcaatcttacctgacctatatgtccgcacatcgtgttcgcctactcactcaatgggctggagggcaaatgttggagctcgattcccctccaggaatccacctgcgaaaataccaagccagccaacgaaagcccaccaagcccactaagtagaggacatacgcagctgacgagcccacatacgcgaatgggtatttgggctagataagcccagtcacctgatgcagggagataagcgaataatgacctcggaactgacgaggagatattcgcggagctgacctgatatctcggaactgacctgccgaatatccaggaggatctccgcagatcccggacggagctaccacgtgcgtagacctatataagggagctaggacgacttggaagagacattcaatccagcttacattgatacacacacttttacacttgtaatcccttttcacattataaaagctttgtcataattaatacaaaagtccattcgttcttaccaatacaactctcaaggtttcagtgaagatctaggcctcctttctcataatcttaaatacaaatctctagtgtggatttcagaacccaaaatagctttgcatacatattgcatttctgagttgttttcaggtgatttggagctgttggcaagcaaagtggaagaagcgagccagaatcagaggacatactcgacctccaggccgtgtacatctagcaccatactcgaccccctggttgagtatctttggagccattcttcccatctactcgaccgcgtggtcgagtaacctcagctcaggccactcgatgacgccactcgaccctgtggtcgagtatcacttcgccataccacctgaccacactcgactgttcactctaccacgttactcgacccctggtcgagtatcatcactcaccaccaataccatcacttgaccaagcactcgatcacatcttcggagtctactcaaatccgcactcaaccagacaagctgagcacaaggaagagaagaggagaagacgaagtgtttggaagcggcttggacctccatcggatcacgaagcccatctcggcccattatcactctatgggcggggcgattaggttattggcccgtctactatcattttctttcgttttgtataaatagattgttttagggttctgtcctgagacatctagtcgacattgagtttttgcttcagttttattttctgttttactctggttgtgccgcttttgcttctgcaacctataattcgagatttttccaagttattcagattcggcatttgatttcatctgtcatctgtcatctactctttatctctatacttatgcaatattatcatttacctgcgtttatgtctttgagcatgttgtctgagtagtgacttagaattcttaaggatgggatagagtagttgtggaatccgtagtctgtagaatggttaagttttagaattgattgaatcccttcaggactatttgtgtttactgcttatttctttctgatcaactggaattcgatccaaagcattcccgcacccagaaggtgttcgatggaatgcttgatccactagttcctgagatattcgtgtctatcccaagggattggccgtttagagcgtttattgactttatcagtccgttcttattgcctgcataggtagattccgttaatgggaattagtttgggctagctttgcttgaggatctctatcacgggagtgaattaatttgttgttgaacatgttgtctagggatagattgattgcgcttgttaaccattcgaacaatcaaggataccactctattcgattaccccatccttaggaatttctcttctatctgatttctctgttttatcgttatcgcttaatcgttctcattgcctgtttcttagtgtttgcaattactcgaccagcttactcgaccccacccagtgtctggcaacagactgtgcagtcgagtatagctgtttcatttcctgtctattactcgacctgctactcgactacatcctgcttctggcatcagcctgttgtggtcgagtgattttagtaattctgttattatttccgttttctgcatgttcgcttaggactgttagaaacctcaaaactgttattgcttggcttgaattagtgacttctgatcacatctcatctgtttgcatcacactcatttggattgacaaccttaagcactacaacgatatgatagtgctataggattaattgatcccaaaaacctattatcagagctactatcggacctcgtcgatgtgagaccccgtcccggacgtctcggcgtccgacgaccatggactcacattcgagcctattcccagtagaacctcttaatttttcgcgattcaacatagaattacctttacgaggcctaattctataatcgctttcttattacacagcggaagtctttctaaccttggtttaataccaaccaacccttgtaccggtttcatcgtctttgtcccttatacttagatcgattctttactcggtcaagacatgcatattgttcgctaacccctctaagcctaacaatcgcatattcatttatcctattttcacggtcaatttccaaacgtctatcttaactaataagttagatcgtctacataccttggccaatatgcggattcgattcctcttcgatccgtccattaatcctttccttagccttcttgttccatattcctttcgtaagacttgtatattgatggaccaatctctatcgttacttagccatacaacaaaccaaccccactggtctaagtccaacgatagagattggggatcgtacgattccctttgttcacgatggccgaatctagctctaggcttattggtccatccgtcctccaaacgtacgccccttgggtttcatggtggacgattgagccctcagcttatcgaaccatccatttttccgattcggtcgtttaacactacgactgcccacagtttactaaccatttacccgtccggtccatggtggtcggtaaaacttttggcttatcgatccatccatacgatccgaacgatatccttatcacacacaagggtccgtggattcaaccattgaatcatcgtaggcttgcccatgaaatccttcttccgtcggcctttggtttactcgcgggtcaaacatctgttttgtccatcggttctcaccatggactttcccgttggttctctgtcgagtcaccctttggtctttcaccaatctcggatcggttttaccatcggccgtggcgattgatacacaaaggcggacaccatattgatcatattgggtgaatcacgttctttacccatcttcggtgctttcttccttttatcggtaatattgcatccatgggcgacccttgggtgtgttcggatgcacttatctttgtgcttcctcgaacacctttcccgatccgcctatcccggtcggtaatccgtctctttgttagatccgatccgtttatccaacgatcgatctgtccgatccgatccgtccaactatcgatctgtccgatccgatccgtccaacggacggtatgtttgattcgatccgacgatcggtctatctgatctgatccgtccaacgatcgatctggccgatccgatctgtctgacagtcggtcttgccgatccgatccgtccgacggtcggtctggctgatccgatccgtccgacagtcggtctggccgatccgattctactctatgacggtcggtccttcccatccatcctctacatttcattgaaccgttagacaaggaggtcgcatgcgcatcagttcggtcaagttatactcgccgtgccgcaccccctttccgaccaacaacttcgtggtgtgtttggactatttgtggtgtgttgtgatggtgtggatgatcgatgtggaatgatttcaaagtccttgggcgtcctcccttatataaggggcaaatggatgcttcccgaagcatcacatccattccttgcacccttccgtaaggtcacatccgttcctttcatccttccgaagagttgcatctttccatacgtaactgctcgcctttatccaccctttgggcgatgcaaccgttcgttggtacctgctcgacctcacaccttttggtcgagacacctcttcacccgtgagctaccacagtccaccagcttgagtgtcagctgaccgaaccactcagctgggtcagtactcgatcagctcaccgagctcagtcgagctgttggtcagctcacctacctgagctagctactcttccagctggtttagctcacctagcttagctagctagttcatccagcttgttagctcacctagctgattcagcttgaactttctcattcttccgactaagtattttggtctgttcctcgaacatgatctagttttcccctaaaacaaaccggcctctttatgaactcggaacgcgagcgttacagtggagctgtggacagagcagttctgatgggatccctggtgaaagtcgaccagtcagtttggccacggtagaacagggttagcagctcgagctccaattctgagagagtcacttctttggtttttgctgcaaacaaccaaaaaaggaacaacattattaacggcacaattagtacaaagagcaaacaacttatatatactaaacaggaaataaaggtatcggatctccttctgaccaatggtgctggtccaggtccttatcctcctcgtttggtcgaactcgccgacggagtgacggtccactttaaagaagaaatatttggctcgctagtgagtatctcgacacgccttcaagcaacctataattagagatccgggacgagcgctgatgtagtaggtccccaggtcgcttgaagcgttggttttgacctgacagtactgcagcaattcgtggcagccgaactctctgttcaattcccgggctcaggtgaacaacgctaacacgtggcgaacaaaatttgggcacatctgggagaggcgagtccgaggcaatagagcatctcaaggatacacgccggaatcaggaagaacagcctgcacttctcgaagaagttagcgtatgcacagcaccgtccctccggaacgttctcgggagtgagcggtgacctctggagaatcatgtttacctctagtgggacttggcatctcctccggagatcgactaggtcgtttggtctcatcggcgcatctcctttcttcttcttgggaaggctcttctttttgggttgattcgccttcaacgaaggctttcggactcggctcggcccgcctagggttccggcgtcgtctggttcttgccgcgacgatgccgactttgactccaacgtatctcgttgtcatcgtagctgtggttgctctggttctgagaatcctccaagtcgctcatcttttagtttcgaagaagaaaaagtgatggaggtgaaggaaagaagagaaaagcagatcggaaaaagaggattagcagagaaacacgatggagataatagaggaaagatgaaaattttctatctcaacaaagaaattaaacgcagtaaatattaggagaagaaagaagttaccttggaagttgtgtgagttgatgtgaaaccgagtggagacgtgagaagttatttaaagggccatcatcaccatgattttcgagattgcagagatctcttccccgtgttgaatctgagccgttggatgcgaggcaacgaagggacgcgtcatctcgactgtccaagtcggcagcaatctacctcgcgtatcggctcgatatcttttgattcaggtaatccgaacctaaaccgattttaatgagtttatcctcaaaactgattgatcttatcatgataccaccttatcaacgatattttcgcaatatcacctgaattagatctccgctcatcgagttcgcctactcactcaatgggctggggggcaaatgttggagcaggatttcctccaggaatccacctgcgaaaataccagtccaacccaataagcccagcaagcccatcacgtagaggacatgcgcaactctgaagcccacatgtgaactaggtatgttgggccttatgggcctaatcatctgctgaagggagatatgcgaataacaatttgggaactgatgaagaaatgttcgcggagccgacctgatattgcggaaatgacctgccgaatatccaggagaatccccgcggatctcgaatggatatactcacgtgcgtagacctatataaggaagcaaggacgacttggaagagacattcattcatcttaacacttacacttatatttttacacttgtaatctcattctacattgtaaaagctctattgttatcaatacaaaagtccattcgttcttagcaatataaatctcaaagttcttgtgaagatctagccctcctttctcataaatctatttacaaatctctagtgtggatttcataaacccacagaatatctcaacaattacgacccaaaatattgataacatctttccaataatcttgcacaaactaaccatatatacatttacttgattctaaagaaaattagtttttaatgataatgaaatattaccttaaaatcttaaatagtattcaagcgcaacatcaattcccgttattcctattttcattgaattcagtttccgatttttactcacacaaaatcctctattcaatattttttggtaacacaataatatgtcccttccaaataattgaatggtgattatactctccgagatttttgcaacccagttacaaatgaaaatccaaatacagaaacaaatttatgagtatagactaatgatattcaagcatattcctaatttgaaacaactctaaatctttatgtcctgatttattgcgattagaatattttgtttgcgtgtagaaagttagggcttacaaacatgcggttgacactaaaaatatggttgttcgttccgtctcatttcatcatcacctaaaactcgatcttgcaaatactatacacataagaaatgacaataaattttgcttacctcaaagatgttaggccttacaagggggcgtggaggtccaggttaagatcctagagaatcttagtatggtctagcctgatgagaaagtaagtttccatgttcaaaaaaaatgattctaaacctttttctgattaattgaaatgttggtatgtgttaaggagaaaatattaactcttttagttgctagcttcatcttcgtgttatggatttaaaatcaggtggcttgcacctatcttaatagttaatttcagctatgtttattagttaactaactataagtttttatgtcattgtcagattcagatcatatgtacaattggcgaagtggtgtatgttaattagtccttttgaaacattagatgcaaaagaattagtcttgaacccaacaagagagagagagagagagagagagagagagagagagagagagagagagagagagagagagagagagagatgtgtcatcatctccgaccatgactttttcggttatgggccttttgttcttcttctttttgtaaaatccaattattggccttaacccaactaaataaggtgctttaaatgcttttcttaaaagtattgggccaaattaaaagaattaaacagtagcgggtcttaaataatacatttcttttataagaagtttaaacatttaaactttatactacgagtgaaatcctaaaatttacggatttgagtcgatattaatacaagattgtatacgacggggtgaaatcctagaattaacaatcataatactattatacaatcttaaacactaaacacaatagacaatactaataaaacaaatacaacttaaaatttcaaaattttagttataaaatatcgtcttgcggtataggatacattttaaacaaaacaaaaccatatacctacatatcatcataaaaacaaaaattcgaccagttcattttagatggatgtatccgtttgaaagatatatgaaagttctgaaggattttgtgagaaacactgcaagaccggaagggtgtatagctgagtgttatctagctgaagaatgcatacagttttgtagtgaatttttgaagaagacaacaaatgttcaggaaagtgttgatagaaacactgagtatgagagcaactctatacttgaagggcgtccaatctcagtaggctcttatattaatcttattgaaatggagacaaaaatagcccatatgttgtcattcagaatatggcagtctctgaatcttatgttgagtaagttccaatctcaataggctcttatattacttagctatatatattttacttatccatatggctgtctctgactacttctaatttttccttatattagtgagcacctgcaacatctacaagactcaaatgtaagatgcagacgtgatgcatcacacttatagaacttgcacactcaaaattttgcttcatggcttaaaaaacaggcaagtttatctctcacacttgacacttaaacactataatttatcagtaatcatataggtgtctgacattttctttctaaatttgttagatacctcttgattcaaacagacatgaagaaacacttaaatggttagcttatggtccacggagttgtgcaaggacatattctggttatatagtgaatgggcagcgatttcatacaagaacagtggataagaaaactcagaacagtggtgtgtactatgaggcaactgctatctgtaggtctagtgcaaaagacacatctcaagtggtcgatttggtttcatactatggctgtattactgatattatcttgctggattataatgtcttttacgttccattgttccggtgcaactgggcagtaaaaggcaatggagtgaagcaagaggatggttttacacttgtaaacctgaatcatagtcaagtctcatttttgaggggtccgtacatactagcctcgcaagcaaaacatgttttttacctaagagaagatggctcgtcaccttggtatgttgcattgagaggttcttcaagaagattcagtcagaaagagtttgtagattcagttgcagcgattggcacattgccaccaaatgttgacatagacgctgacttggatgaagctgagaatgagaggactgattgtgaaggaatttatgtttgtgaaatgtagtttttttttgcttcattttcattccttgttgcattctgaatgtttgatgtctgtttcccatagtgtgttcaatctcttatttgcattcagtgtacttaaccctttactctttcatttttctcaggtgatttaagatgggacaacagaagcaaaagcgaggtaaaagtaacaaaaaaaaggtcaatgcaaagaatgccaatgatgaggttgagtatattggaacaattgaaccacaagtcaatgatgaggaacatgcacaaccagctgaagttcaagtatcagatgcagatcaagtagcagatccagatcaggtggttgatggagatcaggtagcagatccagatcaggtgaatgatgaagatcatttggaaccagatcaagtagcagatccagatcaggtggttgatggagatccggataaggtcaatgaggaagagcctcacggagagcttgttttatctgttgttgatgattgtgttgagccaaagcgtaagcgacatcgaggaccaactaggctgaaggatattgccaaagatccaaatgtcagagtaagagtagagttcactaacatgggagagcctattggtaaagactcagttaagctggcatcatatgtaggggcattggtaagagaacacgtttcagtcacaattgaacgttggactaagattggtgaagaactcaggacagttctctggaagtctgttcaggtaagctttgtgtaaaatttacaagtttattagatattggtgagtacttgactgttttgttttttatggcaggcaaggtttgaactagatgaagagtaccaaaaggttatagtgcttaggcagataggatgtttgtggaggtcctggaaatcaaggcaagttacaaacattagagaagctaagactaaccaagagaggatgaacatgcgacctaaaaacatttctccttttgattggcgtaagtttgtgaagctcaaaactagccaagagtttaaggtatgcatttggaatttgtaaatttatctatatacaatagaaattaacattcatttgttaggttgtaagtgatagctacaaggaaagaaggcgcaatcagattccaaatactagtagtcgcaggggaatgcttagacttgccgaagacatggtaacagttgtacacacttatattgttcatattgctcagcctttttccaaagtccaaacacttatgtattaactgagatcattttttggtttagaaaactgctagtgcagacccatctgaagtgacaaggctaaaggtttgggttaagtcacatactaagaaggatggtataccagtgaatacgaatgctgctgaaaagattgtgagttgttttgtttcgtttgatttgcattttggcattttgaatcacacttgatattttaaaatgtatcttatgagttttaaaaaaaggcagaagagattgttaacaatgataatccatcggcaaatgaagcacaagattcactaagccaactgttagggcctgacaattctggtagactgagagcaatgggtcgcaatatgaataagaccaagttagcttgtttccaagtgaagcacaagtgtatggctgaaatgcaagagaatcagcttcatctacaaaagaaggtcaatgagctacaagaagtaattgaaaaaatgaagaaccaggttagtgaacttatctatttatatatacaaacttaaggctcaattagtacatacgatttgactttgtttttctttttttgtaacagagacaatcagctgaagtaggtgaaaactcagctgcaagagtaagtcactcatatcatatactttgatctgttctaacagatacactaacttagtactttgtctatcttttacttttacagagtgtgaacaaaagaacacaaccaaaatgtttcttacttgattgggctggttcttatgcaaaagttgctgagggatgtattatttcttctgatccgggtgaattagtgaatgactgtcgcttaggccctacggatgttaaagtcttgattgacactgttattgaaccagaagcattcctttggagacctgcggctaatatgttcaccattgagaaagctgttggacatatgattgcatggcctgctgctatgtgtgttagcctagaagaggatctccaacaagaagacaatgcaggccaggtaaagtttattattcagtctcattctcatattaagagtaatgatcttctattaacataatgaatttctgggtttcaatgtttttgatagggaccaaataacaaatgccagcttttggatttgtcttcaaatgagttgttgttgcagaaggacgtgggcagacccaagaaccaaatgcattagtcaatgggcttcctctcggacctgcagcagtgaagatatttgtcgatgcagttcttcaaccagagacgtttatatggaggccaacgatggatgtgacttatcttgaggactgtttaatgtcttttgttgcatggcctatcaacaaagttatctttgaaaacccttcagatgcaacatggcagaaatctccactttagacttctgctgccagaggaaaatcaccattggaagcagcaacattagtaggcaagtttgcagcatcagtaggcaagtcagcaggatcagtaggcaagtcagcaggatccgagaaagcagtagcgtccgggaaagcagcagcatcaagttcacaaactgcagcagcaggttataagccatcccctgagatatctacagcaaaaggtacaaaatccgttgcaacagtttcaaaggccatagctgagaagtccatagctaaaggttcaaagtctcctgtcaagaaaagtcagctgctggattcacaactccctctgagtagatctccggtattttgtatgttgttattacctagctattgaatatggttatttttctgcatacattaaaactggtttatattgtaacatggcagcataaaggtgtagctgaagttatcaaggccaatcagaagtgtaagttaatggatatcagtggaaggaagcaggtggttgctgaaggacgtgtgcattcagtcgacccagaccaaaaggtacaccatgttcgcttgggaaataatgcagctagagtttgggtggatatagtgaaaatagatgatgcagcagtttggagggcatcagatgaaatcgagtatatgagagattcacttggttcatctattgcatggcgaatggataagatggtcatctattgagtttaagaataaattggggtaagtttctatattacagtgatccttgtactttggttttatatatgaaactgaaatgaaacattgttgattattgcagggaatgaagacactttggtccaggttagctagtttaaagtagttttagactagactaatcaacttgtgttatgtaattcagaatcagacttgttgtctactttgattatgttagactagacttatgatttagacttatgttatgttgaatgatttgtatgaattttttctctatgttggatttgattcagacttaagattaaatttctattcagactttttttcctctatattgggttctggaaattcagataataacaaaaacaaacaggttgtgaacaattgtattacagcatcactaaaccgcataaataaacaaaactcagcaattatttaatgttatggtagaagaatcatatatcatagcatcaaacgtaatgcaaaaaaaaaactgttcgcaacgtgaactaattgctaacatagaataacctattatgacacgaaattaaaatcgtcgttagtttttagcaaaaaattaaagtgctatattactatttaaaacagcgttctaattttgctattatatcattaaatataatagcgtttccaaaactgctatcgtaggagtgacacctaccatagctgccgagaacatggcgtttatgaatttgctataaataatgtaagatagcagatttttagcgctaaaaatgaacaaatttcttgtagtgaaacaaaatatgaagccctaaattttgacagaggaaaatagtaaacatatgaacatggcatagtcacgagagcttacaatgcctggacatcaatagcgagacaagaaagcccgatgaagagttaatcgtggatcttagagactcacaaataatcggtagcgatggttggtaattgcacaccatgcctccgatcactggctatatagcgaaacagttcttccctagcataactacgacgtcacttcaaaattttaaaaatatcttaatcaccataatgtccatcgattcatcgtttaaatcatactatcaatcattgcgcaaaacaaacaaaagtttaaaattaaaggaatttgggaaggaatacttaccaatataagaaaattatggttgatggagtgaatctttgggagtttttctatttgctactggaaggtatactctggtgattgatgtgttttgtgtttacaaaccatccttggtgtatcggagaaggagaagaagaaatcatggtgggctgggcgtttgttcattgggcatgtgttcgaaagaaggtctattaagggtgttgtgtacatgtgacacctcaataaaaataaagggttattgagaattgtaatggatgtaagaagacataaatgttttcataacaattctcaatattatgagtatgtaaaaaactaatctcagacttacaattgcaattacgattttaaaaagatttacaattgtacatttatgattttaaaaacaatcaatcgttctgcgatgttttgcgggttaaatattatcagtttgtactaatataaaaaatttgtctaatttcttaaatcctatatatctaatttaaatataaatatatgatttattatttatttttatttatttttatatttaaattattttcaattattataaaatatatagtaaaaaaagttaaaatatttaaattttctaaaagctttaatgtggagccagacacgttagcaaagtcggctttacagtcttgcaacacctcctcctttactagagtttgttctctcttatttttaatcaagctttcacaaaagaaaaagaagataaatcatctatcgatgagatgacatgcttgttataaagaattaataatccatgattaaaaaaatagcataactaaacacgtaaattttttcaaatgtcaagggaaaagatttgatgctactatacccaacaacgttacatcatgtcgtcggtgtagccttagttcgagtaataaacattatcaatctaatatgtaagtcgaccgttctttgaacatcttcaatgaacatctatattcttttctccattttaacgatgactttattgtagaggcattttgctctaagaccatctcaatggttgtttttatttttcttctaaatatagaaaaaaatagaaatctcaattttttactccaatagtttcttaaaaataaagatttctatttgttagggtatctctaacctactctatcttagagtaaaaatgcaaaaaaaatttccaaccctactctataattgattttaaaatagagaattctgcagatttggtctatatagagcaactctattctctactttatttttgaattcaattttttttttatactttagtccctcaaatttaaacttttttatttaatacatataatcattttacacacaacaattacaacacatagttttataaacttaacaagcaaacaagtactaaatttaaaataaacaacataagaaaactaaaacatacaagtagtaatttaatagtctggtaaattgcgtgtagatctgccaagatagttaaaatgttttagttgatcatatgtgagaaaaatattttaatggtattattttaaaaaaatttgtaatgttttattcttgttatatgatgtaatatttttttaataaataattagtgtttaatttaaaataatataatattttatggaaattttgcaaatctataatatatggatcaaattgtaaattatataattaaaaggtattagtatataaaataaaaatagaatatttctaagaatattctttttagagtaaaatatagagatatacattggaaatgattttaaaaaaaaaaataagagaaaaaatagagatgggttggagatgcaataatgtatgcctttaaaacagagaaaaaaattagaagaatacattggagaaaaatcaactcagaggaaaagaatagcgacatgcatcggagatagtgatgtcaaaatcccacaaaatatttgtcagacagcgagttcgaacaatattaagaatcttgtagctccacaaattaatatatatctcatttcaaagtacttcccaaaacatgtaaaaacaatcaaagattctttccatcattcactacacagaaggtaaccaaattctcacaccataatgtacagggtaaacctccaaaagaacataatctctcagtggcccttgcttcgtggatcttcagagtgcatagcgttgtagtcttttgtgtaaacccggtgcctcctctctctcgcatatataacccaaaacaccaaagatgacattacagaagcagacaccaccacaagacccacatagatccattgtgtgtatctcttaagtcccggacaatgatccctctctatatcagtgaatgtagacctcacgaagtcacacccttgtaggtctgccaagaacggtccgtacttgtacaaaccatagcttacattaaccgctgcagccatctggctgtaaagctttggtgtcaaccgtcccggtgtactacatgttcccggtgttacaatttggcaagtgaagttcttccacacctgcataaaaacaaatcataagacagactgatatgacttgggaatttatatatcatattatgatggaatcctcggattacctcggttgcattgttcagatggacctgaccaggctggcattggcggtcagagagatcagcgttgaaggggttacagagtagaggcattagtggacctgactggttgtaataaagaggccggaattgaggcgggaaattcctgttggtcatgttgctaatggcattgtcaagaagattgaccaactggtatgttacaagcttagtccgagtcaatgtttctctcgcggttgcattatcaacacacggtagaatatcgtctagagccgtgtgagctgttgggttttggacccattggtccatcgcaacacacgtatcccctacaacgctgacaaagcagaagccatttttttctttgaagaaagctatcaattattgagtagacaaataatggtagtgagagaagagaactcacttgtgtagaagtaaaaatccaccacataagacgaaggtaaccgtgacgagaatccaaccaaggatcaccaacctgtccattgataatcacaacaaacttttcagcatatagtggaaccaatgtaaaacagaacataagaaaatgagacttcacttacgtatatacaaggcattgcagtccaaaaatagagagaactgtatgagaataatgcaagttaagttctgcaagttaaagaatttgctaatgcatataacatgaagacttacgaaatccgataaacgcaaggaaaagcatcacagcagcgatgatgacgagagcaagtctcctacaacaattagagacaaaaaatcataagcaaaaaggtgaaaaacagatgaaagataaagatatggtacagaatatttacatgatgtccaagacattttgtatcttgtcttggttctccattgttttcacagaaagagttgtggcggacgagtttatctttccctgtatgttgtcgatactcgagagaacatcttgtggcaaaatgctggattgcacatcaaccttcttagctgcattaagataatctgacacattcctgaggttttctgacgtgagattcgcttgactcacgacatagtccaaagtatcggttgtgctagcatgaaatttcccttgaccagtgtaaagaaaaacacatcctatactggaatatcaaacacaagatacataaatatccagcaagaaacaacgatgacgaatagaatagctcgtgagaattacattgctgcgattgtgaacgagatgaggaggataagggatagagcataagcaacccgggaataaccataagattgacgggcacagcagcaataacaaaggcaaatcagagacaatgatagcccaaagaacacaaaccagactagtgctattataatgaaaggcgccgctgtataaccaacagactgcaccacaagcaaagaatgatagagattgattagtatgtcaccaataccatacaaaagactcatcaaaaatatcaattggtatcaaacatctttcatctatataagcataataaaactgattcaagtaacaaggctagtcatagagctaatccaaatttccattgattaatccagagtgaatattacaaaatgataaagatcaaaacttttaaagttcaaaattcaggaatataagaatcaaagtcaaataaaccaaacaccctaactacacttagtcatagaatcaaaactttaattaaaatttaactacagttagccatagttttaatggtaaagatgaaaactttaatcaaaatataggaatataagaagaacccaagtcaagtaaaccaagcaccaactagttatgaatcctaatccactgattaattcatcatgagcataactacaccttaaaagttaaaacagtcaaactccatttagccatacttttgatggtaaagattataactttaatcaatatttaggaatataagaagaacccaagtcaagtaaaccaagcaccaactagttgtgaatcctatgctattgattaattcatcatgagcatcataactacaccttaaaagttaaaacagtcaaaactccactagacttttgatggtaaagattataactttaatcaaaatttaggaatctaagaagaacccaagtcaaatgaagcaatacccacctggtaaggagagagatttcacacaacaacaaaaaaaaaacatttttggaccacagaaataaaagactcacagtcaaataatgggaattgcttatattccatccaccagtgtagagtttgaaattatcagcaggatcttttcttcttgttctctttgcagctaaaatcagagatgagttctctccactttcctctgcaattactctttctattacacttgttctccattcttcttctacacctctttcttcttcgttaccaacccctgaatcaatcaaacacaaattgaaaaatcttataactattaaaaaaatggagaaacaacttttgaaaaatctaagtcttaccagtaatcgatgttgttccagtgacgaccacaagaaacgaagagagtaaacacagagacacaagtataaacactctttgagatctgaaacacaacattatgtctggttctttttttttttaactctctgttttttttttctgttgttgttgttgtaatgtttattctcgatcgtgtttgagaaacaatggggctctctctcacgttaagaacacgattgatttgagaggcattgcttgacgcggttctgtttgattcgtcgaatcatcggtttttccataattgatttaatttccaaatgcaaattaagttaatttattttttctttcaacatttcgaaaataggtttaatgtgcgcatttgtaaagttaaccaatttcttacaaaaagatgttccgagtaaatatatttattaataagaaaatcagaagtagaatattttagttgtgattatattctcttgtataattaaattacgaacataacataaatttttgttaataaaataatttatgatagttatgcggcataacttgtgccgacgcgtcacaaaacaaatctttgagaataaagacttgttgttggaggtgacagagatattttatcttttgggtacaactgtcccttagtttaataattaaaacttaaaaatcttgaaactaaatcttccaagttccaagtaattgtaatagattctttggtacaaactttcgtatttactattaaactgtcttcaactaccgttgtgaatttgtgatgtaaggtcgaagattatttagatttgttactatgtggccaaaaaaaaacagatttgttactgaattattaatttcaaaaatgtttatgagtttttatttatcaaacaaaaaatataatacaataaaataaaataaaaatcttcagaatagagaactgactaaaaatatataataatttaaccggatttttaagtttatttcttaatgaaaattgaaaacacataaataaaaacaaaaatactagtgctgagttagataaatatgcacatctgcatattatacccaatcaattttcatatttgttggagataatctgcttttctaaaaataaacatataactaattattaattaatcttcacaaaaaaaaatcattagaatcaaatcaattattttctctctcttctctcacaacaatctttcagagagagaaaagtgttttcctttatttccgacgatgttttgtcggattttgtttccggtgaaatccggttttgtctattctcgcccaagtgcgagtctatcttagccactatggctagttttttgttttgtttttctctccttttgcagatcttagatttcttttggagaagaagaattagaagctgagtgcttaattcagaatctcaagaatcatcagtttctcaattctggtcaaggggagaataaatccttcatacccctaatggaccgtaatcggctaatgatgaaggtttctctttaagattgtgaattgtgatgagtgggacttgatggccggcgtagaacagttcagaagagcgtgttttgcgactgatctgacctctcgccatgtcgtatgttccagcagttcatagatctgatgactcggattcctgtttcttttcactcagagaatttagcaaaggcagagaattggtgattggagttttaactgaattctggtaaaatccttggatggcaaacgatgatttgattagcagagttcggtggatttgatcggagtttcagcccggtggaaacgctaggaatgagtcggttgcgtcttcttccaccttcagcagatgttacacacgtgtcacatacacatgtcccttttacccatacgtgttcgtctattttgattgtaatagctatattgggttaattgggctttctgtacttgggatccttttcaccatgtatcccttttatgggtttaatgaaactgacgaaaaaaaaaaaaaactaattattaattattcgtggcgtaagattcacacataatgactagatatttttcttttcttgtttaatttattaagtactagattttaacccgcggtacaccgcaggaacaatttattttataaaggtagcatatataaaagtttgcaaagtgtatctatctataaaatatttttattttatagtttacaattgttattaagtaacgtcctgtcaaatctgtcccgtcaacccgtctcgtaaaaaaaacaaatatattttattaatattgatcttatttatgatatgtttatgaatcattgtctaaatattttgtaattttgtagtaattaaatgctatcaaatatctttgcggtttgacgattataatcgaattgttatagtcatgcagaaaagcaatatcaaaagaaaaaattttatagtaattaaatgatattaaatattttggaagttttattttagtaactaatcgtgtagttaattgggagagattttgggaagattgttaaatgtcaaatatttaattcgaatattttttctctaattatcaaaaacaaacattaaaatttagtggcagcaattgtaaataaattccaactacacgatttagttcacaaaatggctgcaaaaatgtatatgtagatttatactaaatttagatttgttgcaaaatatacatgaaaaacgaaaagaaattaaaacaaaaaaatcaaaaactatgaaaaaatgataaaacaaaaaacacaaacgagaaccaccagcatatcctatgtgaatcagtcctcaaacctcatagcaaaaggacacttcagcttctccagaaactaaatgtaaaaacggaaccgacgacatgtgagcaccaatgaacaaccaaagaaactgcctctggctaccaatccagagcatgacacatcaaaagcaactcagacaggtttgagaacacccactagcagtggcggagccacaaatattttttatggaagtcatatattaatgtaagtatattataatatgattctttatttaactcaaaaaaatttcattgctgatttttaaaaatattctttgctattacatttgcttaataaaagaggactaagaaacatataactattgctataaatcctacaattatagttcttttgataataatataactagattctgacccgcacatacgtgcggggtttcatattttaagaattagattctgacccgctcttttgaaattttttggggaaatgtttttttttggccggaaaaaatcgaataaccttaaaaaataaaaaaaatataaaagtcatggggtcaactgaaccctctcctatctaaccctcctagacgaaaccgccgtctctaatgaaccttgaaactctttaacaaggttctcgcgatgtaaaccaagccgcatcacaacaaagaacccaagaacaaccaaaaatccaatccagccaatgcacaaagcatcgaaggacaacaaacggaggaaagaacttctcataatgaacttcaagtccactgccataccagagaagaaccaagtcgccacattccaattcgaacaggaacaccaacgacccatatttggagtctaggctaaagggagtttagcttagagttaggttatcctgattaaatctattctcacgagattttatttaagggaagattatccttaaggtttcacgttaatagaaagggtcgataaatcaagagggttgtgcttgttttcgcgtttgtgaattggttgtaatttgctttcttgttttaatgaaatcaaatcatgacttggtcccgtggagtacagaaaaccgaacttcattaacaaatttcttatcttctttattccggcaatttattttaccacatacgtacgtataagtggtatcagagcaggttctcgatatagatcaagttgaatttaaggctaattaagactgcgatatttacaatgatattgattcaagccacttcaagttgatttatcaatgtgcatcagctcaaaaagcatgaatttttttggagaatatgtttgagggaactacaagcgttaaaagaacaaaagtggatatgttgggatcgcaatttgagaatttaaggatggaaaagaggaacccgtggctgatttcagtgcaaagttatgtgacatatttaatgagtcctttgctcttggaaagctttacaagaacaaaaagttggtcaagaagttgaagagatcattacatgtaaaatttgtgtcaaatattttgaagttgaagaagctcataatctagatgagattgcttttcatgagtttgttgggattcttctgacttttgaattaagtaaaggatatgaaactaaagggaagatgaagaaggaggatgagtgaagaagaaagttaacattggatttgctcttaatggataatcaattgaagattcaatggctatgttgtcaagacatttcactaaatatctgaagcaaaagagaaaagagaagaaggataaaattgatgaagattttgagaagttctttaaagaatgtgcaatgttttgaatgcaaaggatatggacatgtttgttctgaatgtgccaatctacacaagtataagaagaaggctatgaatgttgtcactagtgatactgaaactaattcagataaagaagaagatctgatgaattttatggcgtagataacattcgagtctgcttcagcttctgcaacagagtctgcatcagggtctacaacatggtctacatcagcgtcaacaataggacctgcaactggcagtgataatgatcaaagtgatgatgatgctacaattaagtgatgacgagtttgctgagaattacaacttatatgagtgattgcttgagtaattgctcgatacacttaaccgcaaggtagtatatgcgaggtcgattcacaagaaccaaagatactttaaggattttcaagattcgttcttagctaaagcgagattcgttcttaacaagttcatatagttcacagggttcctaacttcaactttcgttggctagaaatacattgctcaattcacattctttcaggcattctatcgaacacttttgatgcatagaaaaacctagaatctacaacatggtgatcattcctattctagcattaagaacatgtgaatcgaagaacctagagaatgagaattccaaacactaattattccattaatttattgaatctcctaattagaaccctaacacctaattagaggattagtcatacattgcaacagaaatgaaacaaagagacattaaagaaaacatgtttcaaattgaataattaagaataaagtttagaaatcttctccaaattgtcaagaaggatgaatctctaatccccaaaagtgcttacagaaagtttcttagaaatgttgcagaaaaagaagtgtaaaagaataaaagtccaaataaaattaggtgatctgggatttttataccccattacagaaaatagaaaatcagtctggttaaggaaaatcgaaaccagtcgtcaggaagccggattgaccgatccagacctggaatcgatcgatcccgagctggcggacgattttcttcgacgaatgagtgttggatcgatcgatccccacctaggatcgatcgatcccgagctggcagacgatttctcgattcttgctatcgtttttggtcctaatgagcccgataagtcccgaaaacatccgtgtcccgcttaaacaccttaaacctgcaaatgactcaagacacaaccgaaaagatgcaaaagacggactacaacaggacaaatgactcaaaactaagggacctaagacaccaaaaatgcaacatatcaactccccccgacttggatctttgcttgtcctcaaggaaaaacaaaaatctttatcaagagaagaggtttgaaaacacgagaactcacattttcttcggtatcatgctcttatcaattgcctgcaaatcattatcacaaaattcatcaacccgtactagactgtacttcgccataaccgtagcgacaaaattaaaccccgagatctaaaagaactttcagaattaaaaaacttaaccttttaacattcattaacagaggcgtgtactctcacaaacggggtatcgaacacgttatgggcttggtcaaaaagggataatatatggtggctcaaagtgtttcgggttctcaaatagtataaacggatgcatgtcattatgcgaaatcacagtgagacatagaccaattaggtggtacttagctccccttaagtttggatcaaaccaaccaactcactttcccaatcaaatcaatgagtttctatgatgcttatctatatgaataataataactcgacatttctggttccttcattctcctttcccgtcttttttttttcttcttttttttttttttgtattaaggaggagtggaaccgatgtctaacaaatatctgcatcaggaaaaactcaaacaatgtaacatctcatacccataaatacaagtgttcaacctcgaaaccatagtggctaaatatcatcacatatgaacaaccagcaaactacaactcactatcctaacagaaggaaagttatatcggtccgtatacttcgtagtttttgcacatggatgcatatcataatgaatatataagagtacatgaggtttcaaataatggctgggggaacatgtgtggtactagactaaaagttagtccagccattaagagttaacaaagagtgataaaaatgatgtaaagaaaactctgaatgtatgatccattacatgattctcaagcctctaagtgagatagattaagtcaagattaaattcaaatagataagagaaacctcaattcatccaaatttcaaagagatagggactattataaagcgatctagtgatggattttcctgacattccaagttattgaatagtgctaaaatggtctcattccaagttattgaatagtgctaaaatggtctcaaggcaatgaaatcaagcatggagcaattctctccgaaaagattactgttctcacaatattttgactcaacaaaaagacacggtttttgactcgatagaaacgaaaggactgactcaaattaaagcaacaaaagaaacaagcaaagcaaactcgattagtagacaaatgacatcctcccccccccgacttgcttcacaccgtctcagtgtgagaacaatccgaaaaggagatgtcggacatacttaaaaggaaataacaaagaacaaagacgaaggtatgtaaagagaatacctcgtgggttgcctcccactaagcgcttgttttatgttgtaagcttgaccgctcaacacaaattattaatcataagaatcaaaaggatgagtcagtagaccttttgtccttctcctgttagtgcaagaaatgatatgtgccaagtaatacacaattatccatggtaaagtgatcaaattcacatcagtaaaaatgactacaaatgtagcatatacttttgaaatattctttgatggttgaacgctcatgagtatcaaatgcatgcaatggaaaaataaagtcaatttcaggtttcaatgaggctttaacataataatcaacttcttccccattaatctcaaacgacatgatatttccatccatataatcaacttcaagatcttcactctcattcaaaattttatcaatatcgagcataattcatgggttagattcgtcaagaagagatctagatatatcaggcattgaaaacttaaactcgagatcatgagcattcaaagcaaaatgatattcaatatgaaagcatatttcatggtaatcccaagcaagtttttctgctcctaaagtatctagttgttgagactctcatatcaaatcataacattcatcaatgatcatgggagtatgcaaactagaatttacatcttcaatgcatggcatttgaatatcctcaaaatcatgtatttcaagaattgaaaaccatgtaccttctagtttgcttggtggaatccaatacattaccttttcaagtacataggcttcatgttcttccaagaatgtattctcttccttcacatgctgcccgatgcgatacaaggttcagtcggatcataatcgctaaatcacaccttaccaatgtcggatgttcgttgtgaagttcatccaacttcactttttgttccagtgtaagaacactctcgtcaaatgggtgctccaaatatggctcatcatcttcttctatgttacaaaacaaaaagaaaaaaaaaatgaaagttagcaaaatagaataaaaatgctctagactaaaaactaatcctaaatctttacgtaacgcaattggtccccggcaacgaactaatgctttggaaaatgttcaccttgtaaaaacggaatcaaaaagaggaatttcgaactcatacctttggagatcaggaaaaccaacactagatatagaaagagggctaaaaatcgagtggaatagacaccaaaattgtgaaaatcgagcaacaattgagaaagttatggatttctctctaagtgttcttcatggtcttcaacgaagaagaagaagtggtgttgggtcgattccgtttatttttaagtggcgactccggttcaatctggtctagctcggttcattggtggcgtaagattgaaatcgcgaagttgctgcctggatcgatcgatcggctctttagatcggtcgatctgttgccactagtcccgacgcctcattattggatcgatcgatccagtgctgggatcgataaatccccttcttgcggatgtttttgagagccttacgtcaggactagattgatcgatccatttctgggattgattgatcccaacctggcggatttctacactcaaaaacgaatctcacagcaccgtcaaatacagagactctatcgactcaacacctgagtcgataagtctgaactctacagcgaagtgaatcaaaccaaaatcaaagaaaacgaaagaaggaaaagaaagtatatacaataccttgtgggttgcctcccgcgaaacgcttgtttaatgtcattagcttgaccgggttcttgtgaatcaatgtagcctgcaaaactaagggacctaagacaccaaaaatgcaacatatcaatgagcattttctaaaggtagttgaggagaattcaatgttaactaaggagaatctcaagttagaggctaaaattgttgaaacactgaaatttgctagaaaggaagaagaagaagaatcacaagctaaaatacaacttgaagaaactcaaaagaatttgaggatgcttaataatggaacaaagaagttggttcatattctgaatattggcaagaatgataagtgtggccttgaatgtaaaggaaatccttcaaaatcagatctagtgtttgtttatggtggaagaatcacatctacatcaggaagtgtgtcagaaaccgcaactctggcacatattggaattaatggcgagactgcatctgatacaaaaactactacgagaactggtacagagactgcatcaactttaaggaatattccagaattaaaaaatgcacctcaacgaattcttcgacctgtttgtcatcattgtggagttgttgggcatattaggccaagatgtttcagatatttgagggagcaaaatcgattggtaaatgcttatcatttgagatttcatggtcctacatgttatcattgtggagttcaaggacgtattaagaggaattgtttcatgttcattcgaggatgcaatcatgaaggtttaagacgcaacaaagtttgggttaggagagatgatttccgtggaggtggtgttttaggctatcaacctcgtattgcaaagcggaaagaattttccaagtagttttgactcattcagggagagaataatgatgtgtttcatgatattgttttggagttagaactgatgagttcacaacatagtcaaaatgggagagaatgaagatgtagttgttgttgatggagttgttgaatgagtcaagaagtaatacaagattttgtctgatggagtcgataaatgattcaagaagtaattcaacatgttgttgtttttgtgtaaatgtcggtttcatttttggcgccaaattttttttattttttaattacatgttgtcattagatgaagggtaatttagtttttttttataagaaaaaggtatttaaaaaataaattattagaattttataaaggtagattttttctttttgtagttaagatatgttagaaaataatgaaattaagacgagaaaccaggaaatatgaagaaaactttttgcaggaagtgtggcggccattagggcgttttctgaatgaacattttgcttctgaatagctttgaacatttgcgtagatgcataatcaaaattctttaaccactgtgctacttcaacatattacaaattactcaattctaataatatataattgaaatatttattaaaaacagagatagatctcctaccgccttctatcacctatttaacgattaatttccgtttttaccgtctaagcgttaggcactaatccaccgtctgattagcgcctaacaccttttaaaacattataaaagaataataaaaaatatttttgcaaatttcctttttttttttttttttaaattcaggaggttttgagtcgaaatccgtaatcccccaaaccttaaaccacaatatgtaaaatttcctttttaaattgatacgatatcatataaaacgattttttttttagaaatcatgtttcttagctgactgggttaagaaacctacgtgttcgccactatctgtctttcgtaccattttttaataattgattatatttttcttcttttctttttcctgacaacgctctactctctttttctcactacaaaacaattataaatgtaactgttagttcattttcttatacaaaacaattataaatgtaactgttagttcattttcttactacaaaacaattataaatgtaactgttagatcaaatgttgtgctaatggtatattcacacttggcctcttccatttccgaggagaacaatccaatgatatagacacaaaatgagttatttaaaaatccactcttttatctttttgtcaaaaatcaataaaatataaatactaaaaatttcttgagacttgacgcaatagctttttctgttgtttttatattgacacatcattaaaatcgtcagccaaacacaaaattttaaataatacaactcagtttcatcaaccaataataatattttattttttcacgtcattctctatatcaacaaaacaaatctatgtggctaggcccaaccaaaataaatgattaagggtttggattatttaaataaagcgtttactgttataaatgcgggaatttgtgaaagcggacggttgcggtgttaagcgttatgaagcattttgaactactagtttaatggttaaaaattggagcgtttgcacagttttatgactagttaaccaacaaatactattacggttaaattaaaaataaccaaaaaattataatttataattatacaaagtataaaaataccaaagtattatattattatgataaaatgtgaaatttaaatataactattaataaaataaaattcttcctaattattcaaactaattaaattttatactcaaatatgcgtttggttcataaaaaaaacttcatcatgtaatatggaaattacaaaaaaaagaatatgacaaattaaaaaaaaatcaaattttggatcttccaggttaataatattattaatactttgttagtatcttatcattcttcagtttggtttgatactttgattttgatagatagaaaactagcattttaagaaaagaaatcaccaacatatatggaatttttcgagaagaagcttacgctgaataatgttacagatgacattgttgatgtaatctgtaaacaaacaaagaaactgttacactaaggtgtcatttttgttctgtaaggtctaattgaatttatctctgatgtatggttactctcaaatctccaatgattaattcgattcttgtccctatttttttattctttaacgtaggcatgaccacggttacggttacggtttattaaccaccggttacggttataaatgttttttaaccttaaccttaaccattatatatagggttaaaacggttacagttaaatacggttacagttaaatacggttatggttaaatacgtttacggttatttgataattatgatatagttaatatatgagacaaaatattatattttttaatctttataataaaataaataaataaatagtgatatatcaaataatatttcttttacgtgattatgtgttttaaatatttatactaaatcatctatctatttttcttaaataaaccaatgaacaaacaaattaatggtcataattataatgattgaattaattacaatgtccaaacaaaaacaatattaaagagaagatgttgtgagtattaagaagcaattttaagagtataaataataataatatgaactacttaatggtaaaaagagtagtgtagtaacttcgatcgtagtagtgggcatattaaacgatttcaagtactattttagtgaaataattatttatttagaattatacacaattacaactatatttaaaagttttaacaatacggttaaccgacggttttgatacggttacggttaattaatggttacagttagtatattttcttaaccgtaactgatctatttttacggttaacggttacggttattaaccgttttatacggttacggttaataaacggtccggttacggtccgaaatacggttacggttagattttggtcatgcctactttaacgtgcatcttttatccagttttttgttcaagagcttatttctgaactgaatgaagtcttagtagaaggaaacatcgagaaagaagatcaatggaagaagaatcttaaagaagaaacattaaagatttttaagtttcttcctcaaaatattcaaggatcttatcagattaactaagggtcattgtggatcttaatcaataactaataatcatttgattacgttctatactcttatgaaaaaacaaagtttcaattttcaagttgtgcatgtgtaactttaacctctccagaattagcacatggtgatttttaactcttttcacttttgttttttaatgactattctaaatagatgttcgaaaaacaaaaaattagcttccaaaacttataaaagctatatatatcatactaaaaaaaatcatcaaatgaattatgttcccagttactttctaatgaatccttttgttctaaatatatcatgaatcatgaaaaataacattcaatacctacatacaacttaacaaaattacattaagaaaaaagcccgcggcttggcgcgggtttcgccctagtctatataatacttcttctgttcttaagaattcgatgttctagatatttttttgtttcacaaaaattgatgttttgtaacaacatcattattatttttatttttaacaatagaaagaagaaaaaaatatagttaatattattaaataaacaaaaaaaattgtaaaaatttacttttcttagtttgtgtgaaaaagctaaacatcattttttcggaacatgagtaatattaagagaatattacactgtgtgacacttttacaaaaacattagccggtttagacattttaaaaagagaagacactttgtcaagttaaattgtccattttgcccttttaattataaactttttctcgtcattatttctttcaacgcttcttcttcctctctattttctctctctttccaaaaccaaaatcaaatcttttagaaaaatcaaacgaaggcttcatcttctagtctaccacaaatttgctatgattccttgcgacgattgtctttgatatgatgatgtcgtagttggtggtggcagcggcggagggagctttatgccttattcgtcgtcccgttcggtgccccttctactactaattattcttgtggtctctgatctacaaaattagagagatctcgatcttgtcctacatcagatctataaactttgagagtacgctgtttccgattgatttaatttcatgggagtaatcgcttccaattcaaagtcaagacgaagaaagaaaagagaggttgaggcataatgaaaatcaaagtaacttttgtgggcttataacgctatacaatcgatgtacgttgttgaacttcttttgaattaaaatccgtaatttccggcaattttatccaatttgatcataattgtgggcaaaattctgatgacatctgagagagagagagagagagagagagagagagagagagagagagagagagagagagagagagagagagagagagagagagagagagagagagagagagagagagagagagagagagagagagagagagagagagagagagagagagagagagagagagagagagagagaatcctatcagagtgcacaaaactcactattcaaatagagtcatcatcttccatagtcgttcatttgtacaatcacatgtaccattgatccatacaaaaccagttctctatgattcaaaattaacgaatccaaaaatcgacagtaagacaagaacatagaaaaagaatgagattcagggatgagagacttcggtagaagagaataaggattttcttctttttcgtctcaaaaaaagaaaaaaagaataatgcttattttttgtggacacgatcgatgatggtgggtagagaaagaaaaatggattgagtatgccttaaacaattccattacgcgggcctttgtctttaattaatattttttaatcagttgatggtttaatttggaaatgatataattgtcttcttatcctccaaaaacaaggaaaagcgcctcatccctataaagtgtctcaaacgaaataagtttttctaaaagtgcatattagtggtacattccctaatattaatgatatggatcaaattaaccttataccactctctcaaataaagaggtcaattgtaacacttagggatcaaattcacaaagctcttttgttctcacaataggtataagtatgagattaagctaaacaggtcataagaaaaagaaaaaaaacaagcaaatagcggattggatggatgtaaattcacaagatacaaacgttaggcttaggattttcttaggaaacgtcaggtcattagtagatctagttattgctaggatgttatcaaaccgttcttaaactcaaatcattattacagagtaaccggtggcgtgccgcattactcactatgtctaataactaaagattcagaatgtcggtccgcaacttcctaattcaaaacatgcatgctaatcgagtttgatacgttcacctaggtaaataaactgattgttattacacatctaaaagcctcgctcatcaaatagtagttatggtaatagatgcctttttgagtattacctatcatttaagatcaaattctacttaactactctataactagcattaagaacaaccaaagatgaaaaatcatatagatatcctaacaggtggacgatctactaaataatctataaccctaatgagaaactctaaccctaacaagcagactactcaggcatgatcatagaaacatataacatgtttgaataaaaagcataaacaaaacaaaagaagaaaaaagtttagaaaagatctcttcactgtaaaattgaaatctctgatgaaactcaaaaaaaaaaagattttcaatgtatgaatagtttagaagtattggaaatagaaaacttgatttaaagttgcttagatctaaacaatgaccaaaaaactatatatgtgtgttctaaaaacttgtagcgactaataataccaataaggaaatcttctgtggcaaacttccaattcttcaaactataaacattcttggactttactgggccgcaactggtgtctatcgacacgacaccaagagtcgctgatgccacaagttgacatcatctttttgcagaaaaacaattgttactatgattttcccacatgtaacaattattccctgttcgctttcctcctagaacaatatcaccggttacattgaacgccttgcaatcagtcctagtgaaagtaacttcaagtacttcatcacacaactgacttacacttatcagatttgcctttaaaccatgaactagatagacattcataaggtgaggggactatttcgcttgtttttcctttgccttgaatatctccacgtcctccatcaccaaaagtcacttttcctccctttatctctttgatgtcttctagatagtctctcgttcttgtcatatgacgagaacatccactgtcaaaataccaaggaccggttctttcacgttctttagtgactagagccatgttgcatctgaaacctagtcatgctctacttcctaaagatcttcctatcatagatgagtataaatcatctttcttaacttatatctgattttatacttattccagaagaacttcctttgatgcctgagtctaccaaccttttcccagtacctgtcataataaatttttatatgaccattgtttccacaaaaatagcatctgaaagtttcactcgttgaagtaatgtcttgcgtacaatgatatgtacctctagatacgaacttgattggtcctgaatttgatctctcttggccattatatctgagacctttgttcgtcttctctgttcttccatagctcaggatctgatcaagttgttttgttccatcgaacatatgaatctttcgatgttgttgatcaagctcagtttgcaacccagcatatattttcttttctactattaattcattctccagattgtctgctttagcagataaacgtagtttttccttcatttgacttaagctctctttactgatctttttctcaacttctagttgattctgtagaactttaacaagtgcttcgagagaaatctattatgttattaagtcttgattctcttttttcaagtttaatcaaagtctccttatctcttctgaaagatcatcttcctgttcttcttctgattctgagttagtaactccttctccatccacaaactttgtgattccaaccacttatggatttttctttccgccttttcaaatcacttacacattcatcctgagaatgtccaattcctttacatgtcgagcacttgttctcacatttcttgactgacggacattcacaaacaaaatgtccatatcccttacactcatgatattgcatatcagctttttttgaaggtttgttgtcttctgcacttctcttagacgatccaaacttcgtatatccttgtccttgaccttgctcagctctttttagcattctatcaattctctgaaccaacaagcttacatagtcatcttcttccttctgcaacttgtcttcacaagatgttaatgctagccctttaagtttattcactcctcctaattcatgctcatgttgttgaagaattcccactacttcagcaaagctgagtttctcaagatcgtttgacacagtaaaagcagtcttgtatgccatgaatttctgaggtaagcatcttagaaatttcttcaccaattcttgtctttgtatttcttcccaagtgtcatcgctttctgagataacgagcttagtttttaactgaagttagagattgactcatgttcttccatcttcagattctcaaactttgatgccaacatatcttttcttgagatttgaaccttaaccgtccgttcgtagttgatttgcaatatatcccatgcttcttttgcagtttcacattcttgaattaggtcaaattgttttcttccaacactgcaatgaatggtcgtgagagctctagcattaaatttacacttcttcatctcgtcatccgtccaatctatttcgggtcgtgtgaagcttccgtcttcattctttatcgttggttcctcccacttgaccaaaaccgatttccatacaaacacatcaattcctctaatcacggatttaattctagatttccagaatccgtaatttccatcatctagaacaactttggagttgttaagtagttcctgatagctctccatcttctccaaaggttctcacatgtatgcaatgctaacaagtgaccactctgaaaccaattgacaatgtgagaactatataataactcattgaactagaaaacgatataacaaagagtttctcaaacttcttttgattaatagaaaatatgttcttacaaggtttcaccttaaacactattttctattctctcaaaatcttgttcttcaatcacacacgattgagaacaagaactccctctaaaactctaaacactctttaagtctttagctctttgtttctctcaagctaaaacttaattggaattctctcttctgtttgtgctaaactttctgtcaagcttcagtgctctatttatactaaatagacccaagccatacaacaagccaacttccaattctcaaactaattggaacgcacaatttcctttttctttataaattagaaaattgtcctttttcttcttgtttccttttcctctattgtaaaaggaaactctttagtcttctagaatcatctccaagattctagtatccatcgccaaccgccatacaccgacttgctaatttccgtttgttttgatccacgttgctctgtttatttgaactacatgatgtactttatctttatttaataactcctttagaggttaattaattaacatgtaattagcgacaacacattaagtagcgtagtagtcgctaaacccattaagacgaaaatttggtgactaaaacacgtagtcggtaaaccttgcgtcgctaaatttattagtcgccaaaccgtcgccacttagcgactgctgaacgactacgtaatgttgtcgctatatagtcacctaacagtcgcctatttagtgactgttgggagacactattgccactacatagtgactctttggcgattgttttgtgactgatataatcaatgttttgccactacatggcgactgtttagttaatgtattggtgacttaattgaaactatttgacgactgattagaagtttaattatctatttacattcattttttggaatcctatttatcaaaagctgtatttaacaaacaatgtgtatttaacaaaccaagaaccttgattcaaacacacaacataattcaaagatgttcacaacataatattcaagctacataatatcaagtttataagttttgataagaaaagcaactaatggaaggggagatgagatgttcactcctcgccttgatcttgtgaagcagtagcagtcttgacctcctctgtttgatcttctgaagcagtagcaccagcagactcgaggaagacgagaaacctagggtcagttttggtcaagtacttcttcaccatcctcaagtgtttgatctcttcttgttgctcattagcaacacgcttgatctttggttgctcagctttcacccgcaatgcctctgcctcacgatgtgcttggagagttgcttgttcttctatcttgcgattggcttcctcaagatgtgattgcaaggaagtgaaagcataactgcttcttgggtacttccgcttcccattaatgacctccctaagcttcccattccgaagtatacgcctcactcgtttgtgatagttgagacaagaggattagttcttaaaagatgaagtaagtgatgatacaaagaaaaaaaggattaaccacattacctgaaggaagatctcatcatccttctcttgagatagttatgatccatgggaagtaccatcagacccttcatcattctcaacggcagccaacttagcttccttgttcttcaaatatgcctcatgaattacctacgccttcctatcaacaaaagtcccatcttttttggtatgagtcctaagaaatatctcaccaacactaggtggtcttctgagctaaatttcctgaaatgttgttcacaaaacaacaattcaacttcttaagaaaaaacattatgtaaataaacaagagtgcttgatgtaacttaccatctcttgctcgatttataagaaagactttggccctgatacatgcttgtgagaaccaagaccattacggtcagacattcgagctgctgatgtgattggaactcttggcaatggcttcttctgtgtctcaatactcacacatttccttccacaatgtctcttcaatccatggcggttgctaattggctcattttgagcaagccttagaaaccatgtccttcatacgcagctaacatattttgtagaatttctcttcaattataccggttagtgatggatgtcatgtgtgtgttttctacaaaaaaaagaggagagtttgatgttagtgatcaaacaacgaaaccaaaccaaatggatatagacaatagtaaaagattaacaggagatagaagtttacgtgaattcgaggaagtatttatgtctttttcagtagatacacagctccaactgtaaaaatggcccatcaaacttgtttgtgaatacctttgcaatcttccaggtcaacttaattaccattgtcgtgaccaaatctacaattacataaaccaattagaagacctaatcaacttagcatctatatacatacacatattactcaatattacccctaaacgtaatctacacagcttaccatatacacacccaatcaacttagcatctatatacacacacattactcaatattaaccctaaaacctaatctactcagcttaccatatacacacataatcaacttcgcatctatatacacaacttagcaactctccctaatatatgcaacttaccattgggtttcaagctcaaatgtgggagatatgaccgtcgtatacttctcacggcttgggtggagaagcaactcatgaagagctgtaagtgaatcttccaggagaggagattcccttccaacatcagcctcaaacttagcttcctcatcttcatcttcctctgcgtgtgagttttaagcttgaacgatgtgatgtgataaagaggctcgaggtggcggttttgacgcttgctgaggtgtagtattttgatatgatcatggaaaacgaaaaggacttggaacataatgaagagcttgtagccgatgaggaggttaaagatgacgagcagcttgaacctgaggatgagcttgtaggtgaaaaggagtatggaaaatatgatatcttaatctcattggttttgatacatgatcatcaaatgggcatgtgtctcatttgtactctttttcccttgtgaagttttgtcccaatgggttttcttgacaaggtttttaatgaggcaaatgattcaaattcaaatcacctatttgttgatcaacatcatggcataactttcagaacttggcgtcaaagaatatatatcaagtccaagtcattttatgtccattacaagcccaagaagagcccaaaccaagtggttaatttgatggtcaagaggaatgacgaaaatagaatattaagggtcatctttgaagccaaagggtcttttctatttcaaattatatctttaattattatgttatgtttctaggcagccttggagtatgttccaaaacttgtctctttctcttctcttcttcttctctttataaactcttgtaatctcttatgagaacctatatttcttttaatcaaaaaccttttctaagaagatcatcttgttggtgtgtatatccagcaaacccttagtctcttttggtgcgtatatccaaaggatctaagtttcggtatcttgaagctcttccgcaagcttctgtgatatccatcgactcattcaaatatatccatcatcacggcttcacagccacatctatccctttctcaacttaagagtgtcgagtccttgggaggatctcatcagatttgatgcttcccgttgaaccggcgctggagactaattggaggctttccgtcaaaccgccgctggagattgtttcgacatggaggctagacgatgaacagatcctccagatctaggttgagtggatctggatgctcgaaatggagtcgatccagatccgggaggagatccttcgcctgactggaaaagttgcgtcggaagaggataatccttgacggttggacccgttggaggctgtgcaatcggctctcgttcagaatcttgaagcggggtttaacgatttgccgacgtgaacacgtactgggtcggaagacccatggatcctcaattcaaggtctttgattcaactcgtacatgctgggaagaagtgggtcaatttggggggggggggaatcttcgatccccttcctcttcctctcttgcctttttcaccacgagtctttcattaatgaagcgttcaattgagagattgagaggattgatgaagaattgggatcaaatcggtaaaagggattagggttagggttcgtcgaaagagaaggaaaggggattaagtttaggattacgcaagaaaagagtttatatactttgggttaatgggctcttattactggatcaagccggtaaaagcccaattaattgtcaaaatataataaatgagtcgctaaatagtagttgtaatttgcgacctattagcgactaagttaatcagtctcaaattcaagactgattagcgactaatatataatattgactacttagtcgctaatacgtcactatttagtcgccaaagttaacgactacttaatcagtcgcctaattaagttgataataccgtgttttcttgtagtactgcatcttcaatgtctctcatggatgagctgaaagagttagatctactaggcctgggcacaaggcaagtacttgctattttacaagtacttgtgacccgccttgactcttacgagtaattgacatttgagcttgatacttgactcgtttgagcaagtacttgctagaactagttctcgtccaaaattttgttacttgcaagtaacttgacccggcctgttggcttgttacttgcaagctacttgttacttgaagtctcatacatattacaaaacatgagttctaaaaatcacaaaacattaaagttctaaacatcttaaaatcacaacacattcaaagttctaaaagataagcatctttaaaacaacaacttggttcaaattgaaatcgttcttatctaattatctttcttcttgaattcttgaatctcttttttgcctataaataaaaccaccataacaaatatatgtattagtgttacgctttaaaaccaaacttgaaaatcacgaagtattcccatgccttttattcttcctccaaactcaaacccactccttgcaccaaatttccataagaatttgaagttacaaattctgttaaaacaacataaaaattgtaaattcacatttaaatgaaaacaatcatatataacgtaaggataagtgtatagtgttagtgtctaccttgttccagaatttcaagttgttcaatcatcctccaacaaactttgttcataatcgttacaaatccagtcttgagggcatattagaacctcaacaagtcttggggttagagaactgcgaaaaggatctataacccgaccacttgtactgaacgctgactcagaagcaacagttaaaaccggtatagccaatagatctctagccattagagacgaaatcttatattttgatcctctctttttccaccacagtaatatatcaaactttggatctgatctcagaacacaagcatcaactaaatagctttctagttctgattgaccatcaatattatcttcactttcttcatgtatatcaatcaaggaatcaaggtcatttatttctggagcctctacaacaacttctgaaggaccttcagcttggctagtttgcattgaagaaccagaaactttatcttcataaagtttaaacatcttctccagaaccaagtatatttttataatcaaagcttcagctatgctgttaacatcatcagcatagctctcacaaattaaccaactgacatacttcattttatatcgtggatccataacacaagcaataaaaataaccaagttcatgttctccatatctcctcaatatttatcaaacttagccttcatcttaatagtcattgccatttgattaggatcagctttgtccagccgtaacttttgtaatatatccttcagatacaaattcctagtaacgtaacgagttgctacaattctcactgttgcatcataaaagaacttgagaataggtgtatatgtcactgcataatcccaatctgcttcagttggaactccttctaacttcccaagttcactcacatatttatcatcttctaactcaagcatctactgggtgaaggtgatttggtgaaaatttcagatcaggaaaatgacgaccttattgaagagaacaccatgagtgtggtggtgaggtgtctcaacccgacagttcataaagttggcggctttgttaaagctttaccacctgatataaccctgtttttactgattttatttattttttaggataaggattttgagtctttatgttatttttcgagtctttttaatgtctattcaggtattctgtcaagtgggacaacaatggagatgaggagacattttggaacaagagctaaggaaaaggaaactaagaacgatttcagattccagattcagagggagtgtccatcgacaccatttttcggcccagaaaagtccatggtgctttcaagttaaccgaagtggaaatttgccccaaaagacttccctatttgcattattagtccttggacgttttatagggtttatatatagttttagagttcattgtttagacctaagttgcttttatcaagttctttacaatccctattttcatagagacattagatattcatcccttgttctttagagattcatttagtgctcaatacagtgaagagatcccttcattctccaatcttatgtgtttatgctttgtatatcaaatatgttgcttgtttcattcaatatgtctgagtagtttgcttgttaggaataaagtttctcattagggattcatatggtttagtagatcgcccctttgctaggttatgtgtagaattc

SEQ ID NO: 207 - DNA, 89685 bp, Arabidopsis thaliana
aagctttaccacctgatataaccctgtttttactgattttatttattttttaggataaggattttgagtctttatgttatttttcgagtctttttaatgtctattcaggtattctgtcaagtgggacaacaatggagatgaggagacattttggaacaagagctaaggaaaaggaaactaagaacgatttcagattccagattcagagggagtgtccatcgacaccatttttcggcccagaaaagtccatggtgctttcaagttaaccgaagtggaaatttgccccaaaagacttccctatttgcattattagtccttggacgttttatagggtttatatatagttttagagttcattgtttagacctaagttgcttttatcaagttctttacaatccctattttcatagagacattagatattcatcccttgttctttagagattcatttagtgctcaatacagtgaagagatcccttcattctccaatcttatgtgtttatgctttgtatatcaaatatgttgcttgtttcattcaatatgtctgagtagtttgcttgttaggaataaagtttctcattagggattcatatggtttagtagatcgcccctttgctaggttatgtgtagaattcttcatctttgattattcttaatgctagatctagagaaattaactagatcttgaaccaagacaatagatatgcccaccataagtatctgtagttggatatattatttggtgagtctggtttagaggtgtgtaataagaatcggcctatctactaaggtgaacaattgaagtcgtttagaatgcatgtttaggttaaagatctctcggattctccggttattcttagctataggcatagggagttttgcggaacaccacatgttattccataattagagtttgagtttaagaatggttcgataacaacctagctttcattagatctactaaccaatagttttttgagaatacgctgtttcctagctctttatttcatcgtttacaaccaatcaatttgctgtctttttactttgtttactttttattttcaatcattccctactagcttaatcttgatatttgattcattgtgcgaacaaaagaaatttgaagaaatttgacccttaaatactgcaaccgatctcttatttgagagagtaggtttaaggcaatttgaaccatatcaccacctatttggggaatggaggatagagtgagggaaagaggggtaggcgacgaccgtgttcagttcatctttgaaaacgaaggggatctgtaccatgtgctctaccgttgtccatggttcttcagtggccggatagtcaccttcgatcaatggaagccaaacccaaggccctatttcctgaaaagaatattattttgtgttcgaattaaaggaatccccattgactagttgaagaagcaaacagtgaatagcatcataggtcctttagggaaaattgatgttgtggaattacatgccaaaaactctcctgctctagaatatgtgagagcgagagtttggattaacgctaatgagccactacaataggttaagacagcaagctttaagtcaaggtaagtgacttagattgaactcgtgtaatgaaacattgttaaaagtgtgctttctctgtaaaaggcttactcatgataaatcggcttgttcctacgaagttgttgatcaaccacctgaaaaaagcaaggtctttgagaaggacggaaccggcaaaaccgaaaggaaaaggcaagggtgagatggataatgagggaccataaaaaaaccagccaattcaaaagaaaggcagggtttcttcttctaaatctgttaaagatagacacaattggaatggctctcctgatagtcagattcagcaggtttggagaccaattagaagagtgcacgaaacccctgcaaaagctatggattatcagagtctagaggatagtcaaacaaatcagagcaaacggcgaaggtctaacaccagtggaaagatatccagtaagagagcaagagtgggatcatgagaaactctgcatcactcaccatcagtctttgagagactgggaatccgggtgagggtatgaagaacctagaaagaaaaggctccaatgagaaaacaaagcagtctcctacagtgtatgagcgtctagactctcaggactcttcatctagtactcaaattcaatcgaaatcagttcactctagtcattatgctcttgttgcagcttcattttcgaatcattatgcctccatgatggcagcaaatcgtccaagttcctatggtgcagcacattggaatgatagtgaaattaatttgaaagaagggttgatggttaattccaacccttcaaactctcaatgaggatattgagttggtactgtaagggggtggcgaatacccctacagttcgatacctaagggaattacgtggtcaatatttcccggaggttatattcccttgtgagactaaaaataagagaagttatttagagaatgtggtaggtcacctgggttattttgatttgcatatagttgatccaattggcaaaagtggaggtctacctttaatgtggaaggagagtgttaatatcaggattcttgtgtcaaacaaaagaatgattgatgctcaaggtggggtgacaggacaaggatttttacttgacatgtgtatatggtgagccagtccaaagtgaaagaggggagctgtcggagaaactctctagaatgggtctgaacagaaatcaaccttggatgatgtcaagagagtttaatgagttgattgatccgacagagaaaattggaggagcaagaaaaaaatattccacctgtatgaagtttaggcagttgttacatgcatgtggcttatgggaggttaaacatctaggataccaattttcttggtttggtaatcgaaacgatgagttggtttagtgtaggcctgatacgacattcgctaaccaataatggatagaattattcccaaaagctcatgtgacatatccccaaaatgtttgatcggatcatagtctattaataaatagtttaatggatatggaatggaaaccttgggctaggtttaagtatgataaacgatgggttcaaagaaacagatttgtggatctaatggctgggttttggaggcacaatgtgagcagtaaagatacaccaatgatggataatcttagtggctgtagaaaggagatttcaaagtgaaagagacaaaccaaacccagctaagctttaagaatccaagagcttcaattccggattgatgtggccacaagacaacagccttttaatcctcaactcctaaaagagttgagaaaagagattaacaaagagtattaccaagaagagcagttttgaaaccaaaaagcagattaacctgagtagttttcacgctgccacaaaaaactgaagagcactgaaacacatccaaaagctgatagatgacgagggtaaggaatggcacaacgatgtgcattgaggttgagttgctgaaacatatttcaagaaattgtttgcttcagaagacgtgggagatcaattacaagagatggcataagttgcatcggttgttaatgaccaaatgaatgaagtccttttagctccagttacaattgaggaggtgagaagagcaatgtttgacatcaatcccaccaaatgtccaggacttgatggtatgacgggctacctctatcaaccattctggggaagcatgggaactcaactcacggacatggtgcaatgctttttcaagacgggctgtattgaaaaggatatgaacaagacaaacatttgcctcatcccaaaaaaatgtagggctgatagattagtcgacttcacacctacaaacctctgcaatataattaatctacaaaatttattgggaaacttctggctaccagattgaagaaggtgattcctcttatcatatcgtaatctcaagcagcttttttcaaagggagactcatcagtgacaacattctagtggcccacgagttactccacgctctcggctccaacagcaaatgctcggaggagttcatcgcctatgagcgtgtggaatgggcttttctaaaagacaccatgttaactttgggtttgaatacaaaatgaatcattcttataatagagtgtgttagttcagtgcgatatcaggtttttataaataaatctctgcatggtgaaattgtgcataacttttggaaagaatatactagaaggaaggtgtgaaattaaaaggaagctgggaatcgatcaagaaggtgggtaagagtctacttctgtcttctcaaatctttcaaaggctccaatgtattagtccttaattatctaagagaaagacttagggcatctccaatggttaccttcaaatatttcttcaaaattagagtttcttcaaatttgaaggcaaaaatgaagcaatacttttccaatggtttccttcattttatgcttcaaaaagaatattctaaagtatattccatctctattttattattaattattaatataccctttactttctaaacttatgaactttaactcatttgtttaataagtagcaaatagtccaacaattttatttacaatacattattttaaagaaaatcacattacataacattaattaaaaatatatatttatgatacaaagtaagaactatgctttgaaagaattgaaagcagacaacaaaatgttatttcaagacttgaattctatagaagatccagagatttgtgcatatgttcaagccaaaaaagctcgtattttacagaaaagaaatgaacaacagaatcaacaagcttggacttcatcaacctcatttgggaaaatttttaattatcttatggatccggaatcgaacttccagagtattaagtttttaatctatgttatgttatgtttttgatatttaatatcagtattaattatgtattttaagttttatattgggtttgttgtttgtttttccatttaatataaattgtttttacattttagtttgattggattaaaataaaagaaataatttgtttagtataaaataaatacttgttataatttaaaggatcattttgtaaataataaagttcaccttcaaaaaatgaagatgcgaatagtgtaccttgaaatatgaagattcactgttcaattcttcatctacatatacatttttgcagccattttgtgaaataaatcttgtagttgagacttatttacaatggctgccactagattttaatgtttgtttttgataattagaaaaaaaatctttgattaaatatttgacatttaacaattttccctaaatctcttcacattaactacacgattagttactaaaataaaacttccaaaatatttaatatcatttaattactacaaaattataatttttgatattgcttttctccatgactataagaattcgattataatcatcaaaccgcagagatatttgatagcatttaattactacaaaattacaaaatatttagacaataattcataaacatatcataaataagatcaacattaataaaataaatggtttttttacgggacacgttggcaggacgggtttgacaggacgttacttaataacaattgtaaactataaaataaaaatattttatcgatagatacaatttgcaaacttttatgtatactaactttaaaaaataaattgttcccgcggtgtaccgcgggttaaaatctagttttgaagataaaaatgaagcgctattggagaagaattctttatttttcactttaaaatgaacgaaaaggtgaaaaataaagtaccattggagatggtcttaagcaaagaatgtctagttggcaaaacaatttcctatctccaagagggaaggaagttttattaaaagctttaggcagccatttccctaccctcatataccatggcgtgttttaagctccccattacagtttgtcaacaaatagcatcagtgatggctgagttctgggggaaaataagacagattcgagagtaatgcattggaaggcttgggagcatctaagtaaaccaaaatctgagggaggtctaggatttaaagacatagaagcgttcaacatagccatgctagggaagcaactatggaggataatcaccaatacagactccttgtttggtcgaatctacaagagtagatatttcagcaaatctgatcccttacaaggtcatcttggatctaaaccgtcttttgcatggaagagcatacatgcagctcaagatttattaagaaacggtataagagttgtgattggtaatggatagtccacaaatatttggcaaaattaatggctcccagcaaaaccggctaagggtgtgcaagtggtgaattggaacagtccacaagttcctaatctgattcaatctctaaggtatgttaaagaccttctattagccaatggaagagaatgtaatatgaacttactacatacttgcttccctgaggaagtggttcagcaaattgtaaaacttagacaaggaggcaatacctcaaaggttagttttgcttgggattactctaatgatggtttgtatacggtgaagtatggatattgggttaccatggaagttattaagtgtcagcacactcctcaagaagtggtacaacctagcataaccccgatattcccacaagtctggaaaacagattctcctccaaaactacaacactttctatggagatgtgtgagcaactgtatttcagtggcaggaaacttatcctacaggcacttagcaagagacggatcatgtatcttatgtctagctcatgtaaagacatttaaacatctactttttaagtgtgctttttctcggctcatatgggctattttcgtcattccagcttcacatggaggtgagtggacagattctatctaccaaaatatttactgtataatgaatgtaaatctggtgcacccccatttggataatgaagagaaaataggcccatggcttttatggaggctgtggaaatgcaaaaatgactatttattcaaggggaaagactacacaacgcaagaggtagtgagacgagcaaatgaggaggcagaggaatgttgagatctaaggtcttagatgggcagtgttatccttgacccgactaaacttccgaaaagttagatattcgaaactgattctcaacaactggtgtctttgattaggggagaaacataaaattatcatttaaggccgatcattcattatatcaaacaacttcttcatgttatgaggatttgaaagttgtgtttatacatcgagaacgcaatagaatggaggatagagtagcgaaggaggctctttctattgagaatcatgtccctaggttgtactctgtaaggtcattatgggttaaagcatgtgtcgaaatagacaaaatgtaattaaatcttggttaatattaagttgaagttgcgcccaaaaaaaaaaagtaacaggactagaaacacttcgattcaaaatgtggtaggaacgctacgatgtgaaaaaatctaggccagaattttacaatccacaatgtggtagtttagacggggaagttactttgatatgtcgacaatgcttctctgcaccaatgttgattatcaactttgggattcaaaagaaataaggcgttttatctatggtgtgttgctccaaaggatagaccggttgtattcaatcgactgtagagcaatcttggcaatctaatctagtacttggaggctttagctagtcttcccgattattattcctccaaactccttggctctaactccttcttacttcttttcttcacgtttttttcttcatattttagatccaaaagcagtcatattatatataaatagagaaaacttgaaaaatatgcaaatagctttaaaatgagttaagaccaaataaaaatgccaagaacacggatatgagacgatcaaaaacgtgacagacccatgccattacgttatgctactattgctcctccttagagtaagcctcgagtataattgtacaagctgggcaagcttatgcttgcagcctacaaatctatataaatatattcggtcatcaaattatgtaaaagttttgtagtctagtggtagtgtttggtctgttttgccatcacctctcctgttctggtcttccacaaggaaaaaaaacaatctttgataaaaaaaaccttatttatctttgatgctttaattttttttaacgattttgttatacatattcatttgtatattttgtttgatgaatttttttgtaataaatatgtatatcatggtctttttaaagtcaattgtaacattataagacattgggatggcactattaatcatgattacatgtctagtgtaaagaaaagctatttaaactacatgaaatgattgaggtctgttggagctggattttcctccaggaattcatctgcgaagataccaggccagcccactaagcccaccaagcccaccaagtagaggacctgcgcaactgatgagcctacatacgcgaaagggtatttgggcctgataagcctgatcacctgatgaagggagataagcgagtaataacctaggaactaacatggagatattcgcggagtggacctgatatctcggaactgacctgccgaatatccaggagaatctctgtagatcccggacggagctaccacgtgcgtagacctatataaggaagcaagtaagacttggaagacacattcactcagctttacattcacacatatacttttacacttgtaatctcctttcacattgtaaaagctatgttctaatcaatacaaaagtccattcgttcttagcaatataaatctcaaagttcttgtgaagatctagccctcctttctcataatctcaattacaaatctctagtgttgatttcagaacccacatttggcgctgtctgtggggacggaaatagatcctttcaacaccgaaactaacacatcaattgtgaccaacgatcatggatcccaattcatccgattcaacgagatctggtgtaccagttcagatcccaaacgataacgtcgtggacgggcacctcccaacggatctccctctcggaatccaggttgatgttatccatgacattaatgcggagaacatctcccaaaacttgaattctgtaggatctgaccaagtcctccccccccctcacgatatatcctcctaacgcagataacccggctaaatcgtctaatcaggtccctccaatatctgccaacgagctggccgagcttcgctcaatgatcctgaacctgatcaacataggcaaaaatcaagaaattgcgcatcgcaacctcgccgcaatggtgggtcagaagagatgcgactctactcgcatggcgcaggaagtagagcgtgatactgcgggcaaggaaattcctccccgctaaaactgggattcctgcccagatccccatagatctgacaggtactgtctcctagacagatcctactccaaggactcgtctagacttcgcctcgatagaggtctcacctcctctcaaccagcaggtcgccttttttcaggcacccgtgcacaccctcgtcaaaaacccaacaatagggaatgagacacgtataacgcctacctttccaaggctaccgctcccacctgtgctaccgctaggtactcacctccgaggtacacatggacgagaaacaaacaaccgcgtccagctcccacgttcccgggaactcagcacaacaacggacctctaccgctaatccaccatccattccccggatacctggaagcgacctcctaaacggtcccgacatagatcgagtgattacgcagcacaaacaaacgcgaacatggctcaaatacattcacgaatgcatctagcagtgagcagtgagcgatgctcccgacatagatcaatcaattcgatcaaaactcatctagagcaaggcagattcctacacaaaaggtaaaagcccgatgatgggacctgatcacaagatcacattcttggaaagcaaaaccactgacctcgataaatctctcgatgacgctctcgttatccgaatcgacgtaggcaactacgaactctcccgtctaatggtcgacatgggaagcacagttgacgtactcttctacgacgccttcaaaaaaatggggcacctcgattccgagttgcaaggcagaaaaacgccacttaccgggtttgctagagatacgacttttttcctaggaaccatccagctcccaaccgtcgcacgtggagtgagacaactcacgaacttcctcttggtcgataagaaagctcctttcaacgcaatactgggaagacaatggctacatgccatgaaagccgtcccatcaacctaccaccaatgcattaaattcccctccgagaacaggatagcagtcgtatacggcagctaacgcagctcccgaaaatgctatatgggtagctacgagcatatcaaaaaagctgaccccgtggtactaatgatagaggacaaactcgcagaaatcaaaacagtcagatcctccgacccgtctcaacgtggagctcgaaaatcgctgataacgcaggtctgcatagacgaatcagattctaaatgatgcattgaggtaggtcacgacctcgacccagcaatacgagaggatctcataacctttctcaaggaaaacaaagacagctttgcctggtcaagcgcaaacctccaaggaataagcctcgagctaacctcacacgaactcaacgtcgatccgacctaccgacctataaacaagaaacgtcgcaagctaggtcctgaaagggctaaagctgtgaacgatgaggtcgaccggttactcaaaatcagatcgataagggaagtaaaatacccttactcccgcatatcgaccgattgtcgttaaaaagaaaaatgggaagttgagagtatgcattgactttaccgacctaaataaagcatgttctaaagacagtttcacactcccgcatatcgaccgattggtcgaagccactgtaggacacaaactactgtccttcattgacacattctttgggtacaactaaatacttgtgcgcctagacgaccaagaaaaaacagcttttattaccgaccgaggcatctactgttataaagtaatgccctttggtttgaaaaatgccggagctacctaccaacgattggtgaacagaatgttcgctgaccagctaggtaaaacaatggaggtctatattgacgacatgctggtcaaatcagctcacgaaaaggaccatgtcccagaatataaagaatgcttcaaaatcctaaacaaattcgaaatgaagctaaatcccgagaaatgctctttcggagtccaatcaggagaattcctcggatacccagaatataaagaggcatcgaggccaatcctaagcagattgcagccttcatcgaaatgccaccaccaaaaacggcacaggaggtccaatggctaaccggtcgtatcgccgccctcaataggttcatatctaggtccaccgacaagtgcgtccctttctatcagctcctccgaaaggagaaaaagtttgactggaatgaggactgcgaacaagcttttaaacaattgaaagcatacctgaccgaaccatccatactcgcaaaacccgaagaatgagaaccgatgtaccttctacgtcagatcctttcgtcaaaagaattatcccagtcgaaggaatagaacacccgagcatcgacctaacagtcaaacatgctaggatggaaacctcggtaacttgcaacttcacacgagtaacccgaagcaccaccgccgtagccagagctctcgcagcagctgcggaggcaagtgcaacggaagaggagctagagcttgaaaccctcgaaccgaagccctcctttctcataatctcaattaaaaatctctagtgtggattacaaatctctgggcctaccgaactacacctcgcaaattaacgcaagaaaccctgttctctctcgcctatggtctagaagtagtaatccctgtcgataccatagtaccaaaagtgagaaggaccgccagtccatctaactcggatctgaacacgcaaatgttgcaggataacatggacttcatcgatgaacgcagagatcaggcaatgatccgagttcaaaattatcaacaagctaccgctcgctactataactccaatatcgaaattcggagatttgatgtgggagagcttgttctacgaaaagcgttcacctacacgagagagtgaaacgccggaaagctaggaaccaactgggaaggtccctatcgtatcaccgaggtggtacgtgacggcgtctataagcttgaaaaaatatcaacgaagtacctgagttaagaccttggaatgccatgcatctcaagaaataccacgaataggtacttaaaaacaatcgaactacgataaggcttgatcccttggtagggtacgtaggcagctccccccaagagcagccaccacttcaatcgaactacgataaggtttgatcccctaaccgggtacgtatgcagttcccccgtgaacgctgccaccatctcaactcttccgcttgaatcatatctcttctacaaggaaagcgaacatcataacctccgtcaaagaaggatagctggctcacctaacaaatcaaccacctctcgataccaagcagatcccctctaggtgaccagacattagatcgtcgtttgctttaccttatttgtacttaacaatttcaagataagaataaaagaaaaatttgatactcaatatcatgctttgcaaaacaatcgttaccactacgatttaaaactcattcgtaatcttacgatacttaaagcccaacacccgaatgttggcggatccactttgtgatctcgcttccaaaaagtcgacagtgaaccttacccataaaaacacatcacttcgacttcatcggagctcacgtacgacaaccatatctaactccttccttcgccatcaaaacgtaacatataaaacaaggaaaaaaccaaggtttcattcgcgatccggcgataccacaagcccagcttccaaaatctggcaggtcccttgtgtgtccccacttcaacaggtccccgagataaaaccacgcaaacttacttaagtttgaacctacgaagaacatatcatatcacatccgaaataacttggatttaaaacaagtccaaatattaaccggaacatgaacaaaacgaggtgatcatacaccaaaatcgacaaagtgtcaacacgcgaacaagaaacgaaaagtacttgttaaacgagataaaagccttcccagttataaaagtacttaaccgaacaaaggataaaacccttcccaggcaccaagttcaaaaagaaacaaacaaaggatgaaagccttcccaggcactaagtcggaaacgaaaacacaaaagcttaaaacaaggaggataagtaatcactccttcggttccctggccggcgtggcgaagacagtaccaagatcctccccgagaccttccgaaaacgcatccttgttgctcccgaactcattcaagccgattggcgttccttgctcatcgacgtccatcggacgtaccaccgacatctccgacacttgcaggatatccagcttggtcagagtgaagtctgacacctcctttgatgcgcacttcgcctcgaggtcatccagctccacttgcaaccgaggtctctccacggtcagatcgatagcagccttcgtgatctggtcgatcaaagctaagtttgactccaccttggttgcttgaccttccagcacggtgaactccttttggcgacccacttctccttgatcccagctagtaacttcgaatacgcagcagccatgtcaaccctagcatcgtgaaccgccttcttcgttccctgcgcaatcaaagtaagatccaccattcttttagagagctcgtccttcttttcactcaagcgaagaatctggttcctcgatgtctgcttatctgcctccaaccccatgatctcctgctctatggccctgatcttctcagcataacctttctcgagatctttcgaagtggacaactccattttcaacctctcgatctctgcctgacaccacagccaagtcagaaccatcatatcatcaataaaagatatacaaacaaaccataactgaagcatacctggaacgaaacctcacgttcctcaccagccttcacactcgctgtcagctactagatgagggtcttcccttcttcgagctcgcttgccgagggaaccttgctcagatgttgctcatagagagcaaccaacttgttcgtaatagctatcgcctgccaaagacaaaacagcaattagaactgacataagaatggaatcagaaggaggcagttatcgattattaccttgccctcgttcgccatcatgtcagcataagccgccgccttggccatgttcttcacatcgggaacctagcagttcctccctttgatgtggcgaagcagattcgccaacccagcctcgtcttcgacgatcggatgatcacggtcgtgagtgtaagaccaatggaagggcctgcttcccgctgaccctccaccagaattggacttctacctcacttcttgagaccggttcaaaccttgaaaggaagacctgccccaacctcttgatcctcggcctctgccttgggacctaccagatgaccgcctgtctgcggacacagctgcctccgggttagctgccgcaggtgcaccatcagcacgaacagctcagctgccgggcgcacctccggtaggatccgagctctcttcggagaagtcagtgcaccatcagcacgaacagctccagatggctcagagacctgagcgacctgattgttatctgcccgatccgctgcagcagaggtcccgatattaatctcagggagtgaaggatgagaggccgaggcaaatttgctggaaacatttagactgttttgagttgcggtcactgcggccgacataaagaagccatcatcaccacggttttcgagattgcagagatctcttcccagcgtctgatctgggccgtcagatgtggtgccctgaagagacgctccatctcagccgtccatgtcaacagcgacttatcttgcgtatctactcaatatctttcggttcaggaacctgaaattaaatcgtttttatttagtttatcctcaaaaccgactgatcttatcatatctatcacctcatctaaaatattttcgcaatcttaccagactaagatgtccgcgcatccagttcgcctactcattcaatgggcttgggggtaaatgttggagttggatttccctccaagaatccacctgcgaagataccaagccagcccactaaacccaccaagcccaccaagtagaggacctgcgcaactgatgagcccacatacgcgaaagggtatttgggcctgataagcctgatcacctgatgaagggagataagcgagtaacaacctaggaactaacagggagatattcgaggagcggacctgatatctcggaactgacctgccgaatatccaggagaatctccgtagatcccagacggagctaccacgtgcgtaaacctatataaggaagcaaggacgacttggaagacacattcactcagcttttcattcacacttatacttttacatttgtaatctcctttcacattgtaaaagctctgttctaatcaatacaaaagtccattcgttcttagcaatataaatcttaaagttcttgtgaagatctagccctcctttctcatagtctcaattacaaatctctagtgtggatttcagaacccacaagatctttagtaggacggtgtatgtttcgaattaatagaatatcaccagacaataaacattcctagttcatcccgctcaatgttcttgctattagtatttgctatgacttaattaatatatatcatgagttatataaagactagataaggctcacctaaaaagacgtgtgtaagatataaattttattgttagtatttgaattttgatatttaactttataatattatgcattctattttataataatttttattatatactttaattctatatacttaatattattgatgatatttcaattctaaataataactcacacactgtttctatattttatttagtaattaatacaaattttcatcttacacatttaattgtacaatacagcttaactatttatttaatcatagtaaactcgatattaactctacacactttatcttaagtgataacaatttcatatcataattatatctgatcaaatctatatcttagttattactaaaaataattaacaactaagaaaatataattgataaagataaacagaaaaattcacaaattaaaatatgtggaaaaacatgttcaaaatctatactttatatattgtgtaatctcgtatactaacttctcattaagtttttgaaaagttaatcatataaacaattttcccaaataatttatgttttcacttattactacatgatttaaattcaaggaataaaacattagtataagtttgcattatcacatcaaagtatgtgatcccttccatcatatgatgcattaaatttgatagaatagaacataagtatccaaaaaattatttcttataagctcattaagttttttttttgtgtgttttagcttaacgaatcaaaacactatattacaatgaaagatacaattttatccaactaaattaatattaaaaaaaatattttttattttaaacttctatggccttttaaatagctattattcatactaaatgattttaaaaaaaattaatacatgctaaatttaattgaccaataacacatataaaaacaaatttgtgaattttctttttggttaaaacaaaaattagatatagacataaattagtatatgtaaatttgctttttcttttttttttttatttcttcaagggaaaataacaaagtttaaaaaatttctgatagatgtcattatctgattgatagacttgtcatgtgacacaatcttatgagttattaactttgaaaaccctactttatataataagatttatttatatttctttttagtgtttttttttcgtaccctgtttgaaatgtgatgtgggtgagggtgtaggaaagtaaaattgtattgagagaagtcgtgtacgtggatctcactcgcggtgatttttctctcaactttgttcttcttctgatcacaatttcctacaccggtggtcggattctccatcgattccagcgatgatgagggcccaaaggctcatggttcttcatctgtaacttgtaacatctctccggcaaagcaatctgaccataatcaagggagttgtggatggagaagtgtctgcccgactccgacgctaagagctccaccatcgatgtagcgatgcggagtggaagacggaaatctaagtgagatctgagagaggcaaacagttagaattaggaccataaattctgaaggtttcacgggatctctgtcgatgggggaggtatattcagatctggtgaagctatgtcaacgtcgaaggtctttttttctactccctactgtttctctctctcacggccgagcattaatctcctcgtcaaaggcaagatcggatctcttcctccttcttaaaacgactctacggtggcgagatgacaacagatcttggatcaccatcttgttcggctcgcgtcgtccagactcaccagatatcttgttctggcgagaatctacagtattggacggtggcttcgttcaagttctttgagtggagatgtggtgtgggtgtaaatgaatattctcccatgacaaacaaaataaatttaaagataagagtaccatttaaaaaaaaaaattagagaaggtaatagtgtttttatttttgattacccacacatatataagtagctacatccattttcgcaaaacgaaacgaaaacaatttatactcaagatctacgtaggcttcaagttatgaaacatagcatcccatcgtgtgtcatcatcccttttattgtactccacatacacacttgggcttggtggtcttcctttcaacggccctgataatctcaatcgttcgtttaagtttccatctaactgtcccgacacaatagggcttctataagctaaaatgagtctttcttggacacttctatccaacggtccagataggttcatgcttcggttgcttactaacgtcattttctcttgtattccatggtttcgatccaacggtccagatttcacaatccttttcctctttatcacaggtaatctctccacttgtaccacagctttttcagcattgactttattgttattacctgaaagttgttaactaattttgtcaacaaaaacgttttaactaacaccacttcaactacaaaccctaattatccaaacattactttaaaaaaaaaagtacttatggatttacaaaacttagacttcttacgtcattcataaatgcaattttgttattgtacaagaacatattagttttgttgtaattaaatatctataaagaaaatcgggttgcaataagtagtgattaggtgcattattatcttgacctaccagtcaaaaaggctccggtacggtaggcaggcggcggcgactgcttctccttgagcggttcaactacggcggttcctccgagagaaagccacttgtttaagcgattgccgacacttttggttgccttgatgacgacagatatgagtttggccgagacaggacgatggttataggagctgagtgcttgtgtttctctctttgagagtttgagaatctctacgcggtgtttggtcacagtaacaccaagtcgccggagaaagttgtggttgaaaagggcgatgtcttcaccctggagcttcttttgggcgaatatgagtccgtactcgtagcttagggtcggatcaaggtcggttttagacagccatgagaaccaatccatcgtgtgtgtgtgtgtgtgtgtatctgatgttctgtgagtttggaggacatttgtatatatatgtgtgtttgcgcaatttatgggttatcttttggactaaatgaatttacgggtgcatacatatacatacatgaacatttttctaacctttaaataacacttaaattgataacattttagatttgttttggtcccctctaagaaaaaaaaaaaattacaaatcgtccaaaagtatctgtagttttgattagtttctggaaaagaagaattatgaggttatttttattttgtatatgagggacacacataagggacaaataaaggagtaacgaaaaatacggctttaggctttctatatttctaaagcaataatgtagtggttgtgacttagagagatttctttttcaaccactccattttcttaagttctcggaaaacgaacatgtaatatgggatgaattgacatcacagtttaaaattatagtagtaatttcttcctttaaacagagtgcaaaaaaacggaccttacaccaaaacaataatgcaaaagagtaagaagcctaattacatacaacattgtattggttttcttttggtattgagcatggtgccgaatttagttcatattaaagattttctccatgttgttattgaataattttagcattatttttttttataaactctatcggctgatccggttattttcggtagaaacgcaccgaaatacttcagagtggacttctttccgaagtaccaccacactatttgtcccgagtttggaatgttttccgactaatgccagaggatagtcaggccacctgtatttctgactaccaggtaaaccaattgggtcaagacccaactgacagacttcccaaacaaatgtgatttttgttttcagagaggactgaactcgggtctgagaatttcacccttttctaatcaagtagttccatactttccaacttataatgaattttgaccgagaaccaaattatgcaaatcatttgcttccgtcatcaaaattatgattcaatatatttgtttctcttccaaaaaattctctaagatcaacggattaaacaacttcttttgtaaggtacaagcgagaattcataatatagtaaaataacgaaaaaaaaaatcatgttatttggtacttttcgcaattaacggaccgcaagtttttatattggttccatttaaacataaatcctgaaagactttctatccagctcttaaaaaactaactataacccataaaacatggaccacaatgtataactaatcaacaaattaatttggtagagcagatgcacagtagtcaatgctccactccccaatttattggccgaaagtgatccattaaagtggtagccccaagttgtggtacctgtctttaacccaacctctacctatatgcctctctcctctctttctcgttgtcttcagcttcacttgatttggtgaatatgcttcgttttagtctctgtctttcacatgcttatcttgttatgggttctctgtatgggtgggcataataacgtttcctggaaagaaaaaaaaaacaaactgaattgtaactaggtgatttggttcagttttggttctcttgaaaatccatttggttatctttactaaaaataattcagtttcgattgacatggtttagagcagttcattttttgagattagtgggctttcaggcccaatgttagtgagataagagattttagtacgtctcacatttggtattcgcttctgttatttttttgggttttagattttaagaactatataactaccaaaatatttttgttaagatcgggttctttcagttttggagtttatgattcattcggatattatcggatatgtttggatattttaggtatttttggattttttttctgggtattgttttgatactctggggatttttggttattcggtttaaaaaactaatattattgtttagagtaagttggaaatatattcacttttcaaaatataattgtgaacgtagtaacttcactattcaatattagagaaagaggtcattttgctttttgtgtaataggcggatatctaatagcagttcgtgtggggcagggaataatttttggaaattaccagagagggcttttagattcaatatctctatctctatttctttattatatatatttttttctttctttttaacaacccctccaatctaataattgaaatgcttatcaatataactttaatttctaaactaattcatatacataaaattttatgtatttttctctataattttatatgcattttattaataattttaatatattacatacattttatcagtagtcgatacaattaattaacttttattttgtacgccgcactgctgtactgagtatacaatatacatgtttttgcgcgtatatggctaaacgattttaatttgtacattgcactggctatgtagagtatacaatatacatgtttgtacaaagtatacaatataattgggaaagtagtcactttactattcacaatttgcaaagtagtcactttttcactgttgattcgtacacttttagtgtatagatgtatgtaaatatacacagcgtacacttatatttgtacactaaaaatattgtacagattcaagtgtacgaatcaaatagtaaaaaatgactactttgcaaattgtgaattgtgatttataacaaaacctattaaacaataagtcaataatcattacgctaatattcacaatcatatataaaaaggatataaaaacatatgcatacttaagaaaagtgaggagtacgtatgatattgataataagacattaatatcagatgttctatcggagcaatggacaaaaaatacgactcagaggatagtgaggaaaataagataaacattttcggagtaattaagttaatgtttaaaattaggataaattagaaaaagtataacatctttttaataaatgcattcattcgccatataacatccaactgtaaaaagggaaaaacaatcttgcaatttactatttccttcagattatagtcaaagaaaataaagagaatcgttcttaactaattacatttgataaactagtgtgatattatttattgtttacacagattttaacataaaatttctctttcaaaatttaatcaaaactttaaaatagatcttacgaaattttaatgcttttaaattgaaattatttatacggataagatgtatttttttaatgagtcaaattacttaaccctcaatctattgattgataggttatcttagaatggtggatatggacctattaaccaatcaaaaatcaagctcgcatttagaattttcgtctggttgcttgcatatttacgtatatattgaatttggttaatgtcgtagaccatactttcttattaccttgttagtagccaatatcactaccggatatgtattatataaatattttatcattttatgggttagatcgaccgatgatggactctatttaaactgtatatcgttcgactaaaattatttaaaactttaacttgttgtaaaacagttttttgtaaatataattttatatttatacactaaaaatgtcttaagcaattgacttcgatgtcttcaaggacaaaattataaatattcaaaaaattaactaaaataacctgtttcgtatggaaaaacttgatggatcagtaatatattgaggtagtagatttcaatatttcttgtggtgtatattcttcttttaagatttaattaagattaccagaaaattgctcgagtttgaacaaaataacatagtgttggtatttttttgtattatgctttgagtctcttatacataatatcaaaaaacaatatgaaaacttgttacattattgatatagcaatacatatattggattatattattttgtcaaacaacaacatacgtctttcgaaccgtcattaatacatttaccgtatagtaaaccgcttttagctacacaaaacctctcgcattcgtcattacctcccttacgacatggatctggtgtataacattgtttatactcttgctttattccaaaacctattttaaaataacaatttaacaaatacacgttcataaaaagagtaaaccaagtctatgatttaaaaaatggagtgtgtgtgaataaactagtaccttgggtatcatcagaacaatgaacagaagatatgacaaagaggatagtgagaacaaatgggagaagaattttcttggtgatagccatttttatgatattatcttttgatgtttaggtttatgtagtactttagatgggaacaaatatatatagtattccaaatatatataaaaggtattatttttagtcaagattgcaattaaaagataataaagatggtgattttattacttaatatacaataaaatctctataaattaataatgttgggaccatattattatttttaatttgtatttatattaatttctatttaataatttataatgaaaattaaaaatttgttgtaactgttaattgtttttaaaaatatgaggaaacaatatatttaagatgagtaaaacaatgtgatctaaataaaattatggtgtggatgttatagattttatagttttagacttaaacatttaatatattgaagagaaaaccatttgtttcttacaatgaataacaaatatagaattcacacacacacatatatatatatatatatgtatataagaaaaagcgatatatatatatattcaaatttataaatagtgacatccattgttgtatctgaatgatctatacgactattaaaaaaaaagcatatttaaatgagaaaaatgtcaaaaaatcacgaactttcaaatttaggacgatttagtcttgaacttcacggaaggcaaataaatcgtaaagtttttgttgacttcgaaataaatgacaaagtttttgttgacttgtcatttaagtcatgtcattagatcggttaacataattttttacggcgttaatgtctcatttatctcctctgttagaacaaaacaatgttgtttattgcggctcgttttgtttgttgaaataaatttaaaccctaaatccccaaatcgacttcaatatctgcgagtttgaggtcaatgtgggtctgtgattttgagataacgaaatcgatttggggaacgccgtaaaaaaaatctgttaacctatttaacgatatgagtcaaatggcaagtaaacaaaaactttgtcatttatttcgaaagccaagaaaaactttacgatttatttgtcttccgtgaagttcaagattaaatcgtcccaaatttgaaagttcgtgatctttttgacatttttccatatttaaatggcttggaatggcttttttagtgggccatagtttttttagcaatttcgaatgggttggggtggtataaaacaattttgattttaatcgttagaaactgttacgtttgtggatggttgtggtagaatcaatcaagctttaacactacgtaggaattttgaatacatatcacagcgctataagcaaataaatattttcacaagattgatagcgggtctgatcatagtaacaatgaaaacaaagacgaaaccagagttaaaaagagaagaagactaatgaccttaatacccaaagacgtaaccgaatctcacctgcctgatagtcgttgctcaataatttattgtttacacatagtttaacataaaattgttcttaagaaatttaataaaattgtagacactattcctcctaattgggtaaccaatcatagagatattattttttaattaatgtgtggttgaaaaaaaaaaaagaaatttaataaaaaaaactttaaaatagatcttacgaaagttgtatgcttttaaattgaaattatttatagggctaagatgtattgttttttatataggtaaattacttagccctcaatctattaattgataggttgtcttagaaaggtggatatggacctattcaacaatcaaatcaagctcgcatttagatgtttcgtctaatcgcttgcatatttacgtatatattggatttggttaatgtcgtagaccatactttcttattacgttgttgaaacaacccgcttcaatttttttaaatcataattaaatatttccataaatacttaattaaatcaaccaataaaacaacgctaactcgcaagttaaaaatactatcctaacatgaataaataaataatttgacgaacaaaaccaagaatgactaacaatcctaacacgaacctaaccgggttccaataactaaaataaaaaaaaagaaatacaaccaaacgagttcctaaatcatcctctcttcctagctaggatgccatgatcacactttatctttacctacactataaagaaagaaatgcgtaagtattatcataaatacctagtgagtcgatactcccatctacggctatacacacaagcaataaacggtataactacaaaataaaatatataaaaaacccagtcattgaacagttcacccaaaaacacattcaccatacctacatatcatcacacaaaacaagtcatataacccaatcgcatagataagctcatggtcacgcactcaccttaacaagctgattataacaacaattataactaggagagactctccttgcgtctgaaacagtccagaaacgtcctacaacaagtcacacaaccaaaagcaaccttgaagcaatctggacataaaaatcaaaaacaaacagtgtcaaagacgaaaccctaaaatagaaactaattgttaactatcaaatccctccgatgaaacgctatccttagacgtcacaaagcttcccacaaactcttgtgccgatcagaaaccagacaagaccacgatctcagttacaatccccactggtcctaactcgcgtctgagaaaatgtgtctcacgaaactgcgaataactcaacgagtttaaatccaaatccacttctgtacaatggagaatgacgatgaatgacttgggaataactctactaaatttcgttacctttgacaacgatttgatatgtcctaatttcgagttttggtgcttaaatgtttcctcccaaaccctaacgattctggtccttctccatctctcactttttataagcgcactatagggtttccattaacccaaccgattaaaccgtgcaatttaaatacaaaccataaccgattttccggttcacgggcgttacaattctctcctactgacatagattcgtcctcgaatctagcttcacccttccactccgaagaactccatgcaaccgtcactatggtccgcactccctccaactcgacccctctaggtctctctatcgagtcgatatactcacgatttactagtcattgttgctcacaactctatctccactctcagactgcagtctgcaagcataaaccatcactctcaggcctcggcctacggtatctcgggtatcacacgtattatcttccccactcaaagtcaaaccctgagttgtgccggctcactctcagccacaaagtcatcgagttacgacacttggagaaaatgatacctcaaaactcgctctcgggtcgtcaccctaagcgcgctctcagatcgtcccccgaagccacagtacccctcgcactctaaagacaccaagtccctcgagttaccggtacctcaggagcataccacgctcctcacgagtcgttgggaccctcatgtccctcgagcaaacaatactaaacgcttccgagcatatctccagactctctcatggattcgcgtatgacacctttatgcctcaccatccatcatatccactcgggaatatccttatgaccaactcccagccatctcgtaaacacacatctctcataggttgtttactcaaactttccaaaaatagacatgtcctttcttggaaacattctatttttagaaaccgtataacacattcttaaataagacaactcaagtcaaacccaagaaaaatactcatcttattaatcatcaactgtcatgatcgttacaactccaaacgaaaatacaaatgaaagagaaataagaacaacaacttaaaagctcaaaaactcaacaactctgaaactggaaaccaaggataggcaaactcaagcagtaacctgcttctcgaacagatctcacatgagtcgatatgaaggtcatgaaggctttgcaaacaccacaaaacacaatgcaattccgccgagattctattcaccattgggaggcatcacctacatgattcaaaataattattgtatatcaatatatgttatgtttggcaagcatgtggatcttggatccaacccctagaatttgtaataaaatatgggactatgaagaacaaaagtaccaaaatgtttgtgattatctttagctttagcgtactagaaatataaaacactgaattattgatttgaattcccaaatattttgtctctttctaatgcccaaggactctaaatttctacaaactaaatatcaaaatggctaataaatgtaattgttccttataaatgtgtctgttttgactgcgtaatatgtgttgcagtgttcaaattcgattccttcttgggttttcgtataggcttttcccttaagactcacaatggcccagcttgtttacttcagatgttcggcctttcccgagttcctggccagactcttcaagctccctcgttgatgactcagatcaccactgcgggccctcacattatgacatggttgtttcctcatggatcccgtactctcggttcaagacatgtatcaacaaagtctcttttttttgtcaacatatattatttagcactcaaacaagccaatctagagggaagttgtttacataagtgatatgaagcggttcagcacgaacttttcgtgccaaagtatccgccttgacatttgcattacgaaaaattaaagataaagaaaaagaagtgaactcttccttgtcgctctgaaactcctccaaatatgctgaaaatgctggtcattcggttggagaagacaccatcttcaccaggtctgaacagtctgttaaaaaaactactttttggttgtcggcaccaatcatacacttcattgcccagagtaaagcttcgacttcggtatggagaggagaaagacttctacgtagattagcagctcccattgttgacgtccctccattaaatgaagtacaaagccaacctagacctgaaaaattgtcgctttctttccatgaaccgtacacaaaacaacgaaagccagagtacacaatgtcttgtgagatatccctcacccaaagttggttttccgatcgataggtgacttggttttcagtattgagctctacttgagctaactgccataaatgagcctcttttctgctagacataacacgcctagctttttcttatccacattttcaaacactttttcatttcgtgctttccaaatataccaaattatccatggatatgcggatgaatcaacttctgaagggattcttgagaataaatgatctaaatttgcataaattgaataagtgggaaaacccctgggaccgtaggaatctttgaaagagcccatatttgtcgtgccggatgacactgaaaaagagtatggtttattgtttcctctatagtgccacatctgacacatcctgaatcacaatttattcatcttttctgtaaatgttttgttactggcacgcagcctgctaatatttgctataaaaaatggtggaacataggcgggcattgcactttccacacttgggctttcagagctttgatctttgggccaatgaaagaggagttatttcccaagatttccatctgtgttgtatggtagccggatttaactgtatagattccagtttttgtgaaatgccaacccggggaatcctcccttgtcgacgcacccaagtgcaatgcacttattatctggacatcttccgggtcaaagagctctttcacgagatcaatgttccaaaaatttgaccggctatctatcagattttgaacttttaaagatgggtcaatagttaaaccattactatttgctggtctcgggtattgagctgggatctacagatcctcccaaacggagatggaagcctctgaaccgactcttttaataagtcctttacaaaccagagatctagctgagcaaatacttctccagccataagatggagagtatgattttatattttccagaggattggatttcctaaaatatctccctttaaaaacctttgcaaagagagaatccggaaacgaaactagacgccataactgtttcgctaataaagccggagttaaaatcatctacattccgaaaacctaagccaccttccgatttactactacacagtttgttccaagccatccagtgcatacctctagattcaccattcgagctccaccaaaatcttgcgaccgcacttattagtttggaagtaattgtatgtatcaacaaagtccatcaacaagttttagatataggtaaaagaaaaaataactgaaatttagaagaaacaataatcaaagactcttaacaaaactgtgcacttccatacccaaacaattaaatatgtattctttttccaaccaaaagttattaggtattaaatgtccatataaaaaaaatagttggggcttttttggagaattttttaatgttatacaattttttattttttattttaaaaatcatggaataaaccaaaaaaattgaaactgaactgaactgaaccgaattacataagttttttatatagtttcaggctttataaaccgattaaccaaactatgactaaaccttaaaccagaatattagagaaataatctgaatgaattaatcttctcattaatcacaaaatgatacaaaagagtttatatagataagactaaaccactaatataattacagtaaaccggataaagaaaaccggattacataatctaaaacctcccctcaagatggagcttcttagagattgaaaagacccatcttggacatgagagtatgaaagtgagtaggatatagtggctttgtcaatgtatctgccaattgatgttctgaacgcacatgcattgtcttgagggaaccatcttcgaccttgtctctaacaatgtggcaatcgttttccacatgtttggtttgctcatggaagacaaaattcttcgcaatgtgaagagctgcctcattgtcacagtagagaagagctgtgataggttcccgaatgccaagatctttcatgatctttgctatccaaatgagttcctttgtaccaacatacatggctctgtactctgagctgaactactggaacaaacatcatgtttctttgacctccaagttaccaaggaatcaccaatatacatgcaaaaaccagtgactaatcttcgtgattcaggacaagtattccagtcagcatcagtgaatcctcttaaagtaagatccggatcagaagagtaaaacaagccattgccaacagtacctttgatatacctcaacaccttatataatgcttgaagatgaacctctcttggagcagaagagaattgacataacttgcccacaacaaaagagatgccaggtcgtgttatgcaaagatacagtagcttaccaatcagctttctgtagagtttaggatctggaataagaggagtgtcatctttgtgtaaggaatgattgggctccattggaatagaagacggtttgcagccaagaaaacctgtttccaccaacaattccaaagcatatttcctttgacaaagagaaataccttttgatgttctggctatctctattccaagaaagtattgaggagcaccaatattcctaagcttaaaagctttctcaagttgagtaatcagaataggaaccacactttcacaactgcttgctattatgatgtcatcaacatacaccacaatgacaacaaaaattccatcttctagccgtgtaaaaagagtgtgatcactatgagttgtctaaacctcagtgcacgaagagtaccttttaacttgagaaaccactgtcgcgaagcctgctttaaaccataaatcgatttctgcagtttacacacaaatctgccctgagacgcatcaatatcaggaacttcataaccagggggtaattccatgtagatttcttcatccaattccccattcaagaaagcatttgacacatccagttgattaagatgccaattcaacttagctgcaaaagccaaaagaatcttcacaatggccatcttagctactggagaaaaagtatcaacaaaattgatgccttcttcttgtgtgtaaccttttgctaccaacctagccttatatctctcaatggaaccatctgcattatgtttaattttgaaaacatatttacaaccaatagccttcttaccagatggtagaggacaaaccaaccaagtaccagtctgttccatagctttcaactcttcaccaatagcatcacaccactctttcagttttatagcctcagaatatttacggagttcaagagtaagtgaaatattattaattaaaaagctgaaagaaaagctaagtttaatataagagatatagttagagataggataaggagtagaaaatgaagtattatatatgtagtaatcctgcaaatgagctgggagtttggtaggtcgtcgagaatctaatgccaaaggcaaagaattctcagaagatatcacatcagtatgaggaggtgtatctagagatgagtttacagagtgcaaatatgaatcatcaggatttgcaggagaaggaatgtgaggaaagaaagttcgtgtgccttctgtcaatgtagaagacacaaacgggaaaaaatcctcatgaaaagtgacatgcctagaaattgaaatggcattgatctccaaatctaagactttgtaacctttataacctgagggatatcctaaaaagacacaagctttagctctagggtcaaacttagttctttgttttggtgaggttgaaacataacaaaagcatccaaaggttctaagttgactataatcaggctctaaattggtcagaatctgataaggagtcttattatctagaaccggagttgttaacctattgattaagaacactgtagtcaagacacattccccccaataagctaaaggtatcttagattgaaacagtaaggctctagctacatttaagatatgtagatgcttacgttccacaacagaattttgttgtggggtttcaggacaggaataataggttttaattcccttagctagataaagttttgtaaattttaattcaggagcattgtcagacctaactgccttaactttcacattaaactgattttcaaccatttgcaggaaaccagggaaaacatgcaagacattagatttagacttcatcaaataaatccaagttgccctactatgatcatctactattgttaaaaaatatctatatccatcatgagttatttcagagaaaggatcccaagtatcaatgtgaagtaaatcaaagactgaagcacatttattttgattagaattaaaaggcaaatgtttttgtttagctaaaggacaaatgtaacaatgatgacttttatttttcttattagttttaggaattttaagtacatcagaaagcatatcaattctagactgagatggatgtcctagacgagtatgccacaaatttgcattaacaacagaaacagactaacatgatggtgtaatagaagaatcaatgctaccttgaatttcaaaagtgacatgattagtatcagattggagaatgtaaagattcgacacttcactacccttcccaagcatcaattcatgagtaagatcctaaatgaaacaagaagtggaagtgaaactgacaatgaatccttttttttttgttaacatgctgacactaagtaaattgaaacgaaattcaggtataaacaacacatcatgtaataaaatgctttgactaagctgcacagaacttattccaacaatgctcactatgtttccattacgtaagttgacaaaggtattgactagtgctaggaaatctaagaacctatctctattgtttgacacatgatgagtggctcccgaatctataaccaaagaactagtagagataccaatttcagatttggaagaagtaagcatgtgataataggtagagggataaagtgacagaaatgtaccagatatcggtttgatatttggcacggaagtagaagtagaagcttgggaaattgcaagagtaggagtgatgctagaagtgcgaagctgtcaactatagtaagaaataatatcttgaagctgatccatactcaaatctttcccaaggagatctgaagctttacatactgaagtagtaatgcttgaagaatccagagatgtgacatttgtactcggagtggtgatgatgaaaaggacttcttcttccctgtccatccaggtggataaccatgaagtctataacacctttctttaagatgaccaatagctccataatgagtacaaacatgacgaggtctctgttgaaaattagttgcattaacacttccttcacaaactgaagcaggattagacgcagagacttgaaatgcagagggagatggagatgcaccaacaaaacttttagttgcagagttcacatttcgctggctttgatcttgatctagcatgttgtagatttcactcagacttggtctattcttcttgttgattatctgaccacgaacattagcataagattcattcaatcccataagaaactgtataactctgctagtgtcagtatcctctaacaattcttcaaccttcccaccattgcatttgcatctcttctgtgactttgtactggctaacttctgccataaggtcttcatcttagtataatatgttgataaatccaaagctccttgacgtaatgaccgtatgtcctgttccaattgatactttctcggcaaattactgatatgaaatctctttatcaaatcaatccaaacttcagctgcatcattgaagtacaatatactatcatagatctcttgattaaccacattaagaagccaatatttgaccatactattgcaacgattccagattttgtgtataggttctgattcagcaggtctaggcaaagatccatcaataaaactccatttgttttttgattccaaagcaatcgtcatcgcaacactccagctattgtaattagatccatcgaggttgtgagaaacaagagataaacatggatgatcaccggggtgtaagaagaaaggactgtgagagttgtcgaaggattcaagtccagaggagattctttcaactgagtcacgagtaatgtagcttccgaaagttattcgatcatctgcaacagctctagaatgtcatggatttggagattgagctcgtttcgaagcgatcggagaagtcggaggtgttgaagcagatcgagctcgcgttctcattcctttcttcgccattgagaatgagaatcgaaccgatgagagaaagagaagaatgcggaagaattcgatcgagagatgaccggagaagagaagatcgcacaccgtacaagtcaccggagaaagtttgttacggagtggctctgataccatattagagaaataatctgaatgaattaatcttctcattaatcataaaatgatacaaaagtgtttatatacataagactaaaccaaagtaaaccactaatataattacagtaaaccggataaaagaaaccggattacataatctaaaacagaatgcctacccattctctatatttaaattgcttaaataagaagagagacagtttaggttcaaaattcggtaagctatcccaaatagaagcttttatttcttacatgtgtttcatagttgtgacaatattccaatttggtactttcgcttcggttattgcccatgattatgtcttcgcgtagtattcgagaactatatgattcacgtcttgattttacaaatacattaaggtttccaagtatcttgaattttttggtattcttaaaaagattcatatgaaataaatgttccagcaaaaaagggaaataagttgtgctaaaaccgattgaagaattatgtgatggcagaatatgcacaaaatcatactcataaatactctcttcacctaaaactctttctacataactagtaatgttaatatgggcatgcccaccccatttaggtccgtcccatttaaagcctgacccatttaaaatccaccctatttaaacccatttaacttgaaggtctattagggttgcccatttaaactcatataccaatttagacccatgtattcattctcaaaaaaatcaaaatagagagctactcctgttgttcttatagcacctttgatctcattgaatgacttaagcgacattaactttttgtgtgagacttatttttgcataaaacatacatacatacataaataggctaacagggccccacgtcttaaatggtctaatttgggtttcttttatttcactatttgaactaaatgagtttaaatgggcatttgttctgatttaaatgtccagttaaaacccaaattaacatcactatacataaccaaggcaattaatttacaaaatacactaaacaaaagacgtcaaagtaatgatcccattatctgttatttcatatttcgatatttgttatgatgtaatcaaaatactaactccagtttaatcaagctaattttaattagtaggggttgtgtatttcaatctcgatctctttttattgattgatggtcaaaaccaatgaatcaaatgatgttatttgtcaaccggatacatatctgtgattagattatttcgtcttagacttacaacaacatttgttggtagcagtatcacatttaccatataataaaaagcttttagctccacaaaacctctcgcatgcggcatcgtccactttgggtttttgacaatcagctaggtcgtagcattttgcatactcttgatttataccaacacctattaaacaagaatcattaagccaatattcacaatcatggaaaggatacaaaaacatatgcatatttaaacaaaaaaggtgagtagtatgataataagctaataccagaagttctatcggagcaatgaacaaaagatacggctaagaggatagtgaggacaaatgtggttaacattttcttgctgatagccattttgtttctatgattttttgcttctatttttattttgagttttgtaatagactgatcttcgctttgtttttctcatgtactacatatgtttatatatatgataacaccaacatacctaaagatatttattttttgtaaaagagaaacaaatcttgatatttaatttccttgatttctataatcaaaagaaaataaagagattgattttcttacctaatataattacgtttgaatgtatatatgatacacttgtctaatgtgatatatttttttacatattgttaaaacataaagttgtttttccaaaatctagtaaaaaaaactttaaaatagtccttactaatgttaaggttctataaattgaaccctaccaaaaaaaggttctataaattgaaattaattttaaggataagatgtaaataacctcctaagtatatcatatttagttgatatataattccaagaactatatttagttaatatttaaaattaggataaactgaaaaattatttaaattatattaaatgcattccttcgttacagaactatccaattcttccaaaaaaaaaaggccaaaaaaatcttgcaatttatttcattatattgtctaaggccaaaatcccggaaaggatccccttgtagtcaactatgaaatgaaaccaatatcataaatcatcatataatctagagatagctatgtctaatatgtaataagcgtatgaaacgtccaaacgaaaatgataagattcatcatttatcgaaatcatataagtaacaaataatattgatacaatcacactctaataatctatgagaaatactatattctcatcgcaatgtttggcagtatataaaaatagttccgtggggttcacggttcattattacacaaaccctaatatgtttctatctcaacttactcaaagagatatcttctctttcaatcatcagtagaagactttaaatctggtttgttgggcaatctccggccattcataaagctactgaacatgtgcagagctcgtgagggctccgcatacggcaccatatgagccgctcctctcaccgttgcaaaggtcagtagattcccatactctgtgacccagccaccaaccttagttacaatcccaacatccacaagttagcaatcacaattaacttagttagaattgttttgatggtgtagggaaactacctgttctttgtggaaccaagctccatagggaatagtggtcttgaagttgagatcctcagcaagttctcgtacgagtgttcttgaactttgaagtggaattacagaatcttgatctccactacaattttaacaagctgagagttaagctgcatagtacaagaaaagaagatctttaatagaaatcttacctgaagatccaaacaggagtttggttctgaataattctcttaagactcggaagcatgtcaatgtacccgtctatgccactgtagtttaaccggctgtgacatagtgaaaagtgaaaagccaatatcaatcagtcagcttcattttttggtgatcaacaaaatgaaaagtgggtcaaacaacttacttgctgcacatagtccattcataaggtaggcgagtgcggttagcgtgaagcgcattctgtaccttggggagattgaaatagaaacttctttcatatgttatacaaacatcaactaccatgctaatcttggtaacctaaaaccattttcacaaatttacacaaatgtttttctgttggaaagaaaaaggtggataagtgctaaccattttcttgagccttagctcttgctgaacaatagaagggtaacatacatcgaggagaatgtgatagctgttgatatactcagtgaggacgctggattcaacgattgcatatatacaagcattgctcatgttctttggattggcaaagtcacattggttcatgattgtgagtcttacttcatcagagatcatcccatgtgaccagaagtactcgtatgcagctgcaaagtccctgtcaagcttcagaagtggattcccaatctgatcagaaacacacaaaaaatattatggcccaaaagttttaaagcaaaagcttccttttcacccaagtctctcttagagaattaggttaattgttggagcttagtttttttattaatcaattgagaacccttatataggtattcatcatacaacttagacataacgctaatgcataaaataaaacactttaacgtttaaaggaaattatgaaaacccaaatcataatctacctaaccatagtctcgtatcaaaaaaaaaaacacaaaaaaaaatcagaagagagccaaaagagttgatgaaactttaagaagaaggttcttttgcttactgcaatgcctttgacgttaaatttgaacccacttgagcgtgaattgtagctgagtatcacatcagccagttgaggtatgtaatgccctgcgagagaatcaaatcaaacattggttagataaaagtaaaactgacaagtaacatcatcaaacacataaccaccaacattgttactcacatagccatttcataaactaagaatcagaataataaaagacacacctgcgtagctttcgccagtgagaaagaggtcgcgagacttcaactctgggaacttgttgaaccatctcaacaagaacacaagcatatcattgactgttcaaatacaaaaaacatgtcaagatacaacagtgttctaatataatctgaaaaaatgggatatatactttaccagtagacttgtccccagtgttgtaatccgaacttctgttagagtatgaccatcctactccggctggtgactccacaaataacaagttcgaagctacacatacgcaataagagacaacagcatcacaaacgtagaatcacatagttctctgctttttgcataaaattgtcaaaaacaaacctttgttccaagacatggagttcaagcgaaggccacggccatcgcccgtaggataaaatggacctaactcagtgaaagctcctccaccaactgaagaacaacctggacctgcattacaaacctcaaatataaacttttaactcaaacatttataactaaggaagtagcttaaaggctatgcagaaacagagacctccattgagccaaagggttaagggcttagtgtcaggttcttttacagcctccacgtagtagtaaaaaagactacgaccattttccgagtccacatcgacatatccagcaaattgtctgaacccgacgtttggttgaccaggtagcctggccaccaagtcttcttccggataaccttcagcaaaaaccaaccactgcactgtgaccaataccataatggccatcacaacggcccgagacgataccatgttctgaaacatgtcaaaatacaaaagcaacaacaagttataagttaacgtcaatctcactgaatctttaatacttcactgaaattataccaataaacagaacaatttcaaagactcaaaaaaaacattcagaatccaaattattcagtgtgaggtatagagtttataaaactcactatctcttttcgattagcactcgtttgtaaagaactttgaagaggacttgaaaacagaacaagaaacagagaattgcagagaacgtaaatgagcaagaacccactataagtctagaatcaggttctatcataggcttgtacaacaagaagacacgaatctagtgatctttgttcccaagttttcctcaagtgttctaacactagaactagatctaaaacgacacagttccgttttaggcaagaagcacgtgaggagcaaactctcagaagcccttccttgtaaaacggtagtccaatttatattgtgattagtaacagtatcattaaatatttttctttctcaggcttatattttctgatctcttagtaatctatttgagtacaacttgaatacaactgcatacgattctgaatttttgtatgttgaaatcagttactttttctcgattttgtgtagaattcaattgaaaatttgaaaattatttttaagaactcctgtcgattttttaaattttgtgtcgacgttgtctaattgattcaaaagaaactgatatatatctcagaattaaattgagcgtgtttaactatgcacaactacatataactagtttggttttgtaaatccaaaattcctgaaacttaaaagtacaagtgcatatctacataacttttttgaagtacaaaattgctaatctaatcgggtcgttttttatattttgatccggaaatcttcaattggatcttccgtaattggtttttcttactaaaaaatttcaaacgaaattaaatgattaattttgtaaatatatcaaccttatatagatatgacaaactaatatttgctaatcaaatggttttgttatttaaccatttgttttctaaataaattatgacagtataaattactaaacccaataaagacattagttctatttttttttataaaaacatatcttttctcaactaattactacatctaaaatcattatttatggaatattcctttacgtaaaaaaaaatcttatattttattccatagttctgctatttttttgagattgtgatacttggtcattcataaatctgaccatgaatgttagaatgtagacaatattcaattactaatacaaaaaatcaaaatatgaaaaatcaaatattgtattttcaaatatttggaaaactatttggagttttttggccaaaaatcgaaacttcttgagcacttttcattcatctatataaagaagctcatttcgaccattgatacataatgacctatacgactattaaaacaaaaatgatgcatattcaaatggctttttagatatatataataactccattaccaacatacctaaacggtataaatttattttttgtagaaaaaaagaatacagatcttgcaaaattaaattcccaatcaaaagaaaataaagagaatgatgtaaaggtgtgattcaaacttttggtttagcctgatgtcgacttggtttaatcagttagttgttggatcacggttcaatgccagtttggtattggtttaaggagaaaggagaaatcggtttgagttcagtagaagattgaagagactctcttggtattagagggtttgacttggactctgttataaatagtcttcttcttcctttgtttgttgcaacagaaaattcttatctcaattcttttcctttgtaacacgatcttgagctctgggttttgagcttgagtaaatattgattcatagtggattgctggattgaatccggccccagatgtaggatcatcacaccggtgatctgaactgggtaaacaattgtgtgttcgtttcgttctttgtttgattatgttcttgatcgatctattgagtgttccgcgaattgaagcttgatcgagttgtgttgtgattgaatcgagttgtgttgaatcgatctttgagtcatcggattgtaacagattggtatcagagcctaaggttctttaatggcgatgacgagcaaagcgaacttgaattcaggtttaaaggcttcgtttcaagtctttaacgagaactcagacttctcgctatggaagacaaggatgaaagcacatctcggcttggctgggcttaaaggagtgatcgatgatttcacattgacgaaagttgttccgcttacgaaaagtgaaggaaagaaggttgaggaaggtgatgatgatggatcatagtcatcacagactaaggaagtacctgatcttgtaaagatggagaaatcagaacaagcaatgaatgtgattatcgctcacgttggtgatgttgttctgaggaaaattgaccactgcaagtctgctgcagagatgtgggaaaccttgaataagctgtatatggaaacatcgttaccaaatcgaatatatgtgcagcttaagttttactcattcaagatgaatgacacaatgtcaattaatgagaatgtgaatgaattcttgaagatagttgtcgagctaagcagtcttgagattgtggtaggtgaagaagttcgtgcaatattgttcttgaatggattgtcatcaagatactctcagttaaagcataccctgaagtatgggaacaaagctttgtctctgcaggatgtaatctcctctgctaagtcgttggagagagagctaaatgaatctctagatcttgaaagaagctcctcaacggtcttgtatactactgaaagaggtagaccactagtgagaaacaatcagaacaatcaaaacaatcagaagggtggtcaaggcagaggaagaagcagatcaaactctaaaacaagagtaacctactggttttgcaagaaagaaggtcacgttaagaaagactgttttgctagaaagaagaaaatggaaacagaaggtcctggtgaagctggtgtcatcatagagaaactttttttctctgaagcactaagtgtgaatgatcagttggttaaagatctatgggttttggactcaggatgtacttcacacatgacgtcaagaagagactggttctgtgattttcaggaaaatggatctacaaccatactactcggagatgatcacttagttgaatcgcaaggccaaggttccatcagagttaacacacatggaggatctataaagattctaaacaatgtcaagtatgtgccaaacctgagaaggaatctcatctccatagggacacttgacaagttagggtatcaacatgaaggtggagcaggaaaagtgagatactttaagaatcaggttactgctttgtgtggaagcttagtcaacggtctgtatattcttgatggtgagacggtgatgactgaaaattgtgcagctgtggaatcacagagtaaaacatcattgtggcatagcaggttaggccacatgagtttaaataacctgaaatttcttgctggtaagggtctattgaacggtaaagaaatcaaggatttggatttctgcgaacattgtgtaatgggaaagtccaagagactgagtttcaatgtgggaaaacatgatgctgtggaagcactaagctatgttcatgcagacctctggggatcatcaaatgtatcaccctccttatcaggtaaacaatactttctctctatcatagatgataagactagaaaagtatggttatatttccttaggactaaggatgaaacttttgataagttttgtgaatggaaagaacttgtagagaatcaggtggatagaaagattaagtgtttgagaacatataatgggttggaattttgcaatactaagtttgacaggtactgcaagactcatggtattggaagacacaggacgtgtgtgtacacaccacagcaaaatggtgttgcagagagaatgaacaggacgatcatgaagaaagtgagatgtttactgaatgagtcaggtctggatgagagtttctgggctgaagcagctgcaactgctgcatacatcattaacagatctccagcctcagccattgatcataatgttcctgaagaactatggctaaacagaaagccgggatacaaacacttgaagagatttggatcaatcgcatatgttcatcatgatcaaggaaagctgaagccaagagcatttaaaggagtgttcttaggttaccctgctcgcacaaaaggttacaagatatggctgcttgatgaaagaaaatgcgtgataagtagaaatgtgatatttcgagaagatatggtctacaaagacctgaacaaagatgtgaatgatgtagtagcagaagacgctgaagcatcaacatcaaattctgatgttatttcagaattggttaagaagcgagtcagttctaagcaaggtggagtaactactgagctggtagaagtcagtgaaagtgaatctgaagaagattctgaagaacctgcagaaactgcagttaatcagtcacatgaaccaagtgggttgacaaattaccaacttgcaagagacagaactcgcagacagatcgtagctccggttaaaatgaaggactattctcaatttgcatttgcgttaatgacatatgagatactgaatgtggaagaagaaccacaatgtcttcatgatgctcaaaaggatgaaaactgggagctatggaatggagctatcggtgaagaaatggattctttagcaaagaatggtacttgggaacttgttgacagaccaaaggacagaaaggtgatcagttgcagatggttattcaaaatcattttaaacttgcatctgtgcaggacgattcagagtgcatagatacagttaaaactccatactcaagtgctgttggaagtgtaatgtacgcgatgatcagcactagaccagacttagcctatgcaataggactagtcagtcgtttcatgagtataccaggatcagttcattgggaagcagtcaagtggctgctaaggtacataaaaggatcacatgatctgagtttggtgtatactaaaggtaaagatctcagtgtcattgttactgtgattcagatcatggtggagacttggataggaaaaggtttactagtggatacgttttcacagtaggaggtaatacaatcagttggaagtcttgtctacaatccgtagtggctttgtcatcaactgaagcagagtttatagctttgactgaagcagtaaaagaagctatatgggttaaagggttgcttgaagatctcggttttcagcaggataaagcacaggtctggagtgattctcagtcagcgttctgtttatcgaggaatagtgtgttccatgagcgaaccaaacacatggcacgcaagaggtcatttctgagtgacattattgaagaaggaaacattgaaagttgtgaagattcacacttctattaatcctgctgatatgttgaccaaatgcattcccgtgaatttttttgattcagctttagatactctgaaggtgatcaaacggaagtaagctcttaagcttgcattgctggaggttaagtccaagcatggcagtctactgtgttgaagaagatttgtatcaaggtggagaattgtaaaggtgtgattcaaacttctggttttgcctgatgtcgacttggtttaattagttagttgttggatcatggttcaatgccggtttggtattggtttaaggagaaaggagaaatcggtttgagttcagcagaagattgaagagactctcttggtattagagggtttgacttggactctgttataaatagtcttcttcttcctttgtttgttgcaacagaaaattcttatctcaattcttctcctttgtaacacgatcttgagctctgggttttgagcttgagtaaatattgattcatagtggattgctggattgaatccggccccagatgtaggatcatcacaccggtgatctgaactgggtaaacaatcgtgtgttcgtttcgttctttgtttgattatgttcttgatcgatctattgagtgttccgcgaattgaagcttgatcgagttgtgttgtgattgaattgagttgtgttgaatcgatctttgagtcatcggattgtaacaaatgattttttacataattacgtttgatttgtatgatattccttgttatacttatgccctacctcaaatggctgggatgtccaaaggatcaggtccctcttacctcaacttgaggacacaattcgccaactcagaccgagttcaaaaccgacacctgacgcctttgtttggctaccagagaagccaggcacctattcttctaaatcagggtacaaccttctgaagaataatgggttggctccttcacctaatgcctttagctggtcccctcttgtctggaatttaaaaacttccccaaagattaaaagtttcctttggaaagtggcaagcgggatcctcccaacaggtgtgtcccttgcgacccgaggaatccaagcagagacagcttgcaaacgttgtggagagcaagaatcaacaactcatctcctcctccactgccactttgctttggacgtttggcgtttggctccaatctctccctcctgcgcagaccttgcgatatcagaggccaaagtcctccttaaagctctgaaacagagacagaacttgccccctgtgggaacctcggtgcccctgtacccctggatcctgtggaatatatggattgctagaaatcagatggtgttctccgacagagttttcacagcagaggagactctggtgaaagccattcttgatgcaaaagtttggtcccaagctcaacttgttgcagccccgtgccctacagttcctttgccactacctcttcaccgttcggcccccaggagaccaatcttcgatcttattttggaaaccgatgcggcgtggaaagctgtttccttgaaatgtggacttggctgggtaggtagagacagctccggatccctctgcttcaaagattcgacgtcggagtgtttcgtggcatcagctcttcaggcggaagctctcgctattttagctggacttaactatgctttctcccgtggtttttcttcggttctagtcaaatcagactcgaagaccctcattgacctccttctttcgggtatggttacaaacgaactggtgggactactgcatgatattcgacacctacagtttgagttttctgcagtttcgttttccttcattcctcgtacgacaaatgttttagccgatgttttggcaaagtgtgccttattagcttgtccagactctaacccctgtctcggggcttcccttgtttgacctttttgataatttaaatcgcctttgataaaaaaaaaacaacaacatatttttaataaatgcattccttcgtcatataacatccaactgtaaaaagggcaaaacaatcttgcaatttactatttctttcagattatagtcacagaagctaaagagaatccttcttacctaattatgtttgataaactagtgtgatattatttattgtttacacatagtttaacataaaacttcttagaaaatttaataaaaactttttttatagatcttagaaaatttgaatgcttttaaatgagaaaaatacttgggttcacctctaggggtgaacccttatattcacctcttttatattagccaattaaaatccgacacctaataataataaaaagaatttaatttaattataaaatctaatttgctactaaaacgaaattatgtatcggtttgggtttattagaaaaggtcagggtttagattttataattaaacgaggttaaatatcggtttgggtttagaatttatgattaaacgggttaaatattggtttaagtttataaacagatttaaattttacaattaaacgaggttaaatatcggtttgggtttaaaaaatatgattagggtttagtttttttatgataaaatgagtttaaatgacggtttgggtttacaaaggagaattaggctttagattttgtaattaaacgtaattatatatcggtttggattataattatacctctaatttattatgtaatttaagtagaatttgatatgacatgtttttattggttaatgcaaaaggaggtgaataaaagggttcacccctaggggtgaacccaagtttcgttcttaaaattatagggataagatgtaatttttttaatgagtcaaattacttagcctcagtctattgattgataagttgtcttagaaagatggatatggacctattcaacaatcaaaatcaagctcgcatggcctcttgcatatttaatgatattgaattcggtttatgttgtataccatacttccttattaccttgttcaggcccgattcttgggaggtgctgagtgtgctagtgcaccggggcccaattctttgttcagttttttctttatattttagggtccaaaatttggaacttaaaaccgggtccattaatttattggaccggcctgaccttgttagtagccaatatcgttataaatatgtattatactagatattgacccgcggtacaccgcgtgttgatattttctttaaaaagttatttttttatttaattaaaattatttatatatgaataacatattcatgagttacattacggttctataattttattaaataaaaagttgattttttgtctttaaaataatttatatatataggctattgtgcttttaatgtatgatacaccctgtgacgaatttataactaaaaattatatttaattttaaattgtatttgttgtattaatattatttgttttgtttaatgtttacaattgtataattatattttgattattaattctagggtttcacgcatagtatatcatcccataataatatcgatccagacatgttctatattttagggtccaaaatgtttaaataattacaaaataaggtctaaattttaaatatttaaaatttaagtaaacaaattggaacttaaaaccgggtccattaatttattggaccggcctgaccttgttagtagccaatatcgttataaatatgtattatataaacatttatagggcccgcatttatataagcaatgcgatcccttacttatccatttttgacattacttttgagacagattgcaaggagttgacacagcttttggacactcctgatgagtggcccgcattttcttcggagttagaagattttaatgctttaaagtctagatttcctcgtttttctttatcttttattccacgtttaaacaatgtccgtgctgattattttgctaagaaggcaagagcacgaggttctattttttctcatgtaagctcatcaggatcctaactgaaaaaacgatccatcagaacaacagcccacatgacttacccaaagactaatcatgcctaaagcccatcagattttatgcccatttacaacaaataaaaatagaaacttgttaatattttcggttgccaaggatcgaaccaaccaccttctacctttaatagcatagaaaacaattagacttcaagacgttctttaaaatttgatgccctctaaaatacatataaatctttttacctaaagcatctatttggtgggctttaggtctgggtcaagcttgacggcctatcaggccaagggctcggcccaaataaagaaggctcagcccataaaacttaagagagaattcctccttaactctttgatctcttactttctggtttttcgttatgtactttcggtcttttgttctgtacttttggttttatgttttattaattactattctcattcatcgttgataaaaaagcggccccattctcccaaaaaatcccttagttacttattattacaacttcattacaaaaaattggcgtccaccatggggctaggaagagttttctcctttattgaaaatcatatacgatattgccagtaatcctagaaagccacgacgagatgacggaaacctcgaacaaacaagtagatgagttcagtacaccttgtgccgcaccaccagctcggccaacgacgccacctcctgtcgtcactcttgacacagttcccgccgagctcgaagaaacgacaccacgaggaaccagtctcgacgaagtcattcgatctttcctcaaccgactcgacctacatgatgtaagaactgccgaacacatcaacgcaatcgtcgctgcccaggaggcctcccagaatcagatcaagtaactatagtcctctacagcacgagtcgttcgacagctcatcgataacaaaaaaaatttaccggaacaaactcctatcacggaatgaccagtgaatcgacaaaataggccggcctccatcgtcattggatccattgacaagcacatccgtgaaatatgccgaactgcaaaaatcgtccgaaaatactaaacacgctgtatagaaaatgatgatataagtgggtgtgatcgggaactccaacaactatgaaccacgttgaaagatatgtcatccaagatgcattgtaccgtcagctcgacactagagttagacaagatattcgaggagacacaacacactccattcacttcacgcatctccattgttcgcatttgtcacatcagcaaaatcaagctggctaactatgaagggctcattgacccaaggccattcttgacgtcagtatgcatcgtgatcggttgcgcacacttctccaaaaaggagcgagatgccggaagctgacaactttttgtagaacatctaagtggcgcagcgctcacttggttctcatgactcgaggtcaattcgatcgacaacttccacaaactccctacaaatttttttaaagaattacggagtattcatggagaaaggtgcctctaacgccgacttttgggcaacggccaaaactactaaataatcactccaaagtttcaacgggagattcaaagaatagatcaacgtacacgagtctcatagcactacgacgctaattacgtaagggaagataagggaaagaagagatcaatgtactacattggagtctcgacaccactttctaattaaaattatagtttggtttctttctattctcttttttcttttctttttctaaaactgtcggtttctaaattatttatgctgctttcttatttttttctaagatagtttctttttttgggaaatttcacaaaaaatttttttttgtcataattgtatgaatataataaaccttatttttttattaattgatcttgattatgctttcctaagtataacaaaaatatattatttcactttcttctttatttgttgataacaatgatgtagatcaacgatatttggatcgataagtccagagtcatagtcaactaaaccttgaaacacggaatactatgtatatatatgcgattgacataatttacaataaattataaatttagacgacataatttactcataatttacaataaataataaatttagacggcaaaaataaaaacataaatgtggcaagaaggccttaatgtgttataaagcccatgctagtacccttacacgaatataaactaaacccaattaaaaaagtatctcatttgagatagtagcctatttaggatagatagagaaggggaaaactttacagccgaaaaactaaggagataattaggagaaattttgaaggcattaattttatttttgaagttctgaaaattaatatttagtcaatgggaaaaatgtcgtttaatactcaaactttctttcatttaataggtgaagttcgtatatggttatttaatatatgtacaaatcgttgaccggctatttcacacaaacttaatcgttgaccagtccaaaatccacaagacgttagttggcattaacagatccaataatagttgttaactagtctttgttaatttccaatacgatgtcgtttcaccataatcaaaacaggaaaatgtcatttaatactccaattttcaaattatggctgttttatacatcttcacatatagctattttatagatgaactaaatgttaaccagccgtttaagacatgataatgcattaaccatgccgaaaagacatatcactatctaggcctaaacattaagatttcaatttagattcgcttcggatttagataattcgggtatgagagtttattattcgttaggattttataactattcaaataccatttagaaccataacaaaacaatcaaaaacgctattctaaactactatgaatactctcatcaaaaacactatgtagtgcccgaatgaatattaaaattttaaaccaaaagaatcttaactcaaccaaaacgaacaaatattttacaataccctaatggataccaaactctagatacaaaagaacaaataaccgaatgaacccgatcggataaccgaacgcccataactagatattattattagacatgcaaagcttctttagcaaacaaaaccacaagttgatgttattatgctttgtgaatttattggatttaaaccctaaagctcgttagaatgacttaaaataaaactcacaaaaagttaagtctttatgtaatttttttcaaaggaattattagtaaaacactattaggataattcataaaaggaatccaatttcaagaacctttactattgataacactgtattttactcattttaggtgtatgtttatcatcatttagctttgcatttgctcattgtatcatgtcattttgcaccattttagcttgttttgcatacttaggcatctaggatcatcttgcattcgcattgcatgttttggtgtgtttttaggtgcaaaaggagcttaaaaggactctactcgatccattcactcgatccaggcagctacagaagaggcatcattctactcgacctctttactcgatccaggatgccacagaggaggctgcagtttactcgaccctcctactcgatcaaggcaacctcagacgaagcagtagattcaactactcgcccctcctactcgatccactactcgatccatttactcgaccaagggtgaccatctctacaagacttgttgagctatcaaagcgtcttcgaatcctcctcattccccactcaaccagacatctgagcatacggataggagagcatgaagcatctactcgaccaattgatcactcggagcatagacacaaaggcgcagactttgcagcatcccctttactcgatctccaaggtcgagtattcacccaaaccgcctcaagtctcttgtcttctagtgaatctagggtttcaacattttagtataaatagaccactttgggatttgtccaagggatctatgctttatctttcagtttttctttgtgtttatgaatcttgaaactttaattactcttaatctatttcatttttgcatttgattgtttaagtaaagttgtttagcttgtttagatctacattttggtatgattttggtaatttctaggtttgtgttcttgagaatgttgcttgagtagtgattagggttcttgaggatggattagattagggtaatctctaggttagttaggtggttagtgtttaggtttatacccttctggattcgcttggcccctatgcggttttcgctggctaatgtggagattcgatcatcgacgtccagcgtccaaaagactttcaaatggatgtctgacctacgaattccagagatatgtagactcgaccaagggattggcttgtctgcctattggctttggtagattgtttgttaaaccctgctctactatgtttcatcaacgagggttgagattaggaagtggtagagttatgggggtctctgtcacgagagtggattgacccggtttttgaatctatcgtcatgggtatctacctttcgcctattaaccatttgatgaaccctagagttacccttatcaatgaatccatccttagaacttctattaggtttatttgtatcccttgttgattgcacttttatttacctgttatttgtatcctctatttgcatcccctgttgattgcattttggttcttaattttgtcacctggttgttctactcgacctaatgatcgagtagggctcttaagttcttatttttacttgtttgaattctgacctaggattgttactagaaacccaccatcattataatctggcttgacttagttgtttttgtacacatcttgattgctagcaatacagtggattggatcgacaccctctataactgcatcgacatgtttgtattttaaaggaattgaactgaactcacaaagcattcagcatataagtaggcctaaaaacgtgcttatgaatttggcgccattgccaattcattgttgcattgttacattcaagatattagaaactttgaagatcaagttcttttacatttatcaagttactaactcatcatttcgtctgcttgtttttgtggtataggtactaatctttgtgcatgcaaactcgatccaaaggttctgcacacctattaccattcagagacagaattgataaaatagccggtgagttacaagaaaccaaagcaaaggcagcctgtgaccagcaaataccagctgctatggatcaacagaacagaccagttgatgttcaagacccacctaatgttgatcaaccaagaaacattggtgcaggtgatgccccaaggaatcatcaccaaagacaagggatagtgcctccaccagttcagaacaacaactttgagatcaagagtggtctcatctcaatgatccaaggaaacaagtttcatggtctacccatggaagacccctggaccatcttgacagctttgataggctctgtggccttaccaagatcaatggtgtcacttaagatatgattaagctccggctatttcccttctctttgggagacaaggcacaccactgggagaagactctacccccagactccatcacctcatgggacgattgtaagaaagcttttcttgccaacttcttctctaacgctcgcaccgctagattgaggaacgagatctcaggtttcaaccagaaaaacaatgaaactttctgtgaagcttgggagaggtttaaaagctacaccactcattgcccccatcacggtttcaagatggcttcattattgagcacactctacagaggagccttaccaaagatcagaatgctacttgacaccgcctccaatgaaaacttcctgaacaaggatatagtagaagactgagagttggacgaaaatctagcacaatctagtgggtgctacaatgaagactatgatcgctcaatgagaggaactggaggaagtgaggacaaacagagcaaagatatcaaggctccgaatgaaaagttagacaagctgttgctggctcagcagaagcagatacactacatcactgatgaagagcacttccaaatgcaagaaggggggaatgatcaaactgaagagctgtgctacattcagaaccaaggagggtttaacaagggctacaacaactacaagcccaacccaaacctctcctacagaagcactaatgttgctaacccccaagatcaagtgtatccacctcaacagaatcagtccaaaccttttgttcagtacaaccaaggttatgtccctaaacaacagttcaatggacgtttccaatagcagaatccaccaccaaggttcactcaacaaccacaacaagccctagcagctcaagatcctgaaattaagcaactcattcaacagatcatccaaggacaagctactagagccatggcttttgaaaagaagatagctgaattacacaacaagatcgattgttcttacaatgatctgaatatcaagtttgaagctctaaatttcaaaaatcaagtatgtggagagtcaatttgcctcaacctctgccccgaagcaccctcaacaacttccagggaaagcagtccagaatcctaaggactatgctactgctaatgctatcaccatccaccaagaagatgagtctccaccaagtcatcagactcccaatactgaggacaatatgattcaagaagggggggggggggttcaactcaaattgatgcacctgccactcagcaattcatctggactatagagcacacacctttgctgaatactcaccattctagaaaagagttcaaaagtgaaaaattcaagaaggatcagaatcaagagatgatcagcagtgcctctactcaagaaacatacaagaagaaagtcatccaagaaaagcttgatgatcccggttcattcactctaccatgctctctaggaccattgacattcaataggtgcctttgtgatttgggagcatctcttagccttatgcctctctctacagctaaaaggctaaggatcatggaattcaagttctgaaacttagccttactcttagctgatggttctgttgcacatcctcatggtctagtagagaatctgcctgtcaagattggaaatgttgagatacctacagactttggggtattggacgtagatgaagaaggcaaggatcccctgatcctaggcagaccattcttagcttcagctggagcagtcatagacgtcaggaatggaaaaattaatctgaaccttgaaaaaggcatcaagatgaagtttgacatcagagaagcttcaaagaaatcaacaacaggaggtcagagttttggaattcaagatatggatgttgatgaagaaacagaagctgaaacctcaccaaaagtcaactatacttctcaactcagcaagctgaagagaacttttgaccacaagaagagagaaacagaaaggctatctcagactgaagatcctgaagaagatgactggtatgagatgagaaaaaaatttaaatggcaaagcagagtcatagacggattgtcttcaagggtgatgaagctgaaagatcaactttggatatttgaaaaaagagttaaaaagttttcagatggtattgacccagagaagatggaaactgcactagctatcaagaaggacgaaaatttcacaacagaatggtttgcaccagaagatcagaaaggagttcacttagaggaaagaagcttagggagcaagttgttgagtgaggaggaaactcctattttgacttattctctaggagtgcctaaacagcccaccaacccctctgctgaagaggaacacttgacacttgattctgttactgaagaacttgtggaactcaggatagaatacaaagctcaagaggataccattggagagctaacttacaaaatggaaggactgaaccatgcaatcttggaacttcaaaaaatggttacaggctacaccagttttgaatttgaggattggtcaaaagaacttggttcagaagaagaagactactctgctgctcagaaaaatcttattttgaagaaaaatcaaatgagtactcatcctaccatatctcaagagaggatgtagagtatgactcaagcactgaaaattcatccactgaagataaggacttctctgttcctctcttcaacctttttcttactaagcactgtaagagtcaagcttaatgacttaaaacaagctcacttgggaggaagtcccatgtctatccatgtaaataactttctatttttcttgttatttttgatgtttttgtttaagtgttttaggtttgttttagtgaccctaagagagtcaacggtcgagtaaattcaaaccaagtcaagaaaaatctcaaccgttgatcgagtagaatgaggaggagtattttgagccattgatttggatgaccaaatgagaggagcattaccgtcgttggatcgagtgactttcagaagttaattttggtccgtttgatcgagtaaacaagaaagaaaagttccccgtcgttggatcaaatttttcgcacttcaagaggatgctcgatcctttgctcgagctctcattatttgaagaccatggcataacttcgtgaccccacttgttcccccaacactcttttactcaatggacaaagcgattacccatgcccctcaccatttataatcaacttttctatcccttcccaaagaaaccaaacaccaatctcctccacccattgaattcgacaaacccacttttgaaactctctctttcatcatctcattttcgcaacctctccatctctcacaaagcttcgaagtttcactccaaactctccctatcactcttcacgaattcgttctcacttcatcatacttcaccaaagttactcgatcacttccaagctcatcctcaagcactcaatcggtttcaagctccaaatttcatcaccaaataaactgatccccttaccccttgatacctcttggagagttgtttttaattgcttggttgaaactcaccaccatggattcaagaaggaagagttcgtctcgggcaagaagatcctctgtcgatcatgaagaagttgatgcgtttgacatgagtggcatgactgaacgccaaattcgccaagctcgccgtgctcaaagaacaaacttgattcaaggaggaagctcaagccgctcaaccatgcaaagagaagaagtagctcggggaaagagggtggttgaagctgaagaagaacaccatgaagaggcgccctttgaagaagcggtttctgaagaagaggttgagatcatcggagatgatacaccaacccctgttgggagaagaaaccgaccaaggaggaagagagaaccaaccccgagcgagtactatcaatatttgaaggagttgaagtttgagggaactagataccctcataaggaaatgatgcaagagcttggtatttgtggtgatgtggaatacttgatggaattggccaatcttgcaacattcatgagctgccaatgtgggggatacaaagaggagagctgccaactccttgcaaccctcaaggtccatttttgtgttgatgattcggagaaggaagagagagtaggtcttggttacataactttcaaggttaggggtgtcgagtatactcttgatatatgcaatcttgataccattttcgggttccctagtggagaaggaatccgccaagactatgatcaagaagagctgaaatccctttggaaaacaatagccggtctgaaacccttctcaccaaccaagagcaagagttcttcaatctgtaatcccgtgattagatacctccaccaatgcatcgccaacacccgttttccaaagaaggccaccggatttgttagtgaagaagagctatgcatgatagaccaatctttggtcttcattttgagggagacatgagatgggaggaagatggtgggggatagagcggacacttcgttgagtgttgttctcttggatcacttattgagttacaaggagtatgctgcaactatccatcgctcgggaattcgtgggagtttttgtgttggtagtctcttaacgccaatactaggagctgtgggtatggaacttggagcccctgacgtgttgcccaagttcattgacctcgactatctcaaggggaggaattttcttgagaaaacaactccggcggatcgctatctcttcaacttcaaccactcggagcttggaccttctcttctacccctactatgtgagaaccggacttcggtgaagacaagacgcaacatcaatttcatgccatctccctctgccttgaacatcgacattggaggagctcaggaagatgaatcagaatatagtccggccaactatgagcaacatgagtactttactcaagctgattatgaggagcaaatcgagtttgaacaacatgttgatcaaccggagcatgggggtagcgaacaagagtaagctcattatgaagaaggtgttaaccaaggagaagatgagtttgctgaagttcacaagaagctcggtgtacttgaagagcttgggaaccttcacagcaagacaatgaagggtttagagaagaagatgagaacaatgaagaagtcgctcaagagtatggctgctcaactcaaggacttccagagcaacccaaggccaccatctccaaccgccgaagtaagaaggagcggttcaacgagctcagctgcaaggagagctgaaaggatcgtcaaccccgagcttcatcttttgagcctcgggaagtgatctccgagttgagagagccaaggagcaggcagagacgagcttccacacgctcgatcggacagaacgagcaataccctcccgcctcaacttcagcccctgcctatacccaagagagtatggatgactatgtctccatctacttcacctgaaaactgaggtaacaccacctctccattgtatataccatagcatctttttatttttctttgtgtgttttgtgctttggtcttgaatgctctttcagatttttattacactagggactatgtaatttaagattggggagggttcaagacatgtttaacattgtgttctcttttcttatttcaaattttgcatcatctaaggcatagaaaaaccataaaaatttgaaatattttcagaaaatgatttcataaaaaagagtgtcatgtagattgcatatcattttaggattgtatatagagtgtttgcatttaggattgctcatttgcataggggatgatgatgatttcaaatcgataagcatgttttgatttaatgaagtaagttcaatgcctaggttgttagttctctgttgcataaccgattgtatctctgaagtaagaacgcaccctgctttgaatttgtaacttgactatactactttgatcgaaactcgcttatctgttgccattccctatctattagaacctgaactgaatttgaaattatcatgtctatgcattgtttatgaactcatggctaccatatacatacttggattattttattcatttcatcaccctctgttaatccaagtagttgtctctcatttttagagcagtttcccatacccttagcctagccttatttcaagccaaagatcatttgtgtgtgattgtgaggtctttttgattgagcttggtataacgtgttaggtatgagccgacaagagcagtctttcatgtagacctagcccacgctttttgggttagctaggactaggtggagacttgtatttgggattgggattgtgtatggaatgaatgggaatgagagtgagaataaaaagaaaagaaaaaaaagagagagtaagagtttagagttctaaagaggatacaaaagtgttaagtctagtaaagggtttggaattcaaagaagttaggcattgagattcaaagaaaagggtaaaacgccctatgtgctaagaatagaagaaaagccttaagtttgtcatagtaaagaaccaaacccgctagactcttaaatcgtttcaaagagaaccccttagaacttgaaccaaaaaagagagaaaaaaatgagaaaaatggtagagttaggacatctataggaaggggatcatcttctgagctatcatattatatcattgggtagatgggagtctgttcttgtatgtgtccgttggcttttacctttagcattctactgaagctcaatcttttctctgagagtccccttgttacttgaccaaaccattagagagaccatttttgtctcttggcctaagcccgaaaccaagtgaattcataaccattgcattgcttgatccactgttcgtgcttaatgaatgttaaagggaattggttgatgtgaatgcttgaatagattaaggcaagttgttaggttgcattgtgacaagtatggctaacgtttttaagtaaggttatatcatcttgcaacctagaattagctacctggacattgagcttacccattttatatgcatgcttcggtttttgaatccccaccttcaaacctctccttcaacttaagattttttgtttgcttgagggcaagcaagagataagtttgggggagttgataacactgtattttactcattttaggtgtatgtttatcatcatttagctttgcatttgctcattgtatcatgtcattttgcaccattttagcttgttttgcatacttaggcatctaggatcatcttgcattcgcattgcatgttttggtgtgttttcaggtgcaaaaggagcttaaaaagactctactcgatccattcactcgatccaggcagctactgaagaggcatcattctactcgacctctttactcgatccaggatgccacaaaggaggctgcagtttactcgaccctcctactcgatcaaggcaacctcagacgaagcagtagattcaactactcgcccctcctactcgatccactactcgatccatttactcgaccaagggtgaccatctctacaagacttgttgagctatcaaagcgtcttcggatcctcctcattccccactcaaccagacatctaagcatacagataggagaggatgaagcatctactcgaccaattgatcactcggcgcataaacacaaaggcgcagactttgcagcaccccctttactcgatccccaaggtcaagtattcacccagaccgcctcaagtctcttgtcttctatggaatctagggtttcaacattttagtataaatagaccactttgggatttgtccaagagatctatgctttatctttcggtttttctttgtgtttatgaatcttgaaactttaattactcttaatctatttcgtttttgcatttgattgtttaagtaaagttgtttagcttgtttagatctacattttggtatgattttagtaatttctaggtttgtgttcttgaaaatgttgcttgagtagtgattagggttcttgaggatggattagattagggtaatctctaggttagttaggtggttagtgtttaggtttatacccttctggattcgcttggcccctatgcggttttcgctggctaatgtggagattcgatcatagacgtccaacgtccaaaagacgttcaaatggatgtctgacctacgaattcgagagatatgtagactcgaccaagggattggcttgtctgcctattggctttggtagattgtttcttaaaccctgctctgctatgtttcatcaacgagagttgagattaggaagtggtagagttatgggggtctctgtcacgagagtggattgacctggtttttgaatctaacgtcatgggtatctacctttcgcctattaaccatttgatgaactgtgagacccagtcccggacgtctcggcgtccggcgaccgtgtactcaagttcgagcctcttcccggtcgaacctcttaatttttcgcgattcaacatagaattgcctatatgaggctaaattctataatcactttcttattacacagctgaagtctttctaaccttggtttaattctaaccaactcgtgtaccggttttatcgtctttgtcccttagacttagatcgatcctttactcggtcaagacatgcatattgttcgctaaccattctaggcctaacaatcgcatattcctttatcctattttcacggtccattcccaaacgtctatcctaactagtaagctagatcgttacataccttggccaatatgcggatttgattccttagcccgtttgtcgccttatcctattcgttcaatgattcatatgcgatcgtgaattgatgaaccaatccctatcgttacttagccatacaaccaaccaaccaaccccactggtctaagtacaacaatagagattggggatcgtacgatttccttggttcacgatggccgaatcaagctcttggcttattggtccatccgtcctccaaacgtacgccccttcggttccatggtggacgattgaacccttggcttatcgaaccatccatgtttccgatccggtcgtttactacgaccgcccacggtttactaaccgtttatccgtccggtctatggtggtcgataaagctttcggcttatcgatccatccatacgatccgaactatatccttatcacacccaagggtccgtggattcatccatcggatcatcgtaggctagcccatgaaatccttcttccgtcggccttaggtttgctcacgggtccaacatccattttgtccatcggttcctaccgtggactttcccgttagttatccatcgagtctccctttggtcttaccgatctctgatcagtttcaccatagctgaggagatagatacatgaaggcgaccgtgatattgatcctatatggtgaatcacgtttccttacccattcttgaagctttctccctttactggtaagattacatccatgggcgacccttgggtgtgtttggatgcacttatctttgtgcttcctcgaacacttttctcgatctatcccatccgacgatcgttctgtccgacccgttctatcagacgatcggactgtcccatccgacccgtccgacgatcggtctatccgatccgatccatctggctgatccgatccgtccgacgatcggtcaggccgatccgatccgacgatcggtctaccagatccgattcgtccctaagacgaacggtctaccctctccattctctacactacatcgaaccgttggaccgggaggtagtatgcgcatcagttcggtcgagttatactcgccgagccgcaccccctttccgaccaacaacttcaggatgtgttaggactgttttgagaattttttgtggtgtgtggatgttgtgagatgatcccaaaggccttgggcgtcctcccttatatagggggcgaatggatgcttcccgaagcatcacatccgttccttgcaccctttcgaaaggtcacatccgtaccttgcatccttccaaaaggtcacatccgttccttgcatctattgggcgatgcaaccgttcgttggtacccgctcgaccttacaccttttggccgagacaccttttcacccgtgagctaccacagtccaccagctcgagtgtcagctgaccggaccacccagctgggtcagtacacgatcagctcaccgagctcagtcgagttgtcggtcagctcacctagctgagctagctagtcttccagctggtttagctcacctagcttagctagctagttcatgctagcttgtccagctcacctagctggttcagcttgaactttctcattcttccgactaagtattttagtccgtttctcgaccatggtctagttttcccctaaaacaaaccggcctctttatgaatgcgggacgcggtcgtgacatgaaccctagagttacccttatcaatgaatccatccttagaacttctattaggtttaattgtatcccttgttgattgcacttttatttacctgttatttgtatcctctatttgcctgttgattgcattttagttcttaaatttgtcacatgttggttctactcgacccaatgatcgagtatggctcttaagttcttatttttacttgtttgaatcctgacctaggattgttactagaaatccaccatcattataatctggcttgacttagttgtttttgtacacatcttgattgctagcaatacagtggactggattgacaccctctataactgcatcgacatgtttgtgttttagaggaattgaactgaactaacacatcattcagcatataagtaggcctaaaaacctgcttatcaactatcataaacgaacttatattttttcatataattttttggtgatttctattctctaatttcttgtatcttattcttattgttattatttatatttaataaaagttagagagagaggagatagcacttttggcttctcaaaagctttgtgtttttcgaatgaatactaaaataaaaggacttctttaatggtcgggcactttccaagttcttagtgcatttagggcacattgaagggagtaggcactttttggagttttcaataccaatttacctgacggaatgatctcgtccgtcggattgaaaggtaaagttaatctcttttaatcttgaccgtcaaattaaaataaataaaacatatctgctgattattttctctcttttgtcaatttcatatctgaaacattccccaataacaccacctttataaacataaccaaacaagacaaaagccaatcaaattgaccacacaataccaaaaccaatcaaattgaccatattccgctcaagattcccaagttttttaaacaatctaacaagaccttgtaatattcttacaaaatagatccaaatcatttcccaaagagaagaaggagaagaggaagatccgaaatattgttgcaaaacaaaaaccaatcagcagctgggaatactgattcgagatccgatctttaagtttctgggattctagggtttgttctgtaggagaagaggtcgacaaaagagaagaagaagtgaaaaaaattatagaaaaaaattaaaaacgactttgaagagttagaggatttgaaccctggatgggttagatatacggccatcggttaaccaccatctaagacgaaatgtttgcaagattacgaaagtagattgtatatataatacgctagaaccctgggttaagtttttaccatagttagcgtttccgttaggaaagttaacagacgttaacttgaaggtatgattttaccaattttttaaatatgaaggttttaaaaagaacaccaaaataaaatgaggtattttagttccaaatttaataatacgcgtataaaaaggtcaaaaaaaataatagaaggcgcttttttcgggttttttccctaaatattaacattaaatcccctaaatataaccaaattaagatagaaaatccatatgatccaatccatatggacaacaatggaatatataatctccaatgagaaacatgtaaccataaaccataaatcattgtagacaaccatgattcttcaacccaaagccctaaatcatctaaaataaacgctaaatcctaaacgataaagcctaaatcctaaaatgtaaacactaaatactaaatcctaaaccctagacatttaaccctagcccttgactttaaagcctaaaccctaaatcctaagttttatatgtacataatctataaccaccacttttggtccatgataatctaaagcacgcttcttaatctgaaaacgtaaaatattattgagatcaatgtgttcatagacaatcatacaatatagactcgtatttatgttttgttaatatgtaatcgtggataaataaatataaacattttcataaataaacttctatggatatgaccaatagaacttgtttcatcatattttatcaacatcttttacataacgtaacacttgttttatggatagtattatcaaaacgcaatcattttgaattatctaacgtcaacacacatccttcaaactctgacgatgtggtcatttcaatcatttcgagttatcgaccatccatgcacatccaccaaactttgaccacgtggtttgcataatagtaattggcatacaaatgagaaagacaaaatagtaatttgtatacagatcatcgtttccttgaaaccctagccgcctatcactctgcttatgattgttttttgtatttcttccattttttcattatctgctcatgtgttttaataaaaatagcataacactacctttaagttacaaatttatagtaagaattatatgtttagattcgttaattcaactctctctctctctctctctctctctctctctctctccctctctctctctctctctctctctctctctctctctctctctctctctctctctctctctctctctctctctctctctctctctctctctctctctctttcaacgcaatactgggaagaccatggctacacgtcatgaaagtcgtcccatcaacctaccaccaatgcattaaattccactcagacaaggggatagcagtcgtgtacggcagccaacgcagctcccgaaaatgctatatgggtggctacgagcatatcaaaaaagccgaccccgtagtactaatgatagaggacaaactcgcagaaataaaaacagtcatatcctctgacccttctctacgcggacctcgaaaatcgctgataacgcaggtctgcatagacgaatcagatcctaaatgatgcgttgggataggtcaagacctcgacccagcaatacgagaggacctcataacctctctcaaggaaaacaaagacagcttcgcatggtcgagtgcgaacattcgagggccaaagctgtgcacgatgaggtcggccggttgatcaagatcggatcgataagggaagtaaaataccctgacaggctcgccaacccagtcgtcgttaaaaagaaaaatgggaagtggagagtatgcatcgactttacggacctgaataaggcatgtcccaaagacagtttcccactcccgcatatcgaccaactggtcgaagccactgcaggacacgaactattgtccttcatggacgcattctccgggtacaaccaaatacttatgtgctcagatgaccaagaaaaaacagcttttatcaccgaccgaggcacctattgttataaagtaatgccctttggtttaaaaaatgctgaagctacctaccaacgattggtgaacagaatgttcgctgacaagctaggtaaaacgatggaggtctatatcgacgacatgctggtcaaatcagctcacgaaaaagaccacgtcccgcagttaagagaatgcttcaaaatcctaaacaaattcgaaatgaagctaaaccccgagaaatgctctttcggagttccatcaagagaattcctcggatatctagtaaccgaaagaggcatcgaggctaatcctaagcagattgcagccttcatcgaaatgccatcaccaaaaacggcacgagaggtccaacgagtgactggccgtatcgtcgccctcaacaggttcatatccaggtctaccgacaaatgcgtccccttttatcagctcctccgaaagtagaaaaagttcgattggaatgaggactgcgagcaagccttcaagcatttgaaagcatacctatctgaaccacccatactcgcaaaacccgaagaaggagaaccgctgtacctgtaaacggcagtctcccgaaccgcgataagcggtgtcctggtgagagaagatcacgaaggaaaaaaacagatctattacgttagtaaaacgttgatagacgctgaaacccgttatccagcaatggaaaaactggcactggccgtagtcatgttagctcgaaaactgagaccatattttcaatcacaccccatcgtagtgatgacgtcccaaccaatcatgaccattctgcatagtccgacccagtcaggtcgacttgcgaaatgggccatagaattaagcgagtacgatatagaatatcgcaccagaagcagcttgaaagcacaagtcctagccgactttgtaatcgagctcccgttagcggacctggatgaaaccaactccaataagatgtggctcctccatgtcgacggctcctccaaccgacaaggatccggagtaggaatacaactcacctcccccaccggggaagtcatcgaacaatcgttccgactcggattcaacgcatcaaacaacgcgtctgagtacgaagccctcattgctggcattaagctagctcaaggaatggggatctgcgatatacacgcatacaactcgtcaccagccagttccacggggaatacgaagctaaagacgggcgcatggaagcgtacctcgaactagacaaaaccttgacccaacagtttgaattgtttgaattaaccaggatccctagaggagaaaacacctctgtagacgccttggcagctctcgcttccacgtcagatcctttcgccaaaagaattatcccggtcgaaggaatagaacacccgagcatcgacctaacggtcaaacatgctgggatggaaacctcgacaacttgcaacttcacgcgagtaacctaaagcaccaccgccgcagatagagctctcgcagcagccgcggaggtaagtgcagcggagctcgaaacccccaaacaacctgccccatacgaacctgaaccgtacaacgactggagaatcccaatcatcgattacatcgaacgagggatcacacctcccgacaagtgggaggccaaaaaactcaaagcccagagtgcaaggtactgtatcatggaagggagacttatgaaacgcagcgtcgcaggaccctatatgatgtgtacctatgggcaacaaacaaaagacctcatgaaaagcatgcacaaaggacaatgtggtagccactgtagtggacgtaccctcgccctcagaatcaaaaagcaaggctacttctggccaacaatgctaaccgattgcatagctcactcactcaggtgcgataagtgccaacggcacgcacctactctgcaccaacctcccggggaaatgtcctcaatatcttctcctcacccgttcatgaagtggtccatggacgtcgtaggtcccatggaagcctccggtgggaagaaaagactaaaaaaaacttctggtcctcatcgactactcgaccaaatggattgaggctaaagccttccaacaggtaaccgagaaacaagttgaggacttcctgtgggaaaatattgtatgccgacatggcataccaaatgagatcgtcaccgataacagaactaacttcacctcgggaaaaatcaaagcattctgcgacaagtagaagatccatcttaccacgtccaccccccgttacccacaaggtaacggacaggcagaagccgccaacaaagctatacttagcaacatcaagaaaagacttgattctaaaaaaatcaaatggtccgacgtactacacggagttctctgggcctaccgaactacacctcgcaaatcaacgcaagaaacaccgttctctctcgcctatggtttagaggcagtaatccctgtcgaaacaatagtaccaagtgtgagaaggaccgccagtcctgctaacttggacctgaacaagcaaatgttacaggacaacttggacttcatcgatgaacgcagagatcaggcaatgatccgagttcaaaactatcaacaagctgccgcccgctactataactttaatatcaaaattcggagattcgaagtgggagagctcgttctacaaaaagtgttcagcaacacgagagagctaaacgccggaaaactggggactaactaggaaggtccctatcgaatcaccgaggtggtacgtgacggcgtctataagctcaaaaaagttatcaacggagtacctaagttacggccttggaatgccatgcatctcaagaaataccacgaataggtactcaaaaacaatcgaactacgataaggcttgatcccttggcagggtacgtaggcagctcctccccagagcgcagccaccacttcaatcgaactacgataaggcttgatcccttagcaggctacgtaggcagctccacccaagagcgcagccaccacttcaatcgaactacgataaggcttaaacccctaaccaggtaagctgctcacctgacagttcaaccatccttcgataccaagcaggtctcctctagatgaccagacgttagatcgtcttaacaatttcgagataagaataaaagaaaattttgatacccaatatcatgtttcgcaaaacaatcgtttccactaccatttaaaactcattcgtaatcttacgatacctaaagcccaacacccgaatgttgacggatccactttgtgatctcgcttccaaaaagtcgacaagtgaaccttacctataaaaatacatcacttcgacatcatccgagctcacctacgacaaccatatttaactccttccttcactatcaacacataacatactaaacaaggaagaaacgaaggtttcattcgcgatctggcgataccacaagtccagttcccaaaatctggcaggtcccctgtgtgacctcacttcaacaggttctcgagataaaatcactcaaacttattcaagtttgaacctacgaagaacataccataatccgaaataacttggactgaaaacagttccaattattatccggaacataagcaaaatgaggtgatcatacaccaaaatcgacgaagtgtcaacactcgaacaaaagacaaaaagtacttgttaaaatggataaaagccttcccaggcatcaaaagtacttaaccgaacaaaggataaaagccttctcaggcaccaagttcaaagagaaataaacgaaaggatgaaagccttcccaggcactaagtttgaaacataaaacacaaaagcctaaaacaaacgaggagcgtaagtgatcactccttcagttccccggctggcgtagcaaagacaataccagaaccgtccacgagacctctcggaaacgcatctttgttgctcccgaactcatccaagccgattggcatcccttgctcgtcgacgtccatcggacgtaccaccgaaatctctgaaacctgcgggatatccaacttgcttagagtgaagtctgataccttcttcgatttgcaatgcgcctctaggtcatccagctccgcttgcagccgaggtctctccacggtcaaatcgatagcagcctttgtgatctggtcgatcaaagccaagttcgactccacctcggccgcttgaccctccagcatcgtgtactcctttttggcgacccacttttccttgatcccagccagcaacctcgaatacgcagcggccagttcaaccttagcatcgtgaaccgccttcttcgctccttgcacagtcgaagtcagttccatcacccttttggagagctcctccctcctctgctccaagcaatgaatctggtttctcgctgtctgcttgtcaacctgcaatcccccgatttccatctccatgagcccgatcttctcagcataacctttctcgaggtctttcgaagtggacaactccatttttaacctctcgatctccgcctgaaaccatagtcaggtcagagtcatcgtatcatcgataaaatatatacaaacaagacataaccgaggcatacctggaacgaaacctcatgctcctgaccatccttcacactcgttgtcagctcctggatgagggtcttcccttcttcgagctcgctcgccgagggaaccttgctcagacgttgctcatagtgagcgaccagcttgttcgtggcagctatcgcctgccaaaggttagagctgacataagaatggaattagaaggaggcagttatcaagtattacctggccctccttcaccatcatgtcagcataggccgccgcctcagccatgttcttcactccgcgcatttggcagttcctccctttgatgtggcgaagcaggttcgccaacccagcctcgtcctcaacgatcggatgatcacggtcttgagtgtaagaccagtggaaaggcctgcttcccgcagacccccaccagaattggaagactgtctcacctcctgagaccgagtcggaccttggaaggaggacctgcccccacctcttgatcctcggcctccgtattgggacatacccgaggactgcttgtctgcggacatggcttcctccgggttagcaaccgcaggttctaccctctcctctcttggaggggcgaccttgtaacgcccgtgtaccgagttagggagtaaccaagatcttacacacgcgaattcgaggaagaattcagtttaaaggcggtagacttgtaacgaccgcgtcccgcgttcataaagaggccggtttgttttaggggaaaactagaccatggtcgagcaacagactaaaatacttagtcggaagaatgagaaagttcaagctgaaccagctaggtgagctggacaagctagcatgaactagctaccttagctaggtgagctaaaccaggacaagctagcatgaactagctacctaaactagctagcatcacccaatagatgcaaggaacggatgtgacattttggaaggatgcaaggaacggatgtgacctttcggaagggtgcaaggaacggatgtgatgcttcgggaagcatccattcgccccctatataagggaggacgcccaaggcctttgggatcatctcacaacatccacacaccacaaaacattctcaaaacagtcccaacacatcctgaagttgttggtcggaaagggggtgcggctcggcgagtataacttgaccgaactgatgcgcatactacctcccggtccaacggttcgatggaatgtagaggatggagagggtagaccgttcgtcttagagacgaatcggatctggtagaccgatcgtcggatcggatcggccagaccgatcgtcggacggatcggatcagccagacggatcggatcagatagaccgatcatcggacgggtcggatgggacaggccgatcgtctgacagaacgggttggacagaacgatcgtcggatgggatagatcgagaaaggtgttcgaggaagcacaaagataagtgcatccaaacacacccaagggtcgcccatggatgcaatcttaccagtaaagggagaaagcttcaagaatgagtaaggaaacgtgattcaccatataggatcaatatcgcggccgccttcatgtatctatctcctcagctatggtgaaactgatcagagatcggtaagaccaaagggtgactcgacggataaccaacgagaaagtccacggtagaaaccgatggacaaaacggatgttggacccgtgaggaaacctaaggccgacggaagaaggatttcatgggctagcctacgatgatccgatggatgaatccacggacccttgggtgtgataaggatatagttcggatcgtatggatggatcgataagccgaaagctttatcgaccaccatagaccggacggataaacggttagtaaaccgtgggcggtcgtagtaaacgaccggatcggaaacatggatggttcgataagccaagggttcaatcgtccaccatggaatcgaaggggcgtacgtttggaggacggatggaccaataagccaagagcttgattcggccatcatgaaccaaggaaatcgtacgatccccaatctctattgttgtacttagaccagtggggttggttggttgtatggctaagtaacgatagggattggttcatcgattcacgatcgcatacgaatcgttgaacaaataggataaggcgacaaacgggctaaggaatcaaatccgcatattggccgaggtatgtaacgatctagcttactaattaggatagacgtttgggaatggaccgtgaaaataggataaaggaacatgcgattgttaggcctagaatggttagcgaacaatatgcatgtcttgaccgagtaaaggatcgatctatgtctaagggacaaagacgataaaaccggtacaagagttggttagaattaaaccaaggttagaaagacttccactgtgtaataagaaatgattatagaatttagcctcgtaaaggcaattctatgttgaatcgcgaaaaactaagaggttcggccgggaagaggctcgaacttgagtacacggtcgccggacgccgagacgtccgggactgggtctcacaagttggtatcagagcatgcttgatcctaggatggataggtgctcaggaaaacgtcatagtaaggttttggcggataaggaagttgagggattgttgtgtacgaaaacggaaatagttacccaactcacgatcgggaaccaagatattatccttgtagtcaaaacttcaacatgacgggaaagtgggttgatatattcggagatggaccgatatcaatggaatttggatcttgtcggaacttgactaagattgggtacagacttagtcgggatttgactatttctggggttttgatcttacggaaattgaccaagatcatggaaaaaaactacaaggtcaaaaagatacctgtgtcgggaatattgaccgagtccgatggggaccaaggtcggaaatattgacaaagtcggaaaagacttaagtcgagaatatggtcgagtccggaaaaggaccaagatcagaaatttgatcgaatatcggaagagacaaagatcggaaaacattgatcaagtccaggaaaggacaaagatcgggaaataatgatcgagtccgggaaaggaccaggatcagaaatttgatcgaatgtcggaagagacaaagattggaaaacattgatcaagtccgggacaagacaaagatcgggaaataatgatcgagtccgggagaggaccaggatcaggaatttgatcgagtgtcttaagagacaaagatcgggaaacttgatcaaactcggaaatagagatttgatcaaatatgatatctaaagtctcggagagaccaaagatagaaaagcgttcaggagtaaacaagctcttacacccgctgaattcgaggacgaattcagtttaagggagggtagacttgtaacgcccgtgtcccgagttagggagtaaccaagatcttacacacaccaaattcgaggaagaattcagtttaaggggggtagacttgtaacaaccgcgtcccgcgttcataaagaggccgatttgttttaggggaaaactagacaagggtcgagcagcggactaaaatacttagtcggaagaatgagaaagttcaagctgaaccagctaggtgagctggacaagctagcatgaactagctagctaagctaggtgagctaaaccagctggaagactagctagctcagctaggtgagctgaccgacaactcgactgagctcggtgagctgatcgtgtactgacccagctgggtggtccggtcagctgacactcgagctggtggactgtggtagctcacccgtgaaacgatgtctcggccaaaaggtgtaaggtcgagcgggtaccaacgaacggttgcatcacccaatagatgcaaggaacggatgtgacattttggaaggatgcaaggaacggatgtgacctttcggaagggtgcaaggaacggatgtgatgcttcgggaagcatccattcgccccctatataagggaggacgcccaaggcctttgggatcatctcacaacatccacacaccacaaaacattctcaaaacaattccaacacatcctgaagttgttggtcggaaagggggtgcggctcggcgagtataacttgaccgaagtgatgcgcatactacctcccggtccaacggttcgatggagtgtataggatggagagggtagaccgttcgtcttagagacgaatcggatatggtagaccgatcgtcggatcggatcggccagaccgatcatcggacggatcggatcagccagacggatcggatcggatagaccgatcgtcggacgggtcggatgggacagtccgatcgtctaacagaacgggtcggacagaacgatcgtcggatgggatagatcgagaaaagtgttcgaggaagcacaaagataagtgcatccaaacacacccaagggtcgcccatggatgcaatcttaccagtaaagggagaaagcttcaagaatgggtaaggaaacgtgattcaccatataggatcaatatcgcggccgccttcatgtatctatctcctcagctatggtgaaactgatcagagatcggtaagaccaaagggtgactcgacggataaccaacgggaaagtccacggtaaaaaccgatggacaaaacggatgttggacccgtgagcaaacctaaggccgacggaagaaggatttcatgggctagcctacgatgatccgatggatgaatccacggacccttgggtgtgataaggatatagttcggatcgtatggatggatcgataagccgaaagctttatcgaccaccatagaccggacggataaacggttagtaaaccgtgggcggtcgtagtaaacgaccggaacggaaacatggatggttcgataagccaagggttcaatcgtccactgctggaaggacgattgcggaatctgctggagctgcggtgagagcagctacgattcgtcatcggagtgccgaccttttgcttggaagctttcttcttcttcggcttttcggctctggtcgacggtggacggattggacccattccgcctagggttataacgcgcctttgtacttgtggcggagacgccgccgacctagtctctgacgaactctcgtcatcgccgtaactgtggttgctcttgttctaggaatcctctaggttgctcatctcttgatttcgatggagaaagacgagagagatgaaggaaaaagcaaagagggcagatcgagaaagaagggagtagcagagaaacgatggagatagtagaagaaagataaaaaaattctatctctaaaaacgaaacgcagtaaataattaagatggagagaagttaccttgagagtcgtgtgagttgacgtgacgtcaagtggagaggtgggaagttatttaaagccatcatcaccacgattttcgagattgcagagatctctttccgtgcctgatctggaatgtcagatgcggtgcgctgaagagacgctccatctcagccgtccacgtcagcgaccacttatctcgcgtatctcctcaatatctttcggttcaggaacctgaaattaaatcgtttttatcgagtttatcctcaaaatcgactgatctcatcatatctatcatctcatctagaatattttcgcaatcttacctgacctatatgtccgctcatcgagttcgcctactcactcaatgggctggggggcaaatgttggagctggattcccctccaggaatccacctgcgaaaataccaagccagcccacaaagcccaccaagcccaccaagtagaggacctacgcaactaatgagcccacatatgcaaatgggtacttgggccagataagcccgatcacctgatgaagggagatatgcgagtaacaatctaggaactgacgaggagatattcgcggagcggacctgatatctcggaattgacctgccaaatatccaggaggatctccgcagatcccggacagagctaccacgtgcgtagatctatataaaggagcaaggacgacttggaagacacattcaattcagcttacattcacacacatacttttacacttgtaatctcctttcacattgtaaaagctttgtcataatcaatacaaaaagtccattcgttcttagcaatataactctcaaggtttcagtgaagttctagccctcctttctcataatctcaattacaaatctctagtgtgaatttcaaaatccacagtgggcgaatttaagatttgtaaaagacaaaatttgaccaagacaatgatggatacactaagagaagaagaaacctagcaaaaatgaaaattttaaccttatgagattgattaaacaaggagaaactgaatcaaaatctggaaaatctccaacttttaagatccgagaatagaaagaaaaagaaaaacctagatctactttttggtgtttttgatgagagagaaaagagaaaatgtctcaaacgacttccttttttcaagaagatatttcaagtgttttgtgtttgattttgtaagggttggctgattttatagccataaactaattgcattctcagcttttccccttactttttgctcctgaaatttccaccataaacttcgataattcttagaattacaacatgtactttcggattcatccttaaaaatacatttccaattgaacctgtcattaaaccgagattaactacaaatatgcgtttactgtaccgcgattgcgacttacccgattaatcatccacacccgttaaaaaaagggttggctaattaaccaattaaaatttgtcatgtcatctaattaactaaattaaaacaattaatattaaataaataaataaatttattaaaacccactaaacttatttaattattaaatctaatccctaaccatttttttataaacccaaaccgatatataatcccgtttaatgacaaaatctaaaccctaattctcttttgtaaacccaaaccaccatttaaactcgtttaatcgtaaaaaatctaaaccctaatcgtactttctaaacccaaaccggcatttaacctcatgtaattataaaatttaaatccgattataaacccaaaccgatatttaaacttgtttaatcataaaatctaaacctaacccaaaccgatacataatttcgttttaatgaaaaattatattttttaattaaattaaattattattttcaaaattaaatgacaaattcttattggctaaaattaaggaggtaaatataaaatttcacccctaggggtgaacctaagtatttttcattttgtaactaaaaatttaaaattgaaattatatttgttattattatttgttttgtttagtactgtatagttgtaatttgattgttaattcgaggagtacacccgtggtatccaaatttgtcccatctaaactcatagcaccatataaactcgtttcatccaaacccgtcctaccatgtaaactcgtctcctttaaacccatcccgccatataaatccgtcccgtgataactaaaaatcaaattatttttttcttttaaatgatatttttatttaagatacttgttgtcaatttacaatttcaatctaataagaaaaattgtatgctacattgaaattttaacaatttaataaaaatcaatatatgatcgttttgaagattttatatcgaattctttgaacaaaaaataacacaatttcttgttaaatattttgtatcttttaaattaatatatttcctatttgtattttttatcttcaatatatttggttttaatatattttagaaaacctgttcaaataattattaaaatttgaatcccggagatatctttgtgattttctataatttaaagatatatatatatatatattgtttagatttgttgttgagatctttttagtgtctatttttagattttgtctattttctatatatatatattgtttagatttgttgttgagatctttttagtgtctattttttgttgcctttgtttgtttgcaaggtctatcataattaaggtgaagttacaaaaagatctataaagtattatcgtttacatattgattataaaatctgtagattatttttaaacaaattctgtaaattatatgtttaattgtaataatttaaaaattccaaaagaaaaatattaatatcgatattaaatttattttgaagtttcaaattttataaatatttaaaatttataagaaaagacaaaattatgttaacgttttatatatatttataatgtttaaagttcttgtaaaattcaatttataattttcaaaacttcataagttttaaaattataaatattttttaaaaactttaaagctacagttcataaaaagtttgtaaaattataatatttaacttttgataaaaagttaaaatatttataatttttgaaattttgtaaagtttctattctttaaaataaaaaacgtaagaaaatcggataaccactttaattttggacgcctaataaatcaagcttcctgcctactcgtaactggaatcattttggtcttttttatagtatgactctaaacaaatgcctaattttttaagcgatgtgggatattgtacatatattatttctccatcgattgaataatatatgttcattttaaaaaaaattaaattacatcatatataaaaaaagttaatattttattaactattaatattttatataaatttaaaataaattaaatataagatctaataaatttgaaagaagaatcatatatttatgtttaaattaggtaaagatgttttaggaaattagttaaggtaaataacaaatatggttagtttagagatattatatatattaaatttggtaattaaattaatttcgtttttttttttttgtgtagaaaatgggattagaaaccaattatgaaagattcgattgaaaattttcgaatcaaaacccaaaaaaaaatctgacccaattaaattctttaaagtatacttcaaaaatgttaagtagatattatatttttataccaaaaaaacaaacaatacccaaatacagtatctgaatcaaacaatatccaaaaattcaaaaaaaatcgtaaaatactccaaatataccaaaataccggatagtttttgtagctagaccggttactcattcaaaatcattcaaagaaccgaaccaaacaaaatcctgaaaagaaaaaatgaagggaatactaaactcaagatctaaaaacggaaagtaccaaaccgataccgaaccgaatacatttgaatgaagagtattagttttggttaatgaaaaaattgagtaattatttggctatacatatgaaagttgatcgacacatatcaaaatcttgtaactgtcccaaaagcatatttagaaatcatttaatattttcataatatttacttcatgaaaaaatcaataaaaagatttactcaaatcttaaatcttaaatatctttataaccaaaactataaagttagtatcggagactaataaacacaagtaaactatacgacttctcgaaaacctagttgctcaaactcatcaatggcgaaactaaaggttgctggtacatggggaggcatacttgaggtagaactcgagaattggactctaaacatgttgagagacgaagtagctaagcgatcaggacttgatcctgaatcaatcaaactaattttcgccggaaaaatcctgaaagacgacggcgatgctactctaacgctttcgcaattgggtattaaagaaaactctaagatcctctcttgtcgtcaagctgctcctgaagaaggtaagtctatcatggctgaagaagaaagggctcgtcgtctctctcgtgtcaagtaagtcttttcgtttctctcttttgatcatctttgtatttcgttccttgtacatggtttggttgttttctctgtttatgtctaaagtttgaaacttttctatgtctgactgtttgcaagaactcaatttgtgaattagtgtaatgatcctctgtgtctttcgttcttaagccatggtttggttgttgtctttgtttagtgtgtaatataaagtctaaagtttgaacttttatatgtatgattgtttgcaagaactcaatttgtgaattagcgtaatgatcatctgtgtctttcgttctttagccaatggtttggttgttgtctttgtttaatgtgtaagataaaagtctaaagtttgaaactcttacatgtctgattgtttgcaaaaactcaattttttatttagtgtaatgatcatctgtgtatttcgttctgtagccatggtttggttgttgtctttgtttaatgtgtaatatgaagtctaaagtttgaaactttatatgtctgattgtttgcaagaacccaatttagtgtgatgatcatctgtgtatttcgttctttagccatggtttggttgttgtctttgtttaatgtataatataaactctaaagtttgaaactttatatgtaagattgtttgcaagaacccgatttgtggattagggtaatgatcatctgtgtctttcgttctttagccatggtttggttgttgtctttgtttaatgtataatataaactctaaagtttgaaactctatatgtatgattgtttgcaagaacccgatttgtggattagcgtaatgataatctgtgtctttcgttctttagccatggtttggttgttgtctttgtttaatgtgtaagataaagtctaaagtttgaaactttatatgtcaattgtgagtctttgtagtcaatagtgttttcctttgctttattcagaattttggttatactgttgtgtgaacccttgcaagaatttgccaatttagaaaaattgactatgttagtctgagccctctaatgatttgtgattgtctatgtgaatgttgtagagctgcagctacagctttgtccaagagacatgctgatggttcattaccgatccaagactataacatagagctggaagatcaaggaggtcataaagtacagtttggaactgagactgatcagaggtattgcttaatcaggttggagcatggaactgccacctaattttttaatgctaatgagattttttttttcttttttgtgttcaacagtgctgcaatgatgggtcttatgttacatacaaaggcaaaaagtttaatagaaattgaaatgtattccgatgcagttgaagttcttgctatggcagaggttagttgttttttttgttgcaagtacgtttttgttgtggtaatggttctgcaatagcttcctgatgtttgtttgtttggttgttcgtaggaatcatttttgctctgtgatcccaagattctcgaggtcagctctctctcctgtttgcttgttttctgagtctctgcgatgctgaattaacctcatttgtatctttgacatggctgtactatattcttacagcttgttgacaacctccctatgatggaaatagacattgtctggtgttatttcttgctccgggacatcaaatgcctttcagatgctggtgttcgccttgtgagagcaaggaaaggactcgagcgtgctcatgggaaggatctttctcgtgtgaggctccttcaagcaggtcaaagtccagagatggctatgtgagttagttttaatatgttttttttttgtttttcagttgaggaaacccaataaatatgcttatagaggtataagattttgatttttttaattgatagatatttgaggctagagttactagaaggtgtggtggcatatcacactggtcagaatgataaagccttgaatgcactgaagtctgcccatgcgaaattcttgcaggtcagtgagctgtactggtataacttggcgcttagtgatactcaattgttacagaggtataacttgctgttgtgcgtgttgatgtagctacaaatacccgatgaaacgctgtcgctagttatgggtatgggctttcaagagaaggatgctaaaagagctttgcgactgaacaatcaggatattgcaagttctgttgattttcttatcgaagagcgggcgaaaaaagcccaaaagcgggagcaggatcttcagagacaaagcgaaatactgtatgttcttactactgtaattatactagttatgatctttaactttgtagtgactttatgagctctgattcagtgagcagaaaaagtatggagtaacacccatgaagaaagctgttgatatgcagatgcttgagaggctcgtctctattgggtaagtaacaaactgtaaatagttttactgttgtcttcccctactatgagcttctcgatgtttgtaagaaagccttcaagctcccccttgtatacatataagtctttagcttaagaactaatgttggttttagttgttttttcaatgcttaactagtggaaatgttctatttggatatctgaatttgaaacttttcagattagtttatgtatttagtatgacttagagcgtttacttgtgcagatatgcgagggaacttgctgctgaatccctccggagaaatgagaacgatattcagaaggcgcttgatatactcacagacccaaaagttaattcaacgatacaggcttacattgaatcgaggaaaagaaaacggcaagaacaactggtaggcatatcagttgctgaacttgtgtctatgggctttgaacgaggaaaaggtaaatttcccatctggatagtttctgcaattgcatatattgtaaaagtccacggtagagaattgatgatctctggtttgcactgcagctacctctgctttggaagctggtggcagccgagaagatacaatccaaaggctactatctgcatcagtagcaaatccaggaactactactacctctgttataaatgcaacaagtagcacaaacaatgtgggtgcggagagcagtggttttggcggtggggcagagcaggactctgagatgaaagatgaaacaacggatgacattgcaaaccgagcaagcacatccagtgacggcatggaagaagagcgggactctgagatagaagatgaaatagcagacgagattgcaagggtcgatgctttgtcggcttatgatatcaatcttgacaaggaaattgaagctataaatgagtacctggccatgctggatgcatcccaggagtcttgttgaagagcgggtcgttctggagaaaagttggagataacgaataataccgagttgttgcattgccaatcttggttggtatgcttgctaccttacttagtatgtttagtaggatttgctatgcagaaactgattcatgagagtgatattatcttgttgcttcttagtttaggggttttaacaaattttggggattttttaacacagcttgacttttatataactactatacctttttagtccgtaatattgaaggtgcttgtctctaaaatatttctgacttgccatgttaatgtgggttaaaaagccaactcaaatccagcctacgagaaagctggccaataaaaactaaagtcgaataacaaaaaattaagtgagcactaatttattttaaaattaaagtaatgtttattttatacaagggtgaaaaaattgagttgttgctgaagtaagatgatattgatgtgagaacaatagctcagaagatgcaaatgaactttgcaaagtatcgggatatatacagtgctatctgctttagatccaaggttacaatttcaaatacttaaagttatatttatttcttacaatgttttaatagttgatcggacttattagaaatcaaataggttcactattttatatctaattttttgatcatgtatcaaatgcatacgcaaatcatgtaatggtaaaagaattgtaataaatgaataggaaaagatttttttttgccaaaaacaaaatgtatatatagatatcaaatatttattctcaaatcattttttgtaatgtaatgttaaattaaattcagaaaaatataaaaaatggatcaaaaatttttttttatataatattcattgtttttaaactcgacctggatggtaaaccggactaccttctgagtcacgggtcattggtttgcttgggttcgatcatagattaattgattaaaatttatttaatatattttatatttacacatattatatagtttttataaatgtaaaaataaaagtaatcatattgtgtttaacaaaatatgaagtttaacaataataacaatgtgattaaaaattttaaatctaactaaagtataaaaccgcaacaaatattaaaacaacatacataaataaactaataaacatcgcgaattcaaaacaagtcaatatttttgggagatttgtaaaactacccttttttactacccttttgcaacaataccctttatcttgtccaattctaaaaaataccccttccatttaacacaatgaccaaattaacctcatctaatatgaacatgtaattagaaactgaaattttctcaccaaatttttggcgccaaaatttatttttcccgccaaaaacaaatttccgccaaacctttttccgccaaaaaaaaaattccctccaaattttttttcgtaacaaattttttctcagccaaaaaaaatcttttaaaaatccttgtaaatttttttgacgggaaatagatttacatgggattttaaaagggttttaaaagatttataagggattttaaaagaattttaaaatatttacaagagattttaaaagggttttaaaagatttacaagagattttaaaagggttttaaaaaatttacaagagattttaaaagggttttaaaatatttacaagggattttaaaatgagattttaaaaggttttaaaaagatttacaagagtttttaaagggtattcttgtaaattctttaaaaatcttttaaaaaccattgtacatcttttaaaacccttttaacccatttaaaaatctcttatcaatcttttaaaaccattttaaaatcccttataaatcttttaaaacactattaaaccctttaaaaatttcttaaaaaagctttgtaaatcttttaaagccctttaaaatctgttgtaaataatttaaaactcttttaaaacaattttaaacccttttaaaatctataaagaaaacctttgtaaatctttaaaatcccttgtaaatcttttaaaacccttgtaaaatcctttgtaaatcttttaaaatcccttggatatattttaaaacccttttaaaatcccttgtaaatattttaaaacccttttaaaatcccttgtaaatcgtttaaaacccttttaaaatcccttgtaaatttatttcccgccaaaaaattcttttttgcgggaaaatttgtttgaaaaaaaaattggcgggaattttttttttcgaaaatttttggcgagaattttttttcgaaactttttggcgggaaattcttggcgagaaattcttggcggaaaatttattttggaatattttaggagaaaaatattaatatttcatttggtcaacctaaaaccatttccaaattgggataaaatggtcattaaaaatttaaagagagtaagaatgaaaagggctaaaaaaaagggtagagttgaaaaggagcatcatcaaaagggcattagaaagaattatttctagattcgaaccactactgtaatcccgagctatagctcttgtctcattgagcttgtatggctcacattaaaaatttatccatcatattgtgatgaataaatcttttacatacatgaaaaaatttctatgtacgaacataattacagagacgagagactggtttggtgactcatgcattcatctctaatgatcttgatggatcatgaaatcatcaagattcaagtcctcctaaaaataaattgatacacatgaacgtcgacacttgatatccagatgtatatttagttgaaagtagctagtctttattttttattttatttttgatcaaacttagcattctattaaaaataaaaatttaacctccataaaaagaggatacattaaagctacaaagaggtgaaccaaccaacaaagcgattgtgtaagaaaggaaactaaaactagcaacaaagctcaaatagagacttagggataaggctgaactcacgagttctgccttagtagaatcttaacgaaggccatcgataacgtagtcatcatgaaatttgtagtctatagatagtatataaaagaaagacggtattattttcttcttaattgtccatgtttaattagaacacaaaagaacgatcacgatatcactcaacgacggtaagaagttagaagttagaagcgtcgctggtgtataagaagctccagaattattgctcacccagccacagattagaccacctaaaggatgattgttctctagtggcaagacgttctcaagaagacatgatgtcccccgccgttctagccctagagataagagagatggtggctctgattatggaacctttaaagggttttcccactcgaggggatgggaccataccccctcaagatcccatcacacaagatcaggttaccaaacagaaagatctagaatgtttaaggaagctggcgccgatcttagaaaaagagaggatagagctttagcaagatcctcccctgagtttagtgaacctggcatatgggctagtgtttcccttcctcacaatctgagagcttctctctctaggagacctctggcaccaaaatctcttcagtcgcaggagagatgatccttgtcaatttctggatccaggcttgtagaaagggaaggaagtggggtgaggaacaagggcaaagggaagattttggatagtccctagacccatgagataccagtatctgtcttaccagctgttggccttgctgggacctctaaaaggcatggatctcgggatcatgtctaggtggaagctt

SEQ ID NO: 208 - DNA, 62915 bp, Arabidopsis thaliana
tgcaagtacgtttttgttgtggtaatggttctgcaatagcttcctgatgtttgtttgtttggttgttcgtaggaatcatttttgctctgtgatcccaagattctcgaggtcagctctctctcctgtttgcttgttttctgagtctctgcgatgctgaattaacctcatttgtatctttgacatggctgtactatattcttacagcttgttgacaacctccctatgatggaaatagacattgtctggtgttatttcttgctccgggacatcaaatgcctttcagatgctggtgttcgccttgtgagagcaaggaaaggactcgagcgtgctcatgggaaggatctttctcgtgtgaggctccttcaagcaggtcaaagtccagagatggctatgtgagttagttttaatatgttttttttttgtttttcagttgaggaaacccaataaatatgcttatagaggtataagattttgatttttttaattgatagatatttgaggctagagttactagaaggtgtggtggcatatcacactggtcagaatgataaagccttgaatgcactgaagtctgcccatgcgaaattcttgcaggtcagtgagctgtactggtataacttggcgcttagtgatactcaattgttacagaggtataacttgctgttgtgcgtgttgatgtagctacaaatacccgatgaaacgctgtcgctagttatgggtatgggctttcaagagaaggatgctaaaagagctttgcgactgaacaatcaggatattgcaagttctgttgattttcttatcgaagagcgggcgaaaaaagcccaaaagcgggagcaggatcttcagagacaaagcgaaatactgtatgttcttactactgtaattatactagttatgatctttaactttgtagtgactttatgagctctgattcagtgagcagaaaaagtatggagtaacacccatgaagaaagctgttgatatgcagatgcttgagaggctcgtctctattgggtaagtaacaaactgtaaatagttttactgttgtcttcccctactatgagcttctcgatgtttgtaagaaagccttcaagctcccccttgtatacatataagtctttagcttaagaactaatgttggttttagttgttttttcaatgcttaactagtggaaatgttctatttggatatctgaatttgaaacttttcagattagtttatgtatttagtatgacttagagcgtttacttgtgcagatatgcgagggaacttgctgctgaatccctccggagaaatgagaacgatattcagaaggcgcttgatatactcacagacccaaaagttaattcaacgatacaggcttacattgaatcgaggaaaagaaaacggcaagaacaactggtaggcatatcagttgctgaacttgtgtctatgggctttgaacgaggaaaaggtaaatttcccatctggatagtttctgcaattgcatatattgtaaaagtccacggtagagaattgatgatctctggtttgcactgcagctacctctgctttggaagctggtggcagccgagaagatacaatccaaaggctactatctgcatcagtagcaaatccaggaactactactacctctgttataaatgcaacaagtagcacaaacaatgtgggtgcggagagcagtggttttggcggtggggcagagcaggactctgagatgaaagatgaaacaacggatgacattgcaaaccgagcaagcacatccagtgacggcatggaagaagagcgggactctgagatagaagatgaaatagcagacgagattgcaagggtcgatgctttgtcggcttatgatatcaatcttgacaaggaaattgaagctataaatgagtacctggccatgctggatgcatcccaggagtcttgttgaagagcgggtcgttctggagaaaagttggagataacgaataataccgagttgttgcattgccaatcttggttggtatgcttgctaccttacttagtatgtttagtaggatttgctatgcagaaactgattcatgagagtgatattatcttgttgcttcttagtttaggggttttaacaaattttggggattttttaacacagcttgacttttatataactactatacctttttagtccgtaatattgaaggtgcttgtctctaaaatatttctgacttgccatgttaatgtgggttaaaaagccaactcaaatccagcctacgagaaagctggccaataaaaactaaagtcgaataacaaaaaattaagtgagcactaatttattttaaaattaaagtaatgtttattttatacaagggtgaaaaaattgagttgttgctgaagtaagatgatattgatgtgagaacaatagctcagaagatgcaaatgaactttgcaaagtatcgggatatatacagtgctatctgctttagatccaaggttacaatttcaaatacttaaagttatatttatttcttacaatgttttaatagttgatcggacttattagaaatcaaataggttcactattttatatctaattttttgatcatgtatcaaatgcatacgcaaatcatgtaatggtaaaagaattgtaataaatgaataggaaaagatttttttttgccaaaaacaaaatgtatatatagatatcaaatatttattctcaaatcattttttgtaatgtaatgttaaattaaattcagaaaaatataaaaaatggatcaaaaatttttttttatataatattcattgtttttaaactcgacctggatggtaaaccggactaccttctgagtcacgggtcattggtttgcttgggttcgatcatagattaattgattaaaatttatttaatatattttatatttacacatattatatagtttttataaatgtaaaaataaaagtaatcatattgtgtttaacaaaatatgaagtttaacaataataacaatgtgattaaaaattttaaatctaactaaagtataaaaccgcaacaaatattaaaacaacatacataaataaactaataaacatcgcgaattcaaaacaagtcaatatttttgggagatttgtaaaactacccttttttactacccttttgcaacaataccctttatcttgtccaattctaaaaaataccccttccatttaacacaatgaccaaattaacctcatctaatatgaacatgtaattagaaactgaaattttctcaccaaatttttggcgccaaaatttatttttcccgccaaaaacaaatttccgccaaacctttttccgccaaaaaaaaaattccctccaaattttttttcgtaacaaattttttctcagccaaaaaaaatcttttaaaaatccttgtaaatttttttgacgggaaatagatttacatgggattttaaaagggttttaaaagatttataagggattttaaaagaattttaaaatatttacaagagattttaaaagggttttaaaagatttacaagagattttaaaagggttttaaaaaatttacaagagattttaaaagggttttaaaatatttacaagggattttaaaatgagattttaaaaggttttaaaaagatttacaagagtttttaaagggtattcttgtaaattctttaaaaatcttttaaaaaccattgtacatcttttaaaacccttttaacccatttaaaaatctcttatcaatcttttaaaaccattttaaaatcccttataaatcttttaaaacactattaaaccctttaaaaatttcttaaaaaagctttgtaaatcttttaaagccctttaaaatctgttgtaaataatttaaaactcttttaaaacaattttaaacccttttaaaatctataaagaaaacctttgtaaatctttaaaatcccttgtaaatcttttaaaacccttgtaaaatcctttgtaaatcttttaaaatcccttggatatattttaaaacccttttaaaatcccttgtaaatattttaaaacccttttaaaatcccttgtaaatcgtttaaaacccttttaaaatcccttgtaaatttatttcccgccaaaaaattcttttttgcgggaaaatttgtttgaaaaaaaaattggcgggaattttttttttcgaaaatttttggcgagaattttttttcgaaactttttggcgggaaattcttggcgagaaattcttggcggaaaatttattttggaatattttaggagaaaaatattaatatttcatttggtcaacctaaaaccatttccaaattgggataaaatggtcattaaaaatttaaagagagtaagaatgaaaagggctaaaaaaaagggtagagttgaaaaggagcatcatcaaaagggcattagaaagaattatttctagattcgaaccactactgtaatcccgagctatagctcttgtctcattgagcttgtatggctcacattaaaaatttatccatcatattgtgatgaataaatcttttacatacatgaaaaaatttctatgtacgaacataattacagagacgagagactggtttggtgactcatgcattcatctctaatgatcttgatggatcatgaaatcatcaagattcaagtcctcctaaaaataaattgatacacatgaacgtcgacacttgatatccagatgtatatttagttgaaagtagctagtctttattttttattttatttttgatcaaacttagcattctattaaaaataaaaatttaacctccataaaaagaggatacattaaagctacaaagaggtgaaccaaccaacaaagcgattgtgtaagaaaggaaactaaaactagcaacaaagctcaaatagagacttagggataaggctgaactcacgagttctgccttagtagaatcttaacgaaggccatcgataacgtagtcatcatgaaatttgtagtctatagatagtatataaaagaaagacggtattattttcttcttaattgtccatgtttaattagaacacaaaagaacgatcacgatatcactcaacgacggtaagaagttagaagttagaagcgtcgctggtgtataagaagctccagaattattgctcacccagccacagattagaccacctaaaggatgattgttctctagtggcaagacgttctcaagaagacatgatgtcccccgccgttctagccctagagataagagagatggtggctctgattatggaacctttaaagggttttcccactcgaggggatgggaccataccccctcaagatcccatcacacaagatcaggttaccaaacagaaagatctagaatgtttaaggaagctggcgccgatcttagaaaaagagaggatagagctttagcaagatcctcccctgagtttagtgaacctggcatatgggctagtgtttcccttcctcacaatctgagagcttctctctctaggagacctctggcaccaaaatctcttcagtcgcaggagagatgatccttgtcaatttctggatccaggcttgtagaaagggaaggaagtggggtgaggaacaagggcaaagggaagattttggatagtccctagacccatgagataccagtatctgtcttaccagctgttggccttgctgggacctctaaaaggcatggatctcgggatcatgtctaggtggaagctttcgaggctgcagttgatgaagttagagaagtaatgtcctagtatgtcaactgtccggatcccacagaaagggctacaagaagagagagtgtccgataggcagaacagttaggggaaattgaagctactgtagagagaatgttgaggtcagctattccaacacctgtctcatccctccatacagaagtaacttcctctagcagaggcagaggccatgtttctcattggctgggacgtgttaatggaccaacagacaagctaagggtcaagaagatattggtcagcaagaggaagccaggcagaccaacacggcgtaaggcaagccctaaggctttggctggggtcaaatcaaagaagcagcaccggctcaaccaagccaccattcctttctcgcacagaaggcttaaccttgatcagtctctggaccattgggaattcaaggctccggaatccatccacaagcctcatgtaaaaatcatgagctacaactgtcaagagctggggaatcctaagacagttcgcaaagtgaggaagatccataagaagatctcccttgatatcatcttcctcatggaaacgaagaactagtctgctacaatggttaagaagctagagtttctcaagagctacaagtctctactagtccctcctcaaggtcatggaggaggagggttagctttgttttggaagtctgatttggagatgttgatttcctccacatgtgataattttattgacattactatcactttccaaggatcaagtttccttgctacctttgtttatggtgaacctgaccagacaaagaggtcgtctctctggaataccctgttggctcttggcgaatcacgggatgagccctggttcttcatagggtattttaacaaaattttagataatactgaaaaggctggaggaccagaaagagctgagacttcctttgttgagttcaggtccctattgtcggagtgtgggctctttgatctaaagcattcaggcaatttcctgtcttggagaggagtgaggcatttccacttagtgcattgtacactggatagagcattggctaacactgcttgctttgatctcttctctcgagggcgcagtgaatatatgaagtttgaagggactgaccatagacctgtcctatctgataataactttttaagatcaattaatcctaaagcactatcatgtcgttgtagtactgaaggttgtcaatccaaatgggtgtgatgctagcaatcaagatgcaatcagagttcacagagtcaagccaagcaataacaggttttggggtgttctagcagtcctaagtgaatatggaggaaacagaaaatcaagcagaaacaataaaacactcgaccaacacaactcgtttcagagcactgggtggggtcgagtgactggtcaagtaacagacagaaaatgtaacagggatactcgactacaaagacaactaggtggtcgagtattaggtcgagtaacacgcaaaaattgcaaaaactaagtaacggtcacaagatgcagtaaacagtagtagagtaaacaaagaaatcaattagttaaagaattcccgaggatggggtaattgagtagttttgtttcctcagtttacaggtgattgacatgctcaataaattatccctagataacaagttcggtaaccaaatctaagtgccaccgcaacagagaccctcaagttaaactagtcccaaactcaatcagcattcacgagagctaacctaacaggcattacgaatcaacaagttaaagccaaaacgctccctgcaaccaatacatgggtacagagccacaaatttctggaattattgtttcagacatttcatcgaacatcttttgggcgcggaaatgtttgggctcaaattccagttgatcagaaagcaataggcattaagaacaactaatccagaagggatctataaatcaaagtcaaccacctagcatactgagaattctaaactacactaacccatcctcagaaacttattcactacttagacatcattgcagagaacataaacgatgaatagaatgaaaacataatagcaacatagtaatagcaatatgaaaacaggatgaacaacttagtaaacgaagatgaaaagcaaatactgaatactgaatagattaagaacacagtgtctgcggaataaaacttagttaacgaaaatttaaaatacatgctacttatagcgaaatattccgaaactctaatactcaaaacgacgcagtatcgagacggattaagaacggtactcaacccaggtggtcaagtgaatggtcgagtgataagctggagtcttcttctcttccttgtgctcgagtgtctggttgagtgcggaatggagaaaactctgaagctgacagtcgagtatgaagtcgagtgatagagatcgtggtacttggcttgttggtagagcgattgatcgagtggatgatgatggtgatactcgacctgttgttagagtgattgatcgagtgaatgatgatggtgggattgaccatgttggtagagtgattggtcgagtgaatgatgatggtaatactcgtcctgttggtagagtgattggtggaatgaatgatgatggtgggactcggccatgttggtaaagtgattggtcgagtgaatgatgatggtgatactcgacctgttggtagagtgattggtcgagtgaatgatgatggtgggagtcgggcatgttggtagagtgattggtcgagtgaatgatgatggtgatactcgatctgttggtagagtgattggtcgagtgaatgatgatggtgagactcggccatgttggtagagtgattggtcgagtgaatgatagagtgttacggtcgagtgatttgctgtagaggttgtggccgagtacttcaggaactcgaggatgactgtactcgagctcgtggtcgagtatgttgatttgatcaggtccactttttccaattagctcaccaacagctccaaatcacctgaaaacaacacaaatatgcaatatgcatgcaaaactatcctagacatgcaaagtgatgaaaaatgattagaactggtataaaatagtggtgatatgacacaaatggatgctcaaaacgtgtaaaatgcacacttatcaagtctcccaaacttagtctttgcttgccctcaagcaaacaattaagaacaagctggaggtgaggtttgaaagcggtgactcagaaccaaagcatgagatatgacaattaagatcaatgtttaagctaacagttctaaaatgcgaggtgatcgacttctacttaaaaactttagccatgctctattatgatccaaattcacacttagttgcacaatacgtcaagatcaaccaatccctttaatattcattaagtttgggaacgtgaatcaagatatgcattgctagtgaactcatttggataaggatgggttatgagacaaagatggtcccttaaaggtggttcagactttaataacacgggactctcaatgaaaaaggactgagctttagaagaatgataaaggtaagtgtcaacctatgcatataagaatagcaccacatctacccaatgacataaaccgtgaataacaagtagatggtcgtatctctaaacccaatgatgatcctaagtctacccttttgcactaaaggcatatttcgattttttcttggatcaactcatttcctttcatttctttggctcttgcttttaaggagaagcttttcttaaactctattagtctagtcttgtgaattgggtttttcttaaactctaatggctcttatgatttttttcctttcttttttgtttttgttgccattttttttttctagagtatatcttatcatatctatgcttcccaaacattcactagacctcaatatgattttcagcttccttctcctaaagatcctaacccgttttctttctttttcttttcacactcaatctcaatctccaaataagttctcacctattcctaccaagtccgaaaacgcggattggaactacatgagtaactactcttgtcggctcaaacctaacatgttctaccaagctcaatcctgaaaataggcctcacatgctctcacaaataacatggcttgaaagaagggttggttatgggtgggggaactactccaataatggaagcagcaacttggattagcaagagtggtgaataagtgaaagaaaatccaaatatgtattctgtctatgagttcaaaaccgatgcaaacatgataattataagtcggattcaagttcaaattgacaggaaaaggtgtcatgacatgcaacgactggtatctatagaacatggtgcggttttacttcaaagtcattcaaatgcatcagagaactaataactcatttaatgaatcatcatgcttacaaggttatctcctcattgtcccctatgcatatgcaacaattctaaatgaaacactctagactctatcctaaatgtaatgcaactacatgaaccctctgtttttgtgaaatcattttctgaaatttttcaattttttttgttttttctatgccttagatgaatgcagactcgacgcaagagtatatacaatgcaacacacacttcctgagccctcccccaaacttaaatcacacagtcctctgtgtggccaaatttggaagagagtactcaggataaaacacatcacataaacaaaatataaacaagagatggtatagtacaatggtgaattgaggcacttacctaagtcaaagaatgaacggagttggtcgtcaatggctgcctgtgattgctcccaggccattgaagagtcgccttattctgtctcagctccaacatgtcggtactcgacctcccttcttctactagggccagcactacggtagagtgatctcttggcgtggataagctaaaacatggtcgagtatttttcattactctgtggtcgagtatactgatgtactctcatagccagaatccacttcactcatctctttatacttatctcttgaagacactaaccaaatgcatcaaaaacaacaaggaaaaataaagatatgtacaaagatagacatgggatttcctcccaagtgagcttgttttaagtcctaagcttgacttctcatactcattaggcttagggtgggttgtagagaggaaatgaggtctcctcccttcttgagtagaatgatcatcatactcattagggtttcttgacaggtctgcaattgggtactcagtggccatgtcctcacagtaaggttcctttttaatcaagatagtcttctccactaaactattccgatgtgaattcacatccttctttgctgaccagaatagtggctccctcgtcaggggcgtccttgatgttgagtggtacttggttggcttttccattgagctccttgatttgatccttcagctctttcacaatatatgttagctcttgtatggctttgtcctgccatttagatctctccttgagttctaactaatcatttgatgtttgagtgcttgccttgagttgtttggtcgagcatgagctttcaggacaagttggaggcttcttcgagttgttggtggcatcagttggtcgagcatgtgttgaacttacttcattagcttccataacctttgtgtcagaccccatcaagcccttgtaaacctttgagccaactgcagccttgtgtgagtctaatggcttctcagaactcaaagtttcactagggagatacccagctttaccactcttggtcaaaacagtttttgaattatttgcttcttcaagtttcactagcagttcaccagctagccgatccacttccttaactaagaaggtctgttcttctattgtcggcttcttcatagcatcattgatttcaaacttcatttcaaaattcttccccacattaagatcaatatttccttgcttaacatttatgattgctccaggtgtagccaaaaagggtcttcctaatatcaagggatattttggttcttcatccatgtttagcactacgaagtctgtaggcacctacacatttccaatcttgataggcaaatcttctaataacccatgaggtagtctaacaaacctatcagccaagatcaaggagatattgcagtatttatacttgttgaaacccaaattcttagctactgagagtggcatgagatttactgatgctcctaggtcacaaaggcatttattaatgaacctagggagcatggtagagtgaatgaaccagggtctcctagcttttctgagacatcgttctcctgtatgatggcattgcactcatggctcagaactgttgttttttgaacctcttgaattctcttcatgatcaagtctttgaggaacttttgggaatccgggatacgcgtgcgagcatcagcaagaggtatccttaattcgacttccttggtgttcttggcaaacatagctctgtacttattttctaactctttcttctgtcgaccaggaaatggaagtgtgggcttgtaaggaggaggaatgaatgctttctcattgtttttagcagcaactagttttagagcagcggatgatgttaatggatttgttggtcgagtatcaaggtcgagtatgggctcgagtacttcaattggtttatcaacttgatcttcattgagactgaaatcttccccatcttggtatgcactgtcctcagtgactgacttgggtctctctctagtggattactctcttccactccttatggtgatagcatgaacattagcatactccttgggattctgaattgacttccctgaaagtcctgtaactttgggagcagaggtagatgcggattgtccttccaagtatctgactttggaattcaacgcctccacttttgcattcaggtcattgtagttgcagtctaccttatggtgcaattcagatatctttttagcaatctcaatggagctagatacttgtccctgtagcagctattgtagcatttgtttcatgtcagcgtcaggagcagcatgaccttggtgttgctgaatgcaaaccccggtggtggttgctgttggtagttcccctgaaattgctgcttggaacaaaaccttgattatagggaacaaaaggtttgttttgaccttgttgttgctgtggaggatacacttgatcctgtggattagcaacgttagtgctgcggtaagagtggttggggttgtttgtcttgaagttgttgtaccctttgtagccaccttgattgtggatgtagctaacttcctcgtcatcaacaaggaagtgcacatgcttctgctggctaaaaagaatcttgtcctgcttgtcattcagtgctttgatctctttcttgtgtttgtcatccgagtcagttgttcctctgatggtcctgttgcagtcctcgttgtaatttccatctgactgagctaggttctcaaccaattcccagccttcttcaacatctttgttctggaaatttccattgctggcggtatccagaagcattcttatgcgtggtagaacacctctgtataaagtgctgagcatagaggctttcttgaagccatgatgagggcattggttggtgtaacccttgaaacgctctcatgcttcacagaagctttcaccagtcttctgtgaaaaacaagagatctcatttctgagtcttgcagttctggcgttggagaagaactttgccagaaaggccttcttgcaatcatcccaggtggtgattgagtcatgggacagattctttacccagatgtgtgctttgtcgcccaaggagaatggaaacaaccggagcttgaatccatctttactgacaccgttgattttggttaggctgcaaagcatatcaaatttatccaagtgatcgagtgggtcttccataggcagaccatggaacttgtttccctgaatcatcgagatgagaccactcttaatctcgaaattgttgttttagacagcaggaggtgcaactcttttcctcagacggtgattccttggtgcatctccagcaccaatgttggtgggtacattcgggtcatcttgttcatcagccattttgaatggatggtggtgttcaaggtcgaatgtgtttatcctttccctaagtcttctgttgaagcagttgatgttatcgttgaaaaggagattctggttgtgttttgatctagtttgcatacatcagagttgtacctggatcaagaagacaacaactgaaaaacaaagttagtaaccgaaatgaaaattaaaatagaacttgatctaagaaaatccgaaatcttaaatgtaacaaacaaacacctaattagcaacgacgccaaattaataataggtttttatgatcaaatatcctaaaacaccaatcatgtcgttgtagtattttaggttgtcaatccaaatgggtgtgatgctagcaatcaagatgcaatccgagttcacagagtcaagccaagcaataccaggttttggggtgttctaccagtcctaagtgaacatgcaggaaacagaaaatcaagcagaaacaataaaacactcgaccaacacaacttgttgcagagcactgggtgtggtcaattgactggtcgagtaatagacagaaaatgtaacatggatactcgactgcacagtctgttaccagacaacagggtggtcgagtatcaggtcgagtaacatgcaaaaattacaaaaactaagtaacaaatgacaagatgcagtaaacaatagtagagtaaacaaagaaatcaattagataaagaattcccgaggatggggtaattgagtagttttgtttcctcagtttacagaggtgattgacatgctcaataaattatccctagataacaagttcggtaaccaaatctaagtgccaccgcaacagagaccctcaagttaaactagtcccaaactcaatcagcattgacgagagctaacctaacaggcattacgaatcaacaagttaaagccaaaacgctccctgcaaccaatacctaggtacatagccacaaatttttggaattagtggttcagacatttcatcgaacaccttttgggcgcggaaatatcttggctcaatttccagttgatcagaaagcaataggcattaagaacaactaatccataacgatctataaatcaaagtcaaccacctagcatactgagaattctaaactactctaacctatcctcagaaacctactcactactcagacatcattgtagagaacataaacgatgaatagaatgaaaacataatagcaacatactaatagcaagatgacaacaggatgaacaacttagtaaacgaaaatggaaagcaaatactgaatactgaatagattaagagaaatccggattacaaaaacttcaagaacacagtgtctgcggaataaaacttagtcaacaaaaatgcaaaatacatgctatttatagcgaaatattctgaaaccctaatactcaaaactacgcagtattgggacggattaagaacggtactcgacccaggtggtcgagtgaatggtcgagtgataagctggagtcttcttctattccttgtgctcgagtgtctggttgagtgcagaatggagacgagtatgatgttgagtgatagagatggtggtactcggcttggtgctagagcgattgatcgagtggatgatgatggggatactcgacctgttggtagagtgattggtcgagtgaatgatgatggtgggagtcggccatgttggtagagtaattggtcgagtgaatgatgatggtgatacttgacctgttggtagagtgattggtcgagtgaatgatgatggtgagactcggccatgttggtagagttattggtcgagtgaatgatagagtgtcgcggtcgagtgatttgctgtagaggttgtggctgagtacttcaggaactcgaggatgactgtactcgagctcgtggtcgagaatgttgatttgatcaggtccacttcttccaattagctcaccaacagctccaaatcacctgaaaacaacacaaatatgcaatatgcatgcaaaactatcctagacatgcaaagtgatgacaaatggatgctcaaaacgtataaaatgcacacttatcactttcctttctaggataggaaaagaaaaagaagaaatggttattccgatatgttaggaggctgaagaatatcgatgaactaaaaaccatcctcaaggaggtgtggaatgatgaccctctatcctcaattgaagagagataaggagcctgtagaggggctatagtacgatggacaagagagaagtagaggaatagtcaggtggagatagagcactttagagagcggttagaacatgcaatggtaagccatgttcatgatgagtccctccttcttttgattaattcagatctaaatgctgcttatcaaagagaataagagttttaaacacaaagaagtaggcagaacttgctcactttaggagatcaaattctggattctttcatgcggtgacaaaggggagaacttgtatcaataatctcacagttttggaggatgcaaatgggaccaccttttataaggatagccagtttgcctcagtgatctcaagttgttaccaggaactcttttcatcacatctgacttgtcctgctaagataaggaaatttgtggaagatgcaatttgtcctcaagtctctgaggagattaattcagttctgataagggatccttcctccctggaaatcaaggaggcttcgtcgacattgaccctgacaaagcccaaggctccaacggtttctcagctagtttctttcagtcaaactgggactttgttggcgatgccctagtaaaggaaatccaaggttacttctcaaccagtgtactccaagcttcaatcaacaaaacttttatcaggcttattcccaaagttcaagggccaaggagggtactggattacagaccaattgctctctacaatgttgtgtatcaggttttctccaaagtgctaaccagaagactcaagacagtcctgtcccctctaatatgtgagaaccagtctacttttgtggctggtagggcaatcttagataatttgcttatcacacatgagatgcttcattaccttaaggtttatagggctcgaaaaacgtctttttagctatcaaaacagatatgtctaaggcttatgacagattagaatgggagtttattcaggctgttcttgatagaaaggatttctatccaacttgggtaaattggatgatgtagtgtgtgaagacaatctcttattccttcatcattaatggagctgctatgcgtgatgctattccatcccgaaggctatcaacctgggctatcaaagcattttgcttctctcggactgccaagtactcaccaaggcaatctcttcgaagtcctctctctctaaaatctttgagatcctccttgacctagcagattttgttagtcgttgtagttcctttaattgttgtttcattccttgctcttccaatagagtagcagatgctcttgcaaaagactccgttgttgtattctcaaacgtttgattaatgcaatgcggtttgacaaaaaaaaaaaaacatttattagattttataaattataatttaacactaaatttttgttatttttatattaaaatttgataaaattgatcgaaataaacaaattttaatattgatatataatataagcctgataacaatgtattttactcattttaggcatgtatttatcatcatttagcttagtgatcactcattgtttcatatcattttgcaccacatttagcttattttgcacacttaggcatttaggatcactttgcatacatattacatgttttggtgtgttttcaggtgcacaaggagtttacaaaggcaatcactcgatcctctactctatcaaaccaagagggaagcagcagcgcaaaccactcgaccaaacactttatcaaggcagctatggaggaagcagcagacaaccactcgacccttttactcgatcctctactcgaccaaatactcgatcaagggcaacccattttacaagacttgttgatcgtgcaaagcgccttcggatcgtcctcatttcccactcaaccagacagctgaacataagaagaggagaggaagaagcaactactcgaccaattgatcactcggagcatggaagcaaaggcgtagactttgtagcaccctctttactcgatccccaagatcttcaagtctcttgtcttctagtgaatctagggttttcgagattttagtataaataggttctttggggtttgtccaaagaaccaagcttttattctgtagtttttctttgtgttttagaatcttgaaatattaattactcttaatctatttagttgttgtatttagttctttgagcaaagttgtttatcttgtttagatatacatttatgggtttgtgtgttgattatgttgcttgagtagtgattaaagttcttgaggatggatagattagggtaatctctaggatagtcaggtggttaagattaggttatatcccttctggattcgttggccttaatgcttatttcactcagtttagactggaattcgacccaaaagacgttcaaatcgatgcctgatctaggaattctagagatttgtagattctatcccaagagattggatgtttagactacttaatgacttttgatagattgttccttaaagcatgctttgctatgtttcatcaacgagagttgagattaggaactggtaaagttatgaggatcattgtcacgagagtggattgatctggttttgaatctattgtctagggtatttgcctttcgcctgttagccacctgatgaaccctagagttgcccttatcaatgaattcatccttaggacttctattcttcttagatttatttgtattcaccccttgattgcacttttatttacctgttatttcattcacctgttgagttacctgttatttcattcacctgttgagttacctgtttttgcattttatttcttaaatttgttacatgttggttccactcgacccaatgatcgagtagggcacttaagttctcacttttgttgtttgaatcctttaggattgttactagaatcccaccatcattataacatggcttgacttagttgcttctatacacatcttgattgctagcaataacagtggactggtttgacaccccctatagctgcatcgacatgttagtgtttaaggagaaattgaactaaacatcacattcaccatagttaggcctaaaaatctaactatcaatttgacgtcgttgctaattcattgttgcatggttacattcaagataccagaaaaagttaagatcaagttcttttacattactcaagttactaactcatcttttcgtctgcttgtttttgtggtataggtactaatatttgtgcatgcacactcggtccaaaggatctgcacacctactacctttcaaagacagaattgacagactagctcgtgagttataagaaacaaaagcaaaggaagactgtgatcaacaaagaccagctcctacggatcaacagaaaagaggagttgagatacaagacccacctaatgttgatcaaccaagaaacattggtgctggtgatgtcccaaggaatcatcaccaaagacaaggaatagtgccaccacctgttcagaacaacaactttgaaatcaatagtggtctcatctccatgatccaaggaaacaaatttcatggttttcccatggtagacctcttggaccatcttgacagttttgataggctctttagccttaccaagatcagtggtgtcactgaagatgggtttaaactaaaactatttcccttctctttgggagacaaggcacaccactaggagaagactctgcctctagactccatcaattcatgggatgattgtaagaaagcttttcttgccaagttcttctctaatgctcgcacagctagattgaggaacgcgatctcaggcttcaccgagaaaaacgatgaaacttttgtgaagcttgggagaggtttaaaggatacaccactcagtacccccatcacagttttaagagagcttccatattgagcacactctacagaggagctttaccaaagatccgcatactgctcgacactgcttccaatggaaacttcatgaacaaggatgtagaagaagtatgggagttagtcgaaaatctggcaaaatctcatggatgctacaatgaggattatgatctctcagtgagaggaactggagaaactgaagatagacaaaagaaggatatcaaggccctcaatgaaaagctagacaaactcttattgactcagcagaagcagatacgctacattactgatgaagagcacttccaaatgcaagaaggggggaatgatcaaactgaagagatcagctatattcaaaactaagaagggttcaacaagggctacaacaactacaagcccaacccaaacctctcatacagaagcactatgtagccaacccccaagatcaagtgtatcccccgcaacagaatcagtctaagcctttttgttcaatacaaccaaggttatgcctctaagcagcagttcaatggaggataccaacagccaaatcaaccaccagggttcactcaacaaccaaagcagacagcaggagcacaagatcctgacacaaagcagatgcttcaacaaatcattcacggtcaaactactggcgctgtagttctggaaaaacgattggcttagataaatagtaaagttgattgttcctacaatgagctaagaagcaaatatgaggatctaatatccaagatgatatacaaggaaagccaagctgcttccaatacgtcctccaagtatccagggccacattcaggaaaagccattcacaaccctaaagaatatgcacatgcagttacacttcgcagtggcaagaaactgctcaataatcagaccaaagagagatcactaaggatagtgaacttcaagaaggggaggatccacataaaaacgaagttcaaattgatgaaccaactaaacttgatcagccttcagcttcactcgaccctctactcgatcgagcaaagctaacttttgaagaaagaaaagatgcggttgtagaaaagaataaagaaattcgctccgccaccctacaaaccgacggtgcctttccctggaagattcaagaaggaattaacaaagaaatacaaaagccctttttgataagcaactaaaggagattgaattaagaatgccattaatggatgccttcatgctcattccacactcacacaagtacctcaaagatctgattatggatagaatcaaggaagtgcaaggaattgtggtaataggctatgaatgcagttctatcatctagaaaggcataataccaaggaagttgggagatcttggatccttcaccctaccttgcttagtaggacctttatctttcagtaaatgtctatgtgattttgggtgcctcaatcagtcttatacccctatccgtagcaagaagactgggtttcagtaagtacaagtcatgcagcatccaactgatattagccgatagattagtcagaatcccccatggagtcctggaagacctacctgtcaaagtcggatcaatagaaatccccacacttttcataatactggagatggatgaggagccaaaggacccattaatcctaagaagacgattactggcaactgcaagagctattatcgatgtcaaaaagggaaagatcgacctaaacctcggaaaggagatgaagatgaccttcgatatcaacaaagctatgaagaaaccaataattaatggacaagtcgtttggatcaaagaattggatagattggtcgacgtattactggaagagcttacggagaaagattacttggcaagtgccttaaccaaggctccaaaggttgaccgtaagcctcttccaaaaggtccaaggtacgcgtttcttggtccaaatgatacctaccctgtcattatcaacaatggattaagtgatgaacaagtgcatcaattgttaaatgagcttagaaagtataggaaagcaattgggtattcattagctgatattaaaggaatttcacgtactttatgtactcataggatccacctcgaaaatgaatcatatactagtgttgaaccacataggagattaaatccgaatttgaaagatgtagttaaaaaggaaattcttaaattacttgatgttgatatcatctacccaatttccgatagtacccaatttccagagaagcatgacttcaatattctcggatttcattgaggagataatggaggttgatatatccttattttcactgatttcttctatgttttaggtatatgattatgagtctttatgttatttctcgagtctttttagtgttttttcaggtatcttatgcattgggacaacaatggagataaggagacattttggaggaagagataaaggaaaggaagctaaggacgaatttggattcagaaatcagcgaggagtgtcgatcgacaccagtttcggcccaacaaagtcctagacgctttcgagtttacagaagagaaaaattgccccaaaagacttccctatttgcattattggtccctggacgttttatagggtctttatattgtttttagacctagttttcattattatcacgttttatcatcaagttcttatcaagctttttgaaaaccctgttactgagagacataagctattcaacgagtgttttcagagattgattcagatcttaatacagtgaagagatcctttctttcccttaatctatttgttgtgtttatgttttcatacccaaatatgttgtttgcttcaatcaatatgtctgagtaatctgcttgttaggaatagtgtttctcattagggattcatatggtttagtagattgcccccttgctacattatctatagaattcttcatctttaattatgcttaatgctagatctagagtaattaactagatcttgaatctagacaatagatatgcccgccataggtatctgtagttagatcgattatttgatgagcctggtttttaggtgtgtaataaaaattggcctaactactacggtaaacaatcgaactcgttaagaatgcttatttaggttgataatgcctcggcttctccggttattcttagctatagatatagggagtttcgcagaacgcgaccggttattccataattagagtttgagtttaagaatggttcgataacaacctagctttcattagatctactaaccaatagctttctgagaataccatgttcctagctctttatttaatcgtttacaacacaatcatcctgctgtcttttaccttgttttcttattatttcaatcataccctgctagcttaatctcgatattctactcactgtttggacaaaagagctccatgaattcgatccttaaatactgcaattgatctcttatttgagagaatagttctaggtaatttgaaccttatcagaggtatttatggacgatatctcagtttatgggtcctctttctcctcatgtttgttaaacttgtacatggttctagaaaggtgtgaggaaaccaatttggtactcaactgggaaaagtgtcatttcatggtccaggaaggaattatgctgggcacaagatttttggtaaaggaatcgaggtcgacaaagccaaaatcgatgtcataattcagctgcaaccccctaagacgtataaggatatcagaagcttcctatgacaggcaggattctacaggagattcataaaagacttttcaaagattgttcaacctctcactcgacttctttgcaaggaaactaagttcaatttcaatgaagactgccttaaagctttccattcgataaaagaagcgttggtgtctgctcccatcgttcaagcacctaactgggactatccatttgatattatgtgtgatgcatccgattgtgcagttggagcagtactgggccaaaggattgatggcaagcttcacatcatctactacgccagtaaaacaatagacgaagctcagacaagatatgctacaacaaaaacggagcttttaactgtagtttttgcctttgagaattttgaagttatttggttggttctaaggtgaaagtctacaccaatcttgtcgctctaaggaacatttacgccaagaaggaaaccaagtcatgacttctaaggtggatacaactactacatgaatttgatatggaaatcactgataagaaaggagttgaaaaaggagttgtagatcatctctctagaatgaggattgaggattcaatcccgatatatgacactatgctagaggaacagctgatgttctaagacgttgttaacaaaaacattaacacaaaagacatacttgatagagcatatgcagttgaagaagaaaaattgtcctggtatgcagatttagttaactatttagtgactggtgatatatccctatttttaatgtttaaactatgttttaggtataggttttagagtctatttgttatttctagagtcttttatagtctttttcaggtctttacatgtttgggattcatttggagataagggagcattctggaggaaaacagagaatttatgctgctgaagaaatccggagacaaaaatgtacgtaggtgtcaaacgacaccacccctggtgttgagcgacaccaatacctgacggcaatttcgaggcgtaacttattgatgttttgaagatttctaaattcggcccagaactttctcctatgtttaatgaaggctcatcacgtattttagacatataattaggtttttagggtcattgtttagacctaagctttgggaggctattccctttttctattctgattttgggagcaaaaccctgtggagactcccgttagagaagattcttcttaactatattcttctcttattttattcattgatttcttattcaatcatgttttgttcttctatgatcatgcttgtgtagttttcttgttaggttttggtttctcattagggatttagatgatttaatagattgcccccttgctaggttatctgttaggattcttcatctttaattgttcttaatgctagttcttgagtagctaactagaacttgaatccacacaataggtatgcccatcataggtatctgtagttggatctattatttgatgagcctggtttataggtgtgtaataagaatcggcctatctactaagttgaacaattgaactcgtttagaatgcatgtttaggttaatgatctctcggcttctccagttattctaacctataagcatagggagtttcgcagaacaccaccggttattctataattagagtttgagtttaagaacggttcgataacaacctagcaatccctagatctactaatcatctatctcctaaaaataccttaaacctgactcttttcccatcttatttatatcttgatatttattgcttttctttatttcttatataatctattggtctagcttgtttgaaaacatcataagtctaatgtgtgaacatccagagctcagtggaattcgacccttaagtgctaacgacgatgtcttatttgagggagtaagctttaggcaatttgagctatatcaagtggtatgatcccttagagtctggatgcatataagaagaagaagttctttaaggatgtcaacaactactattgggatgaaccatacctgtataaaaaaaggaaaatgatgggctattcaaaaggtgaacatcaagagcttagtggaattcgacccttaagtgctaacgaagatctcttatttgagggagtaagctgaaggcaatttgagctatatcaaatttggcgccattgccgaagttctctttacttcaccattagactaggtgtcgacttaagtctaaacttttcttttctttcattactaattcagtttttcttttcttctttttctttttcttgtgtttgaggagcttcaggaattcacttgcaacaccaagatgttgattgtcgtacctgatgttgtaggagtattaagggacagagctggtcagggatacaatgaggatggtcagaaaatcgatgagcaggaaaacctgatacctgattttgccgagggtgacaatcaacaccacctgggtgtcggtcacaccaaggcgaatgcagaactgcagctgttgcagatggacgtgttattcaacctgatgactacaacacgcctgatatgttctatgctggtcattccagctattctagtcaccaagcccacccttaacccacttatacgagtaggatggaatgcatgctagaacagattctcaagagccaattgatgacgaatcaaaggattgatggtctgtataatgatgtacaagatttgaatgctcggttcaacagagaggatgttaatgtagtttagtcaaggagtggattcagcaccagaccttagagacaccactcatgaccgcttgccacactaatttgtagaaccactcaacactaagtctcagtgttgatcgacatgaccttgatgtcgatcaacactcttatggaccagacaatccttcagcgtttgatggagcaaaatcgagcgggctcgataccgaagtgtcaacaacagatgataatgtcgatgaaaaatggactgatgttgagatagatgaggttcatggtacaagcaagcagccacaagacgaagctgacgaattagttgatgagaatcgatctcaagcgatggtgtcgatcgacaccaccacctgtatcgatcgacacaccacacaggctgagccagagttccttattagagctggttttcgtgttgagttcactgctgatactccaggcattacggtcacgtcacccactgcaccgtcactccttgatccacctcataaacggctaagaaactcatttcctcctcctaaaactcctgatttcatcaataagagtttaaaatttccaaaaactgtttcacggtttagcaagccacgagtttctcgtcgagcgcttgtttgttcttttgatgattgtggaggtaaaaggagtattccatccatacatgagtcccaccctgctgatactcctctcttcctagatagacctcatgcgttaacttcttatacgccagcatggatgatgagaggtctttctctgcgatatttactaccaccttctgatccacctgatccccaaactccaccaaagtcaagctattgactctaaacaagcgcttagtgggaggaaacccactggtatggttttctttttctttttctttttctttttcttttatttttcgtttttcttttatttttctcgcttactctatatttgaatgctattggagacaatgtcgtttaagtctggggtaggcgcttactaattacgtttttctttttgagtcttattcttattcttctttttcttatttttgagtcgtttaattgagtcaaaattttgtttggaattatgatctttattctttagattattgcctggttgattaatgttgcaggttcgactcaattccgactattgaaaaatccagatggcaaaccaacagacttgacgatatcctggtttccaacacaatccactaaggctggagctaatctcactgctcttccttttacctcttcaaacggttaatatttatagatcttgactcgttcatacctgatattgagaacaatgtgataaaaagaatgtgttcatctccccttataaaaataaaaagaaaatgagagattgacatgattttcaaatagtttataggggtaggaatgtttcctatgaccccaatattatacattatttggaaggatcaattacaaagatgggaaaaatgccgagggtgttgatctaatatgcgagttcccctttgtttactctctaaaaagaataagtctaggggagagaaagaacaacaacaaaaaaaaatataaagacaatggttgatttaccatggtatagtacatgaatgagtctagaaggatcttaaatgttagcttgtttgatgagacccaacgataaaagcctggtagatgtagttgtggaacttaggtatgaaatctagaatgttgtgtaagcttgcagagaagtacatgttggttaggatttgttagaactgctagacaagcaaaagctaagtctgcgagagttgatatatccctagttttactgtttttaactatgttttaggtataggctttagagtctatttgttatttctagagtcttttctagtctttttcaggtctttacatgtttgagattcatttggagataatagagctttctggaggaaaacagagaatttatgctactgaagaaatcgggagacgaaaatgcatgtaggtgtcgaacgacaccacccctggtgtcgagcgacaccaatacctgacggcaattacgagacgcaacttattgatattgtgaagatttctaaattcggccaagaactttctcctatgtttaatgaaggcccatcacgtgttttagacatataattaggtttttagggtcaatgtttagacctaagctttgggaggctattccctttttctattctgtttttggagcaaaaccctgtagagactccctttagagaagattcttcttaactatattcttctcttgttttattcattgatttcttattcaatcatgttttgttcttctatgatcatgtttgagtagttttttttgttatgtttagggtttctcattagggatttagatgatttagtagattgcccccttgctaggttatctgttaggattcttcatctttaattgttcttaatgctagttcttgagtagctaactagaacttgaatccagacaataggtatgcccaccataggtatctgtagttggatatattatttgatgagcctggtttataggtgtgtaataagaatcagcctatctactaaggtgaacaattgaactcgtttagaatgcatgtttaggttaaagatctctcgacttctccggttattcttagctacaagcatagggagtttcgcggagcaccactggttattccataattagagtttgagtttaagaacggtttgataacaacctagctataactagatctactaatcatctatctcctgagaataccctaaacctgactcttttcccatcttatttatatcttgatatttattgcttttctttgtttcttatataatctattggtctagcttgtttgaaaacatcataagtctattgtgtgaacatcgagagctcagtggaattcgacccttaagtgctaacgacgatctcttatttgagggagtaagctttaggcaatttgagttatcaagtggtatgatcccttagagtctggatgcatataagaagaagaagttctttaaggatgtcaacaactactattgggatgaaccataccaatataaaaaagggaaatgatgggctattcaaaaggtgtgtctccgaaggagaagttcagggtatagtggaacattgccatggcctccacctatggagggcatttcgccacttttaagactatccagaaagtgttacaagcaagcctgttgtggtccacaatgtttaaagacacttaggtgttcataaaaaaatgtgatccatgccaaagaattgggaacatatcaaggaggagtgagatgccacaacaccccattttgaagtagaagtgttcgatgtatgggggatagacttcatgagtccgttaacctccttcatatggaaaggcttacatcttggtggtggtgtattacgtctccaagtgggtcaaagctatagcagcaccaaccaatgatcacaaagtggttctgaaaatgtttaagtccattatctttcccagatatggtgtcctttaaggtagtaataagtgatggaggctcgcatttcataaacaaggtccttgaaagtttattgagaaagcctggggttaagcataaggttgtcactccctatcatcctcagaccagtggccaagtagaagtgtcaaataggctgatcaaagctatactcacaactgttgttagtgtctcaagaagggattagtcagctaaacttgatgagactctgtgggcctatagagttgcatacaaattgcctattggaagaaccccattccagatgctatatgggaaatcttgtcatttacgagtagaaacggaatataaagccatttgggcaactaaactcttgaacttggaaatcaaaagagctcaagaaaaagagcagtcgacctgcacaaactggaagagattatgctggaagcatatgagagttcgaagatctacaaagaaagaacaaaagcctttcatgacaaaaagatctcaccaaaagattttaacattggagaccaagttctactattcacctccaggctcaagttgtttccaggaaagctcaaatccaggtggtctggacctttcaccatcaaacaagtattggcatatgggacaattactctcactgggaagggaaggtctgactttactgtaaatgagcagagggtcaagcgctacacggcagattgccccattcctgaaggaactaaagttcacctccctgagcccctcagtgcctaaaatagtaaggagtctagctcaagactttaaactagctcacttaggaggaagtcacatgtctatctctgtacatatttattttgggaaaaaaacccgaaaaataccttgtttattttttatttgtctgtttaatacatgcattattaaatttgtccaaaaaatacttcagttaatttttatgtcctttaaaaacctttgtttttataaatgttggtaaatcaaacatatgagttaacggccgttaacagtggtaatagaatcgctaactgcagtctttataaacaattgttttttctaatagttaacaacattttgtcttaaactcgtggttgtgtgaatttgttttgaagaaaatagacaaataacgactacaaaaagcgataatcacagtagtcatctttttggcgactacttgacgacagttttacgactactttacaacaacgtgaacattagtagtcaaatagtcgttcttttatgactaactatattagccggcaaatactcgtctattaacgactattgaacgattatattattgaagggagacgtttgtcgttacttagtcgccaattgacgactacaatttccgagtacattaattagtcgctcatttggcgactaatatatgacaacgttctgtaatcgtaaaagagtcgcataagagtcgctgagtagtcgcataaagtagttggaaaacgtttttcgcattgccaagttggtacacctaatttgtttgttgtagtcgtaaattagtcataaaaattcgtctatataataaaaattcacgacactcttctttcaccaacaaatctaaacaacatcaaaagaaaacaaaaacgattgaaaagaaaaaaatagaagtttagtttattgtataatggcgggaaactacaattatggcggtagtggcggtttctatcgagattaaatgtacaagatattcgatgaagtgacgatgaatttgtcagccgaatacgtcgcaggagttgaggaattcatgacattcgctaatagtcggcctatagtacagagtagtcgaggtaaatttcattgtccttgtagtgtatgcaagaatgaaaaacacatcatctcaggtagaagagttagtagtcatttgtttagtcaaggatttatgcctgatttttatgtttggtataagcatggagaagaaatgaatatggatatcggaactagttacacagataggacgtattttggtgagaatcatgaagaagtgggtaatgttgtagaagatccatatgtggatatggtgaacgatgcatttaattttaacgtggggtatgatgataacgtgggatatgatgatagccatcatcatgatggtagttatcaagagtgaccaaaagtgtgagtgaagcacacaagaacattagttcaatgagcgcttgaaataagtttcaagacatgatgctggagaaatgtggcaaggccatagtagcaattcatattgtaatgagttggtcatcctcaggcgccaccatgatatgagagaatcgacctgaagaagtggctccacgaagacacagagtctcccgccaaggcagtcggcctatgagcaaagagagataagtcgccccaaggtcctgcatgacattcacttcacgagcatcacgaacggaaaaggagaagaagaacaagagtagttcggccaaggagcaaagaccttcttatgagcaacttaaggtcactcgaccatagtgctcagcagggtatcgagcagagggtcgagcaagatcagtgggctcaaaacgagcagcactcggagatgaattgggatgcgtaccatggcatcaatgaggaggaaaacacctctgaccactgaggtaacaccaccaccaccattgtatatactataacattttccttatttttgtttgttctttgttttggtcttgaattctttctcagatttttatcacacaagggactgtgtagtttaagttcgggggagggttcaagacatatttgacattgtgttctcttttcttatttcaaattttgtatcatctaaggcatagaaaaaaccataaaaatttgaaaaattttcagaaaatgatttcataaaaattgagaattgagaatttcataaaaattctcatttctcaattcttgccaattctcaatttcaatacaaagtgtcatttagattgcatttcattttaggattgtatatagagtgcttgcatttaggattgctcatttgcatagggaataatgatgactttaacctttaagcatgtttgattcagtgaagtaagttcaatgcccaggttgctagttctctgttgcataaacgattgtttctctaaagtaagaccgaaccctgctttgaatttacaacttgagtatcttgcttcaatttgaaactcgctactctgatgccattctctatctattaacttaatttacaattatcatgtctttgtattgatttatgaactcatggctatcatatacatacttggattatcttcttaacttcaccaccctttgttaatccaagttgttgactctcacttttagagcagtttcccataccctgaacttaaccttatttcaagccaaagatcatttgtgtgtgtttgtgaggtttatttctgagtgagctttctataacgtgttaggtatgaaccaatgataacatcgtattttcgcccacttttactatgtttttattaggttttccgtggagaaatcaagagttaaaggacacttcaaagcatatttcaagtatttgagcttcaaggaagaataatgagttttcatgcaaaaaggagtagaagtcgaccaaaatccgtttaagacagtttttgtgcctcagatgtttcacatccggccaaggtcttcctgatctcggcctgagggtatcttggtgtaattggaaagctagaagagtcaagtttaacatcaaagtcgaatcgaagcaatccatgaagccggttagaagttatggctcgaagagtgaagacatgtcctaggatcgcggttttgaaaatgatcaatttaaaaccgccaaccaaggtgacttgaacccgggcgtcctctcgagttttccaccgaccactagggcgcacaaccactccttcccttcttcttgccgtcgacttccagcaaccctaaaagcccagaactccttcccttcctcttgccgccgacttccagcaaccctaaaagcctagaagctgggcccatcacttactaattaatgaaaggacgtttctaccttttgacctaatgaacccctataaataaaagtttaggggaaaccctagaagacaccaacaaaaaaggctgcctcatgcgcctctcaccgccctaaagtcgtcctcttcttgttcttcattagatctctcttttctcttcaattctctattctctacttgtaaaaggaaaaagatttatcaagctttgaatttccagggaagatctctaaacccttttctaaacttatactctttttatgaaatctcttattcatatgatgttgtgttctttgagtatgtgtgagtagatctctagttaagttttaggggggtttcaaagggcaattcatggggaccaatagagcaaagatctaggttggcggtttttatggcattgtttgatcgtttacactatttcttctagttgagtttattcttaatgcttgtatgttcggaacgccacctagtttattcttaatgcttgtttgaatccttgacctaactcaactgaataaaaatttgaacttaatgctttgatcttgtattttgaaaccatgttagcacctactagccgatagggcaactgagtacacaagatattagtgataatagccggttttcacctactagccgttagggttaactggtcttgatagagtttcgtatgtccgggaatttggaagtaaacaaacctagccatgttatcacctagattgagatctataccttattattgaaccatgatgcccggagagaacccccgatgacctagcgtttcgttttacttgttttacaccgctcttcttattggcatttactttattggtttttcattagtttccgtttatttctttttagttttattgcagtctttacttattttctccgcatacaacaaccctcacacttttgtttgtcttgatccaggttacctaacttgaattattccttgtagctacactcccaaagattcgatcctaaaatactactccgatatactgtgcacttgtagtagtcgtgtggtctttcaggtaaaagtctgaggcgaaataaaacatgcatcagccaacaagagcagtctttcatgtggacctagctcacgctttttgggttagctaggactaggtggagacttgtatttgggattgggattgtgtatggaatgagaggaaaagagaatgggaatgaaaagaaaaaaaagagagaaagagtttagagttcttaatgggtgatacaaaagaaagtggtagtctagtaaagggtttggagttcaaagagaaaagaaagttaggcattgtaattcaaagaaaagggtaaaacgctctctatgctataagattagaagaaaagccttaagtttgtaaaagtttaagaccaaacccgctagactcttgaattgtttttaagaaacacccctaagagcatgaaccaaaaaaagagaaaagaatgggtaaaagagttgagttaggacatctaagggacagggatcatcttttaaactataatactatatatcattgggtagatgggagtcagttcttgtatgtgtctgttggctctaacctttagcattctgctaaaactcaatctttctatgagagtcccctgttactcgaccatattcataaagggaccatttttgtctcttagcctaagcccctaaaccaaatgagttcatcgtcattgcattgcttgatccactgttcgtgcttaatcaatgttcaagggagttggttgatgtgaatgcttgaatagattaaggcagttgttaggttgcattgtgacgagtatggctaaaatttttaagtaaggatctttcacctacgggtctttcacattgcaacctagaattagctacctggacattgatctcacccgctctatatgcatgcttcggtttttgaatccccacctttaaacctctccttcaacttaagatcttttatttgcttgagggcaagcaagagataagtttggggaagttgataacactatattttactcattctatgcatgtatttatcatcatttagcttagtgatcactcattgtttcatatcattttgcaccacatttagcttattttgcacacttaggcatttaggatcactttgcatacatattgaatgttttggtgtgttttcaggtgtagaaagagtttataaaggcaatcactcgaccctcaactctataaaaccaggagggaagcagcagagcaaaccactcgacaagtcactcaataaaggcagctacaaaggaagcagcagacaaccactcgaccattttactcgatcctctactcgacccaatactcaatcaagggcaacccattctacaagacttgttgatcgttcaaagcgccttcggatcctcctcattccccactcaactagacatttgagcataagaagaggagaggaagaagcaactactagaccaatggatcactcggagaatggaggcaaaggtgcagactttgcagcaccctctttactcgatctccaagatcgagcatctatctaaatcgcctcaagtgtcttgtcttctagtgaatctaggggtttcgagattttaggataaataggttctttggggtttgtccaaatgaccaagcttttattctgtagtttttctttgtgttttagaatccggaaaccttaattactcttaatctattttgtttttgcatttagttctttgagcaaagttgtttatcttgtttagatctatattttgatatgtttagagtaatttttgggtttgtgttcttgattatgctgcttgagtagtgattagagtcattgaggatggattagattagggtaatctctatgatagtctggtggttaagattaggttagatcccttctggattcattggccctaatgcttatgtcactcagttcagtttggaattcgacccaaggtattccagcgtccaaaagacgttcaaatggatgtctgatctacgaattccaaagatttgtaaattctagcctaagagattggatgtttagactgcttattgactttgatagattgttccttaaagcctgctttgctatgtttcatcaacgagagttgagatgtggaagtggtaaaacaatgaggatcattgtcacgagagtggattgatctgattttgaatctattgtctagggtatttgcctttcgcctgttagccacctgattagccgtagaggtgcccttattaatgaatccatccttaggacttctattcttcttagatttatttgtatttatcccctgattgcacttttatttacctgttattttattcaccttttgagttacctgttattgcattttagctcttaaacttgtcacatgttggttcaacttgactaattgatcgagtagtgcacttaagttctcacttttgttgtttgaatctttgtttatgattgttactagaaacccaccatcattataacatggcttgacttatttgcttctgtagacatcttgattgctagtaataacagtggactggattgacaccccttatagctacatcgacatgttagtgtttaaggggaaatagaactgaacatcacattcaccatagttaggcctaaaaacctaactatcaaagccttgtgttttatttaagtcaatagattcgaagttgtgagattgacttgattaattagtgagattaacatatatgaataatgatatagtgatactaattaaaagaactctaaatactttgtacaatcaaaattcaaattattaactattttttccaacattgaactatatggtaagaaattatatgaatttaattattaattatacttgtgaaattttataaggaaaaaagatactcagctacaccaagtataacggaatacatggccacacatgccaactttagaaatgtacaaccaactacatgaaatacatctatttcatgtccacatataccaactatatgacgccacgggtcaacatcataaacatctttttccggtatcccaatcaccaaaatccggtgttgaccatctttgacccgcgttgaccaacaaaaatattcaaaaaatattataaaacattattttatttaatcatttatagtgtttaaagttatttcgctgcgcataatcaaatattgaagaaaatactccataattcgattaacaaataaagtaaatgtaaaattatgtaacaacttaaaacattaatctaaaacacatatacaattaccaaataaaagtcaatgaattataggatggattaaaagttcataaggttgagttagttagtcaaataaaataaagattgcgagttctttttgtctaacaacatacaaattaattttaaatcaacataagttcccaccaatgatctcaatgaagatgatatattttgtataatctcgtcattcatcatatctcctagactctgtatcatcttcatcaacaaaggcatcacaaaaggaattatgatggttattacaaaacttttttttttcttttttgtcatccgaaattaattaaaactcaaacgagccaatcccgagggatattgtttacatatgtgataagatgcggttcggtacggattttccgcgccaaattatccgcttttacattagcactttgagaaattaaagataaagaaaaatttgtgaattcttccgtgtcgctttgcaattcctccaaatacacagaaaatgtcggccattcggttggggaagacaccatcttcaccaaatctgaacagtctgtaaagaacgctacgtcttggttgtctgctccaatcatacacttcatcgcccaaagaagagcttctacttctatatgtagaggagatagacttctacgaagattggcggcgcccatggttggtgactctcctgatgatgatgtacaacaccatcctaaccctgaaaactgatcactttctttccaagatccatcaacaaaacaacgaaaacctgaaaagtttgtaacatgtgagatatccctcactcgagatcgaactcctaaattcaaaacaccatggctttcaacatgaagctcactttgcgcttcctgccttgaatgtgtctctttttccgctaaacgtaaaatttccaaagggtctttatccacattttcaaatattttttcatttcgtgctttccaaatataccaaataaatccatgggtatggagacgaaataacaccagaaggtattctccaaaacaaatgatccaaatttgcaaaaatagaattcgagggaaatatccccggaatcgtaggaatttgcgagagagcccaaatctgccgggcaaggtgacaaagaaaaagggtatgattgattgtttcctcagttgcaccacatctagcacaaccctgatcacaatttatacctcttttccgtaaatttgctgttaccggcacacaaccagataaaatttgccacaaaaaatgacgtaacttaggtggacattgcactttccaagtgtgagctttgaggattgcaatctctggccctataaaagaattatcctcgttaaaaccaagtcttgtcgaatgatatcaagatttaactgtatatttcccagatttcgtaaagtgccagcctagggtatcttccttagttggtgtaccaacgggcaaagcacaaatcaacggtacatctttcggatcaaagagatcctttaagagatccatattccaaaaatttgaccgattgtctattagactactgacttttaaagatggttcaaaaattgaaccattactttttgctggtctcgggaattgagctggtatccacggatcctcccaaactgaaatggaagccccagaactgactcttttgataagccctttatgaaccagagatctagctgaaatcatacttctccaaccataagatggggaatatgattttatattatccagtggattggattttcgaaaatatcttcctttgaatacctttgcaaaaagagaatttggaaccgttatcagccgccataattgtttagccaatagagccgaattaaaatcatctacattccgaaatcctaaccctccttccgctttactactacacattttattccaagccatccaatgcatacctcttgaatcaccatttgaactccactaaaacttagcaaccacacttgtaagtttggacgtaattgttttcggaagtcgaaaacaagacataacgtaagttggtaaagccgcggctaccgatttgatcataacttctttcccgcctttggatagaaatttggccgactatccatttattctagtctccaatcgttctctaacaaaagagaaaattttagttttagaaccacctaaactttctggtaatccaagataagaacccatcccacctaggttagtaatgcccaaaattaaatgaatttccgctttaatagactcatcaaccttatgaacaaactgaattgaagattttgaaaaatttatctgttgacccgaaaccgcttcatattgctttaaaatacctagaattgttccacattgttctttattagctttacaaaaaaaataaactatcatccgcaaacagaagatgagaaactgggggacttggtgtggctaccttcatgcccgtaattaattttccatgttcagcttttcgaatattcgctattaaaacctccgtacataggataaataaatatggggagagcggatccccttgtcttaaacccctccccagaattatcagtcctttaggctgtccattaattaataccttatattgaactgttgttatacaccacataatccaagaaatccatttatcgcagaaacccatctttcttaacagaacctcaataaatttccattccacccggttataagctttactcatatctgttttaatagccataaactttcctttacaggacgggttagttcgtaacccatgaaacatctccagtgcaataagaatattatctgaaatcagtcgtccttcgataaaagcggattgtgtttccgaaataagatttggcaggactgtcttgagtctttgacagagaatcttggaaataactttataaccaacattacaaaggctgatcggccttaactctgtcatccgtgttggacgttccgtttttagaatcaaacatatattagtcgtatttaaccgtttatcaaaaaatctatcttttaaaaacgagttaaccaaagtcaacaaatccgttttaatagtagcccatgctttttgaaaaaacaaagctgtcataccatcaggactgggagccttctccgaatgtatcataaataaagccgttctcacctcaatttccgtcgctgaggctgtgagaaaatcattgatttgctcagttatccgaggttgaattttacccaaagcttcatcaaaagcctgaggatttgaagttaaaaacaaattttgaaaataagaaaccgcaaccatttggatgtcatcatcttccaccttccaggccccatgttcatcatggaggccggtaattctattcctatctcgtctctgtttggttatcgcatgaaaatattttgaattattatcccctaatttcatccacaaactccggctgttttgataccaatactgctcttcatcacggtaagcttcttgcaatcgcaacgttaattccgtaatctcctctcgtgctcttgtatcatccctttgtgccgcatctaattccacctttagttcctctattgtttttcgtccgtaaggagataaatcttttcgccatttagatatagcccgcctacaatttgtaattttttcaacaaaacatccctctcgtgacccggtatctaaattccagccatttgaaattgcctctaataacccttctttaccaatccatcttttatcaaaccggaaattttgtttgccacgtggtatcttatccgctattgttgcaattactggtgaatgatctgaagctaacattgttagatattcaataaaagaattgcaaaataaatcatgccattcttaatttgctaaggccctatctaaccgacaccgtattggtttcttgtctcgccaacccctgcacgataaccaatctccaaggtatggaaattccagaagaccacaatcttgaatcattgaattaaaaggaataaacgttgaagcaagtcttaacttaccacctctttttttattattatttcttaactcattaaaatcacctattaaaaaccaaggattatcccgagtcacaccaattcttgttaaccgttcccatacgtaatctctcttttttggaaccggatccccataaacaaaggtaaggtgaatagtttttcctttataactggccgcaacatcaattagacgattactttcgaaaagaattgaaacattaaaatcattattataaaaaagtgctaaaccgccactacaaccaataggatcaaccgtttttaaatttttataaccaaaatgactgacaaatatttccatatataaataagattgctttgtttccattaaaaacaaaaaatccggccgatgttgtttccataaatccctaagataaccgattgttgctttattccccagcgcttgacaatttcagcttaaaatcttcatttatcaaccattggttttggtggtttagcaccaccacgcacagccttccccgtgacccggttcttcggctcaactccctcaattaattgatcactccctttcggtgcaaaccgcttccgtggcgatgagaacaattgaacattcctctttattacaaaacttaagaagcaaaatattacttaaattcagcatgataagtaaaacataaatattccttcaattgctatgatccgtagattgagttataagttattgtttagtaaataatgttttctttagatttgtaaagatcaaacttgaccaaaaataaaccaagtttgtataaataggagcaatgtttgtatattgaaattttaaaactaaatgaaagagacaaaaagaagtgaccacagataaaaagaaaaagtaattatattaaggaacaccaacctaaaattatattatgtagccaatgaacatttggctatatatgtttatcatttagttgagtcctcacttttgatacgttttgactcagaaactaaaatacttttaaagactaatatgaattttagcaacttggcaaaataggtattttgtaaacaacatttgtcaacttcaaaacatgcaaaaggagtagaaagtaaaggttaagaaggtaaaacatatcttgtttctcatctaaaagtgagaaggtgtcttaaccctttttcatcaagttagtttaggaaaaatccacatttcacatgttaacttctacatatgctccaaaattttgactcaacctatttgtttcaaaacctacaaaaatcacttaaagtaaaagaaaaaaaatattttatttaaagatatatatgtgagaggtagaatataatatttgataaatactataccttactatttaaagaaaaatatgccatagattttaattgtgttttttaataaagttggtcaaacatcatgggagttacatttgaaagaatcaatatgcaataaattattattatgattgtgtttttgttatatagttttgtttgtgttttatttttattttttgtaaatggaaaaatatgtttttcacaaaaacataaacggagtggcagttaatacattatattgtattaatatgttgagttatttttattgtcaaacattataggagttacactttaaagaataaatatacaataaattctgattattattaaagaaaaataaaatatcatattgtcaacaaacaaatattgtaatatattcatatatatatttttctcttgaagttattttagagagaaattatttggtctttgtctttgtaacatctgtattctaaaaagaatggattaatggagtttaagtcagtaattagagcggaattggtttgtttctaataagttgttaatcgggttggtttattaattagacctaaaggatggttaattaattatcggtttagtagaattttggtttaaccaaattaaacaaaaaagccctagttccttcttcttataagttgaagccatcttcttcttttctcatatgtcgtgacctgaaaaccaaaagagaaagagagttgtttttaacttgaaaaagaaaaaaatgttaaagctttggtgaagggaggaagaggcagaatcgtcgaggtttggtagagatcagtttcgacctattaaatcgtgggcaaatgtatcaaaattttcagagattgcaaataagacctacagttacatgtgactttttgcaaattttaatttgagttagaattctaagagcatccacattggccatacctttgtagatgtctaaaaaatataagtaagattaaatttaaagacatcttctattttgggggtccaaaatgtctttccaaagacactattacacttttaaagacactccatctcttttttctattatttttaatttaataacatcctcaaagtatcaccaatgaggatggtctaagagttgtatacctttttgttagctgttctgtttcagtcgcgatttagaccagcgtgtgtttaaaggaggatcacgatttaactttctgttggaacgttacgaattttggtggttaactttagaacatcaaaaggaaggttttcacggtaggtttggattttgaacggtcagatctctttccgtgatctcatcttttagaccgcccctactagtgggccccacgtcctctcttgggcccatgggcccaccactgtccgatcctacaaatcaccacatgatttttcctcatggtttgtcctaacttgcatggttccgacaatcacttcccagaaggtcatccatccttaaactacttaagcccaagcacgcttaactgaggagttctctcaagatgtttgacagaaaagataagagcactttggtgacataggtggtcaaatcaattcttttaaacctctctgcattcaccaccatattcttgaaaccggggtgttacaattcacccccactaacagatcgcaacgtcctcgttgtgcaccaagactgtcaccccctacggtttgagccttcttgactgcacatttgtatggttttggctctaataccacttgtaacgccccaaccgcctctaccaatgggccccacatcttctatcgggcccatgggccaaatcaattcttttaaacctatccgcatgtaccatcatattcctgaaaccggggtgttagattcttgatagttatgaaacttatattttattctttaattcctgaaaaattattttgttgaaaatttctaatgttatggtaatcatatgaaatattgaaatgatacattgtaggaaaagtaattaaatacaaaaagggtattgaaaaaatgttaagagatttttttagtataaaactataactagattgagtgaatatgaaaatggttttttttaatttgagaggaatgacacatgttgaatgaataaagcagcacttgtcagtttttttgagcatgagtttcaggtaaccttacattattatataccgtaatcgatgatatggttcaaattgccttaaacctactctctcaaataagagatcggttgcaatatttaagggttaaatttcgtcaaagttcttttgttcacacaataaattgaatgtcaagattaaaatagaagataaatagtaaaataaaaggtaaataaagtaataagaaagtagattgattggttgtgaaatgataaaataaaaagttaggcttagggtattcttaggaaactattggttagtagatctaatgatagctagattgttatcgaaccattcttaaattcaaactctaatttttgagttaccggtggtgttccgcaaaactccctatgtctattgctaagaataaccagagaagccgagagattttatacctaaacatgcattctaaacgagttcaattgttcaccttagtagataggccgattcttattacacacctataaaccatgctcatcaaataatagatccaactatagatacctatggcggatatatctattgtcttgattcaaattctagtttagcattaagaacaattaaagattcagaattctacagataatctagaagggggggatctactaaaccatatgaatccctaatgagaaactctaaccctaacaagcaaattacgcagacatggagattgaaacaagcaacatatttgagtaagaaagcataaacacagcaaataagaatagagtatgaaaggatctcttcactgtattgaaatttgaatgaatctctaaagaacaagggatgaatagcttatgtctctcaaaaaaacctagatgaaaagcttgataaaacttgatagaaaagaacttaggtctaaacaatgaccttaaaaactatatatatgacctaataaacgttcagggactaataatgcaaataggaaagtcttatggggaaaattttcacttgtctaaacttgaaagcgtcatgaacttctttgggcccgaaaccggtgtcgatcaaccccaaaagtgtgtcgatcgaccccaaaagtgtgtcgatcgaccccaagagtgtgtcgatcgaccccaaaagtgtgtcgatcgacactctcattgaacatgaaactgaaatcgtccttagcttctttttccttaccttttgctccaaaatatctgctcatctccattgttgtcccacttcatagaatacctgaaaagactctaaaatgactcgagaaataacaaaaagactcaaaatcctatatctaaaacatagttaaagacagaaaaatagggttatatcaatcgacaaaaacccgatggtattctggattttgttcttttacctacaaaaatcacgccgaaatgccaaagtttttttgcttgacttctctgcatatatatcaactaacaatcttattatcatatagctttaaatatagaggtttccgcgaattaatactttaaaaatcctaaaatcatactcttaacagattgataaaggtaacaaaacattatcacaaataataacaaaatatcacaacaaatagcaacaaattaataaaagtgtcaaaatgttttaaagatttgaagaaatgctttcatgcccatgtccttcaatcctctttatgatttaaaaaatgtattttgaaatatttattagaccatctctatttgggagtttctcatgagagtttctcactattaaaaaattaaaaataatgaaatgaaagagagagagaaagtgtagaaagtttctcacttgagaaactcttatatactctctacaatccatcatgacatagctctttttaccattggttcaattttttttaacttttttctttgccaaacgtcaatttccattcacttaatcctcaaaagagggaagttcacacaacttgaatctaagataatacaaggaaataaagatagttgctttatgagttttgcaaagggatgttcacttttaaaaaagtttacaaggtgtggtcatagacgactattgaatacgggcttcgcgaaatcctcaaaacatgaagaagaagtacaaggtgaaagttaagaagatataacataccttgtttctcatctaaaagtaagaaggtgttttagccctttttcacttctatatgtgctccaaaatttcaactcaacctatttgtttcaaaaccgataaaagttatttaaaataaaaaaaatattttatttaaatatatatatatatgagaggtagaatataatatttgattaagactttgtcttactatttatagagaaattaatttgtcatggattttaattgtggttttgtttttaataaatttggtcaaacatcgtggaaattacatttgaaagaattaatatgcaataaatgatgatgatgattatgttttttaaatacatttgtttgtgtttttatatttttattttcaataaatgcaaagaaatatgttttccacaaaaacataaacacaattgcagttaatacaatataatgtaataaaatattgatttatttttcttggtaatgtaaaaacatatgttttctactaaaacataaacgagatgacagttaatacattatattgtatttatatgtaaagttattttttgtcaaacattataggagttacattttatagaatgaatatgtaataaattatgattatgattattattaaagtgaaataaaatattatattatcaataatattattatattgtgtgaatatgaaaatagtttatttaaatttaagagaaatgacaaatgtcgaatgaacagagcaccacttgtgagttttttagatcataagtttagaggtggattgcgcctactaaaggcaaaaatgaagctaaattacactccagacagcaaccctagaaaaaaatcatgagaaaataggacattcaattgatgagttgtatatctacactctatgctctagtggagccttcagaaagaaagatgttcaatgaagttttaacaatcatatgattttcgaaatctccaaagagatcaggccagtgtcatttcaaatcttcaatagatagaccttcaaccttacatctatgaaagctacaagatctcactataccctccacgaaatccaaagattctagaggagttaacccctataaagcaaaagaaaaaatgtggtaaattattgctggatttggctacaaaagggctgacttttcttaattatctttttctcaagataagtaaccaaaatagcttcattgagttgtacatgtagacctttcttgattatggttattgttaaaaagaaataaaatattatattgtcaataatattattagattgaatgaatatgaaaatagtatatttaagtttaaggaaaatgacacatgttgaatgaatagagcaccatttgtctgttttttagatcataagttttgaggaaccttactttattatataaaatatacgctatatctgtaagatagcaaaatgttaacgtagctcaatggtttaatgtcctttattagtccaaaaggtctgcattttgattcccttgaaatgctgtttttcctcctcattttctagtgttcaaaacgacatcgttttgatataaaagaaattctaacgaaaacttaactctctgattgtttggttgatggaaacttaacgacatgtcctaaatggtcaagttaaactaaactttaagatttaaatagttttgaaagttcattttgtcgtcctaaatttaaaaatttgcgctttttgatattttcccgttgtaaagtttccatttatttatttaggagggttttatacgtgagaccttggcttaaatatagttttttttttttgattaataaaagagaaatttatttttgaaccgcaaagtttttgttttcttaaaagtacgaattttaattaggaaaacatttttgtttggacacacataaaaaaaaaacagttttggttcggttgtgggtttgttttcagattttataatagtgaaaccacacaattaagaaattcattttacttctgttttggtttaatttggttggttgcagttgttttgcacaccctttggttctttacaaaattaggcaaactatacaatcaagtcagaatactagaccacgagagatcaccctcgttgtacttgcgactcgccttaaaagtagtagagtatatgtatatgaaaccttaacaatacgtaaacttaagcatttcttgtggtaatgtacctcaggattggcattttgccaatgacttttcttgtgttatatcgataaagaaaaagattgtcctggatggaaataaaatgaagaaactaaatccatctcttttattgtgtctaacatctagataaatttggactttatcccccatcctatcctcaagtactcttattccaggcagtctttgtgttataactttgacttcttggtttagagagcgggagatatggacatctccaatatgtattttcatgaatactactatgttatacatagagggatatgaacataggtttttttttcctccaaggcattttgaaaccgaaccacaccgacattttcatgcccagtgaaagcttgtagtgtatatctacctctctgtttatatctctcacatctattattgatgtgcctgcgtatgggaccgctcgcttagcttcacctttgtctcctcccatatatatcccggatcgaaaaatggagtgcgtaaaaccattaagactctgtgtttctattatcatcttgtttataagaaagttacgaatcaatacttaatttatttcacaatattgataggattctgtctgattttttcagaattagttatatttattatatttaacataaattacaaatataaaaataaatatcaatttaaaatatatatgtatatatttataatattgttttgagaatctcgtgggttcaagttttagtattttatatatataaaatgagtagaaaaaaattagctcttatgaaaaaacaatattagaacaacatgaaagatcccacagctcggaattaggagccacgtgagtcaccatcagagctgtccaaaacaaatctaatttcatatttcagattctccatattatttaatctgaaacgataatctaagctatgaaagccgaaaatgtacaatttcatatgtcaaagacaaattacattgacttcaacctaggttagatatatattaagtgacaaaagaaatacttggctgaggccttttagggatattgaggataccagagtagaagaaacatattattatgcgataagataatttttttcttatgaatttataaggtatgctaaactaatatctacgtaagcaaaataaaataaaataaaaaactgattataaactttattagagagaccgcacgacaagaatccatacatgtaacatataagactatatggtgaaaagaaactaataaagaagattagaaaacaaaaacaaagaagaaaagagtacgttaacagagaggagatcgttgaggaacgccttttcgccgattgatgcaagcagaaatatcgtcaggatcctccgaaacttctttataactattagccgatttagcgcaaaggcaaaaaccagtcctttttttcctcacgacatgggtggtggttgcggcataagcagccgccgcacccgcattgttgttatccgaggaagctgaggaccagctcatggactcatcgccgtctaccacagttgatcgaggagtctcgtaggccgccacttcatcatctgtcagtaagtcttgtgggatgatgtagtcaggacctagggttagagtgtggcatggcttgaggaatggggttatgtccctgtaacgtttcatcacaaagtccacctacatgtatataaaccaaaaccttttatataatcacatagattactacatgctcaaaaagcttagatgttattctgagaacatgatatatttattacaaagtgcaacattgaaaagatttgaaagtgtggtggtttcttaaaacacttagggccaaaccactagctcaaatgatatgggagtatttacagtatttatgcaccaaatttacatagttccaagttccaatggcaaggtcaatgatagacttatttattaaaaaagttagcctcccctttatagaatttcttcatgtttttttttttgttaaatacattagttcagaaggacaagatttcaaaatcgagccatatacgggttatttaataaatccttttttttttcttgagattctcatctgcggaaactaacaaactttacgggttgaaaacattttaaaggacagccaggttagataactaaaaaaaaagtgtgaatattttaaccaaaagtaaaataaaaaatgttttacgtttgaaaaacaaaaatcagggtatttggtagtatacttgttgtagtatcctgttgatgtattcgtatttctatttgtggacgagttaaaaggggaacatgtgtttctatcatagaaacgaatcatctataaagtttagactatcacataatttaattattttatatatatgctaagtgcgaatcatatagtcaagtagaattgagtcaaatattatgtagaagtaatatatagttaagatgaaataaccttacaacccaaggagcaatggatataaggttcttgaagacttcggtcacaagaagtgcaatagttgccagctcctttgaattgtctattttgtggtctcttcttgatgaacaccacttttgcactatttattgtataagcctatccacaattcaacacccaatccatttatatacatatatagatatgagataatacatatatgtataatagattacttacttgaacgttagagcagtcgatgagtttctgaagatcttcaagccgaacaacgtcgtgatacacataacggcgaacttgaaggagtctatggaatctatgagagggtacacagtgagggcagagactggtgcaacaatcaagacaacacacgttcctctcgttcttcttcgccgtctcatggtatggacatcccacgaagaacttctctgcgtatagcgcatccaaccatgccggtttctgaattccctaccaaatgatttacaaaatctctaaaatatttatctcataaacaatcttaaataagtaaataaaacttcataccataattcaactgtttcctacatccaccattaaatctataattaagtaccaaggagccaagatgaggataaagggtacaaatataaggaattcggtacgatgattgaggtaatttcactacttaagatggtatagaattgaagaagtagtaacctaccatgaggactcaactgaaagtcagctttgggagatggaaacttttggccactactcactacaaagagtaatattaggaagagaaaaaggattctttaggggagtacttgatgataggatttatggaggatcacaagggagagagaaagagagaaaaaaaaaacttatatttgattattcctcggagatataactcttttacacattttaaatatcatataaacttggttgttgtttattagtgttggtgagatgagagatagagggaagaaaaagagagagaaagtgaggaacgtgggagctgtttccgtgtctcctactttaaacatatatttattgggtcatctccttggcttaagagcttaattaggttaaaccctccgtgaagaagagtctctagtagccatcaccaattttaattccttatttcttcctcttatgatctaccaaatacaagagagaaggatagatgtgttaagactcatattggtgttcattaaccaattgaggaagatacaaaactagtataaactattaagtatcatcggtccaagcattgtgaatagaatagtaatgtatgctttgttagaaaatagttacataggcttgttgtagatatttatataaggttagtgattcttaaatttagacataatagattaaataaacaatggatatggattgactagtcaaattattgcctagtaatacattacaataagtagtgttccaagtagaagctatgcaatgcaacctacttgggctaaagataaaaatgaacgcgacaaattttcgtaatgcaatccttacaccctttaattaccgatagaaatgttatctactaaaaactcatatattttggttgaaccaatttttagattcgtggaaacttatacaccgtcaaattcttgatgtcgtggtattagtactaaaaacttattttatgctttattatataatatttcagtctaataggagtagaaatgtacagagcatatggttaatcataatggtagtaatttattaattacaatacccaagaagaaaacatcaagaaaaagattcttctgtcttacgccaacttgttctatttaaatgtcataaacgtctaaatggtaccggtaaaaaaaaaaacaattaaaatggtacttcttgttatggcagataattatattttatacgtcaccgtattaatgtatgtttatatattagctgtttaatcaaattaaggaatactaccttgcaatttacattaaagtttatcttacaaatcttacatcttctactaaattttgttgaaaatttcaattctgcataaaacaaccgccaattataattaaacatgcaatgatttgtataattttaacttttgtttccgttttgggtaaaatatgtttgatacaaatttttttaacttgttttataatttttgaaaaatatttgggtttacttatagaggtgaattcttttattcacctcctttttctctaaccaatcagaatcttccaccaaataaaaaatatataaactcatttaactgtaaaattaacaataatgattttattatattttcttattttttattttaaataaatacaaatataaactttaaattccataaaaatttaaaaatatttcttttttttaaatgaatcatcatatcaaaaatatattcctcaacatgtccgtcaacatctacttaacaattttaaagtacatatttgctcatttgtatggatatgtttttttttatttactatatcttaactttttatttttggataagaaaatcaaatatgatgtttaatgctaatataaaacatttgagctaatttcctaaaacttctctacaaacataaatatatgattctcatttcacttttatttgatcttatatttatattattttgaattataataaaatatttattgttaataaaattttagattgtttctggatatattgtgattcaaaagtttttaaacagatatatattactcaatcaatgaaatatattttttatgtataatctaaaatataacaaaattaaatcattaaaaaaaatttaatcgattaagaaacatttgctcatttattgtgggtcgggttataataaaatgatgcaaaaacaaagcaaaaatgtttttacaaaaccaaataatatggaaaaccatataaaagataaaataataatggacaaaaatattgaaaactaaccaataagaagccatacacaatcaatcataattttataataaataacaacaaaaagtattatatacaacaattaatcggttttttaaaaagaagaaattattaatcctgcagtgtatattgaattatatatttttaaaataaaagtattattaaaaagaaaaataagaatatgatgtttatttttaagggacgggattatatggtaagacgggtttggatcgaggttaatacatgacaatatatcacagataaaatcttaaaattaacaatcaaaacacaattatacaatcttaaatacgatttagttataaaaaatctaccaggagtgtaatcaaattcaaacataagtttctaccaataaaacataaaaaataaataatacaccaatgtcataagtttataacaaaaaagtatatatatttatttcacggtgtatttcatacttattaattactgtcccaactattaccaacaacaaaaatacatttgtaacatcttgttttatagataaaataatttattaaatggcgacacaaaatgcgattttgggacggttactttatcatcttcttctcgtcggttggacgacggtttccatcactttcgccggcgtagtgggtggtttcttttccaccacttctctggttttcatccacgttcggatccacgatctggcgtgatgcttcatcaacggttgcgtttatgtgcctatttattggcagatctgcaattcgacaaatctctacaattttcaatatcatctctgcaaatttctatcctcttcgcttctatcaaaatctctcaaaaattggtgacaatttgcgtcgggctgtccaagacctcaatttgggtgtgaatgacgaacccattgctttacctgaagacattgtgaaccaagctgtcgcagaaaaccgtttcatcctttttcgggcgtcctgtgattccaaggcgacaaaacctccgttcaatcatcgcttctatgccgcgaatctggggtaaaaccggacttgttcacagccgcatagtggagggtcgggattttcaattcattttcccaaatgaagaatccttggaatcagttttgtgtcgaggtctgtgggctttcaatgatcaaatgctgattcttcaacgatgggagcccttgttgccgctcctcaatttcattcctttctggacccaaatcagaggcattccattccaatttctcaactgtggcgtcgtcgagcacatcggacgggccctgggacaagtgctgaaaattgattttgatgtagaggctgtggcgcgggtggattttgttcgtgttctcgtacattgggacatcactatttccgtaaggtttcagaggaagttccaattcactgcgggtgttaacacacttttccggttcagatatgaaaggcttcgaggcttttctgaggtttgtgggatgctgacccatgactcaggggcctgtgttatcgtgaatgggggagaagaacaagatgatgatgacgatgaggatgaccaggctccgcaagggcgtaatcaaggagtggttattagagagattaatgatgatgaagatttggagggtttggaacatgttgctgttaatgtccaaaaccaggatgctgtaaaccaagatgacaacaatggtccggttgaggatgctgaagctgatcttgcagatattgatcctaaccatgatgctctcttacaatctgcaaactctacaatgtttcaggaggaagggaatgctggtggtgagctctttaacccttttccatcttctgctaatgactgccttgatatctcaggaacccctcattataattctctaccaccttgtgcctaccctctggctatcatggactctgagtgtgtgatcaacttggctcctgacactaccacagatcgtgtcaaacgtaagcgtgacgacgaagacaactctatggagataaaaattgaggcgactgaatccatgtctgcgatgaatcaagacggatcccatatgcaaaccatggagacctccctaccgtcaacccgtaagcgtaacgatttggaccttggtgtaggcacaagccagctggcgaatattgtacgggagaacaacgatgatagcattgaagttgatgcaaccacagtgagaggcgcgctgggccctgaaccaccacttccaacatgaggacaacctgctggaactgtcgaggtttaggcattgaccacatagttcgacgctttaaggagatatctcgacgatatctcccggacatcatatgcctttcagcaaccaagcagcaggatgacgacattcgggataaagcttgtgaactaggatttcccttttatgtaactgttccacctgtaggtcttaatggtggcttagtactcctttggaagcagtctgtagatctttcagttttatttcaatcccctaatcttgtagattgccttgttcgaagtaatgaatcatctttctacatttcctttgtgtatgggcatcccaatctaagctatagaaatgatctttgggagagaatagagaggattggaattaatagaaggaacagcccttggctaatcatgggggacttcaatgaactcctaggcaataacgagaaaaggggaggaagggtaagaccagaggctagtttccaggattttagaaggatggttaggaattgtgactttacaggcctaaaacagataggagatagattctcttgggttgggcaacgaggagatcacctagtcacctgctgcttggaccgcactatggcaaatacagaatggcacaacaattatcccgcttcagaaactgagttccttgagctgggtgaatcagaccatcgtccattggtctcttacgtctctgatacagtggaagaccaaagaggctgttttcgttatgatacccgttttctgcataaggatgggtttaaagactcagtcttaagaggttggcatggtggtattagacagagtgagacggacatcccctttacagacagaattactagatgctggagacaaatatcacgctagaaaaggggtcacaaaaccaacgctaaagaaagaatcaggacactccgatataaactggataaggcggctacttcaagtttgtcaactacagtagaaagaaataatttgaagagagaactcaatcaaccttacattgatgaagagattttctggaaactcaaaagcagaaactcttgggctcatgaaggagacaggaatacgaaatgcttccattcagtgatgaaagcaaggaaagcacggaacagaatcctctctactgaagacagcgatggttttgttcacagaggtgatgcagctattgcggatgtcgcagtcaactactttcatgatctgtttcaatcctcaaaccgttcagatgcacttcaagcagatgtttttcaggattttccaaaacgagtcacacatgaaatgaatatgcaacttacacaaagggtgactcaagaagaaattaaggaagttgtttatagcattggtcttcatagagctccgggtcccgacggtttttcagcagctttctatcatcatttctggagtgagattagccctgcagttttgaaggaagtggaactattttttgaagaagggaatctggataagatacataaccatacaaatctctgtctcattccaaaaacagaagctcctgtgagtatggtggagttcagacctattgcgctttgcaacgtcagttataagattatttcaaagatcttggttaacagtcttaagaagcacttatcaagcataatctctgactaccaagcggctttcatccctgggaggatgatcactgacaacaacatcatagcccatgagattttccacgctctaaaggtcagaaaacgacagtctaaatcttacatggctttgaaaacaaatattgccaaagcctatgatcgtttagaatggaaatttctggaaacaacaatgttgcatatgggttttgatagcaaatgggtacagtggatcatgaagtgtgttactacagtgagtttttctgttcttatcaatggatctccaagagggatgatcattccaggaagaggtatacgccaaggcgatcccatgtcaccatatctctttatcttatgcgcagaagttctctctcatatgatgaaacaagcggaggctaagagattacttcaagggctgaaaatctgcgatcaaggtccagcgatcactcatcttttattttccgctgactccctatttttcacgttagcaaatgacaagtcctgcaaagcaatcaaagagatccttaactgatatgaacaaattttgggacatgcagttaacttgaggaaatcggcgatttcttttggaagcagggtcaaagctcaagttaaaactcgcatgagacacattctgggaattcacaatgaaggaggtgggggcaagtatttggggctacctcaggaggtcacaaggaaaaaagcagaaatgtttaagtacattgtcgataaggttagggagaaaacgcaaggctggagtaagaaatttctttcttctggaggtaaagaggtccttctaaaatttgtagctctagccttaccgtatactcaatgaacattttcaagttgccaagagaagtttgcgaagagataaatgggatactagcaaaattctggtggagtaatggtgaagataaaaagggaatgcattggtttgcttggaaaagaatgggactgtcaaagaaggagagaggtatgggcttcagagacattgagaattttaatcttgctttatgaggtaagcaggtttggcgaataatgcagaaaccagactgcctcatggcaaggatgttaaaaagacgatatttcaatgatacaaatatcctcaatgctacgcaaaaaaggcacgcctcctttatttggaaatctttgcttcaggggcgcgacctaatcaaaagaggactacggattgttgttggtaatggctctactgtaaatgcttgggtggacccgtggctgcctgttaatctaccgtgccctccacgagcaagaaacaaccctccggaaattattctgttatcggattggattcaaacacctgggaatagttggaatgaagccaccatcagagagatggtgattgaggaagatgccaacctgattatgtcaattaagctatgctctaccgcaactcaagatatgttgggctggcattataccaaagatggactatattcagttaaatctgcatattggttagcaaatcaattgtacctagatcacaccattcagccgccaccaagagacaatgcgatcaaagcaaaaatctggaaactagacactgctcctaagattaaacactacatatggaaattctgttctggggctttggctacgggtgccaatctgcgacgacgacatattaatgatcagtcaatctgccaccagtgctgccaggaggaagaatcaactacacatctgttttttgattgttattatgctcaacaggtttggagagcatcagggattcctaatcatgcggtaatcaccgctagtgggtcgatggaatcaaaattggaggctattctattgggtaatctaggcaaaaacaatctgcaactctttcacttagctctctggattctctagcgactatggaagagcaggagcctgcttgtctttgaacaaaagcacttggcttggctgaatactttggagagagctaagcatgacgtcgaaggttggaatagtgcgcaagattatatcaagagctttcaacaatacggggggcaggaaacacataatacaaggaatcaaacacaagctgagtgggtgagaccaccaaccggatgggtaaaatgcaattatgatgggtcttataatcctctcacgcaagcatcaaaggcgggttgggtacttagagatgatgaaggaacctacagaggtgcaggacaagcagtgggggtttcaaccaatagtgctttggaaagtgaatttcaggctttgataatggctatgcaacatacgtggagtcaagggtatcgtcgagtcatttttgaaggagactgtaaacgtgtggaagagcttatgaacaacaaaactatcagctttgggagttttaattggattcgtgaaggaaaggcttggcaaaatcgattctcggaagttactttcacttggacctcgagatcaactaatcaaccagcggatattcttgcaacaacaagacttcctaacaacagtttatttcaatatcatttttatattccctcatttttaacaaatgctctgcattgtaatcactttcaatttcattaatggaagcagtcgttaaaaaaaaaacatcttgttttaggaaataaaatgttgcatgaggagagcttaaaataattgatttagccatttactgttatcatcttttcggtcaaaaatcataagagaatctacacttaaacgtacttgagttgaaacgatttcatgattggtgatctattggaagtgattgtcgatagcgtgtgaatgagaacaaaacatggaaataaatcacatgattatttttaagggcggcaaacaagtctttaaaatctctggaagtagcgttttggccgtcggaaaagagtggtacacagacctagagaaaacataggactaactaaggatgacggttgagaaattacaatatttcagtaaatttcaaaacccgcgagagctaacttttgattcctctctatctccaaatcctcgtttgtataatttggccatccattacttaactcgaaaaagaagaaaaacaaactaaacgtcattatcttccaataaaacttcaatccgtaacgcaatcactcttttatgactgctaacatttggttgaaaatttgattaaattcacaaaacagaggatcattccaaacgaaagagaaagtatatgtaaaatttcaatagaaaaacaacatcatcaagaaaatactcggaaatgattatactggaaagaaagtcatcactggtgaatgagtatcttattttcttttacctttttatgtaatactaaatttatatttatttaattttaaaaatacaaatgttgatatacaaaatccgcaatcatatagattaggattgatgttagtacaattgttgggtatgacttgaattggatttggcctatgttattggatccaattagtctagattaattagaattccttccttataaataatctttttaacccacttttcatgtatttttaaatgtgtattctcagtgtaaaatatgtctttttcccgtggagataaccaataaatagtaataatgatccatattaaatttgtgtcgtgttatttaatatttacaatgatgttattttatccttactcacatccgttataatagaactcagcctggagttacggtgacttaatgaaatttgtctgagttataagatgacccagcctacgttacggctgacctactaagatttttctgagttgagaattttgagcataacccaacctaaattacgactgagtttttatccgatggttgatttgtcaaaattttggctgagttattctctcgacatggcttagttaactttttccggctagctgaattatcaaaggcagcttagttctgagatgtcgttatggctgatttatgtttgagtgtcataaaatcagccattatgagctggattaacggataactcggcctagttacggctgacttaatagcaaaagattaattactataatagcatgcaattacggccaaattattaaacgatatggctgagttaaagattgtcagttgagttacgacattaaacggctgaattaacttgctgtttttcgttttctaattactgtaatagtattcatgttgcgactgacttatatctttgtttgatggtttatttatttaggcaaattttcatgttattttggtggcttacttgccatttcatcaattaaaaaataacgttgaatgcaacattccacgtcatcatcatcaaatgaaatatgaaacatctttttttcaactcgtcttctcacctgaatttttcacatcaccggaacttccatttcgttatcgtcttcctcattcttcttcattttctttcatccttctcccggtatggttgatccggttccggtaattgttgtttctgataattgggtaaagaatttgtatttaacatctacaatagagggtgtagagttatgcaaatagatgcgaaaacaacacatgacaagctt

SEQ ID NO: 209 - DNA, 58690 bp, Arabidopsis thaliana
  modified_base (27227)..(27286): a, c, t, g, unknown or other
gaattcattcgtcctagtacttcaccttgtggagcgccggtgttatttgtgaagaagaaagacggcagtttctgcttatgtattgactaccgggggttaaaccgggtcactgtgaaaaaacaggtaccctttgccaaagatcgatgagttgttggatcagttgaggggtgctacttgtttatctaaaatcgatttgacgtcgggttatcaccagatcccgatagcggaggcagatgttcgcaagactgctttcaggacgagatatggacattttgagttagggtgatgcttttcggtttgactaatgcacctgcagcgttcatgaggttgatgaacagcgtgttccaggagtttttggatgagtttgtgatcatctttattgatgacatcctggtgtattctaagagtcttgaggagcatgaggtacatctgaggagagtgatggagaaactgcgggagctgaagctgttcgctaagttgagcaagtgcagtttctggcagagagagatgggttttctgggtcacattgtttctgtagagggagtttcagtagatccaaagaagattgaggctatcagagattggcctagaccgacgaatgccactgagatcaggagttttcttgggttggcagggtattacaggagatttgtcaaagggtttgcgagtatggcacagccgatgactaagctgacagggaaggatgttccgtttgacgagtacaccattgttagcattgccagagcatggagagtcttacatagtgtatactgatgccttgagagttggtttgggttgtgttctaatgaagcgtgggaaggttattgcctatgcatcgcggcagttgaggaagcatgagggcaactatcctactcacgatttggagatggctgcggtcatctttgccttgaagatttggaggtcttatctttatcgcgggaggaggatcaaggaacttcggcgaaagaagattcctttgatcaaaatcatgtgggactgcgatggtgtgacagaggagacttgggagccagaggcgaggatgaaggcaaggttcaagaagtggttcgagaagcaggttgctgcatgagtttgcctatccttggtttccagtttcagtgatgttgagtttttgagcttttgagttgttgttcttatttgtctttcatttgtattttcgtttggagttgtaacgatcatgacatttgatgattaataagatgagtatttttttttttttggatttgacttgagttgtcttatttaagaatgtattgtgcggtttccaaaaatggaaagtttcccaaaaaggacttgtctatttttggaaagtttgagtaaacaacctaagagagaggtgtgtttacgagatggccgggagttggtcctaaggatatcctcgaggggatatgatggatggtgaggcaaaaaggtgtcttactcgaatccatgagagagtctggagatatggtcggaagcgtttaatattgtttgctcgagggacatgagggtcccaacgactcgtgaggagcggagtatgctcctgaggtaccgctaactcgagggacttggtgtcttcagagtgcgaggggtacggtggcttcgggtgacgatccgagagcaccctttagggtgacgacccgggagcgagttttgaggtattattttttccaagtgtcgtaacttgataactttgtggctgagagtgagccgacacaactcagggtttgacatttgagtggggaagataatacgtgtgatacccgagagtgacggtttatgctcgaagattgcggtctgagaatggagagtgagttgtgagcaacaatgactagtaaatcgttagtatatcgactggatagagagacctagtgggtgtgtgattggagggagtgcggaccgtagtgatggttgcacggagttcctcggagtggaagggtgaagctagattcgaagacgaatctatgttagtggaggagaattgtaacgcccgtgaaccagaaaattggttagagtttgtatttaaatcgtccggtttaattggtttggttaattggaaactctacagtgtgcctataaaagaaagaaactcgaaattagtgttttagttagccacttttcgttttataaaagataaaaagagagagaaagagcagaatcgttagggtttgggagaattcagtttcgtcatatcaaatcgtggtcaaaggtaacgaaattgggtaaagttattcccaagtcctttatcgttattctccagtttttagaattggatttggattaaaattggataagttattcgctgtttcgtgagacacattttctcagacgcgaattaggaccagcggggtttgaaactgagatcgtggtctcgtctgtttcccgatcggcacgagtttttgtgggcagcgttgtgacgtctacggctagcggttcactggagcaatttataagttaatggttagtttgtattttagggtttcgtctttgacattgttagtttctgatttttcctgtccaattgcttcaaggttgcttttggttgtggacttgttgtaggacgtttctggattgtttcagacgcaaggagagtctctcctgggttaaattgttgttagaatcaatttgttaaggtgagtgcgtgaccatgagcttatctgagcgattgggttgtatgatttgttttgtgtgatggtatgtaggtgtggtgattgtgtttttgggtgaattgttcaatgactggtttgtttatgatgtatttgtgattatacccttttaattggttgtgtgtatagctcgtagatgggaggatcgcctcactaagtatttgtgataatacttacccatctcattgtattgttgatgcaggtaaagataaagtgtgatcgtagaatcatggcaaggaagagaggatgatctaggaactcatttggtttatttttatgttttggttattagaaccggttagggttgtgttaggatttttagtcattcttggttttgttggttgaattatttatttattcataaaataacatttttgacttgcggtttaattgttattttattggttggtttaattagatatttatgggaatatttaattatgttttaaaaaacaaaaatgggtcgggttgtttcaatttggtattagagcgatcacggttataggatgtgtagaataattaattgatgaattatttttcaatgattgatgtgggatgagctagggtgttagcatactgaggattgattacggagtgtttagtcaattgtgtgttgttggagtcctagcatcatcttctctgagccttaaatgagatttcacggtaagtagtttgtgatatattcgtttattttagtttcttagccatttgttcttgagtagcgcagatggttaaaggaactggagttcgtggtcgtggtcgtggtcgtggtcgtggtcgtggtcgtggtcgtggtcgtggtcgtggtcgcggtagaggacgagtcctcgagggtaccggcgagagtgatggccacaatgccactattgagaagagtgtgggtttgcagcctgagtttgtggagcccggggttggagacggtcttggtgccgatatagctggtgcagccggagtgggggctggtggagcaggtgtcagtatcggtgtgcatgtcgttggtgctgagggcccaagagtgatgggtgccgcagccggaggagcccaggctctagaggttggtttggcgggcatgctgagacagttgttggagcggttaccaggcgtggtaccagtggaggctccagttgcgccacgagtggcggaggtgcagcagaggactgcggttgctgaggaggttccatcttatttgaggatgatggagcagttgcagaggattggcagcgggtatttttctggtggtactagtccagaggaggcctacagttggaggtcgcgggttgagcgtaacttcggttcgagcagatgcccggcagaaaatcgggtggatctggcagtgcattttttagagggggatgcacatttgtggtggcggagtgtgactgccaggacgaggtaggcggatatgtcttggacagattttgtggctgagtttaatgccaagtactttccgcaggaggcgctcgaccgtatggaggcgcgttttcttaagctgacacagggtgagcggtcggtttgggagtatgaccgggagtttaaccaactcttggtgtatgcgggtcggggcatggaggatgaccaggcccagatgaggaggttcttgaggggactacgaccggatttgagggtgcggtgtagagtgtcgtagtacgtcacgaaggcggcactgatggagacgactgctgaggtagaggaggaccttcagaggcaggtggtggcagtgagtccagcggtacagccaaagaagacccagcagcaggtggcacctagcaagggcggcaagcctgagcaggggcagaagaggaagtgggatcatccttccggagctggacagggtggtcgtgcaagatgtttttcttgtgggagccttgaccacaaggtagtggattgcacgcagcgacctgagacgagagagtgctaccagtacaaggagaggggacatttcaggccgaattgtcctaagttgcagccgatggcagtggcagtagtacagccggcgctgcagcagggagtgcagcagttagcacagattgtagcggcaccacaaggctacactacgcgtgagataagcagtatcagcaacagagcgatcactggtatgatttcttagactcagactttgtgaattatttctgttgttttggaaatcattgttttgtgatgaatgttaggattcttaacacataaggtttttgtagggactttattagtgggcggtgtagaggcccatgtgttgtttgactctggagcatcgcattgcttcattaccccggaaaaagtgcctcgcgcagcaacatccgtggagatcctggtgagcagtttggagccgtcaaggttgctggagggcagtttttagcggttatggggagagcgaaaggtgtggatatttagattgcaggggagtcgatgcctgtagatttgattatcagccctgtagagttgtatgatgttattctgggaatggattggttggatcattacagagtacatcttgactgccaccgtgggagagtttcttttgagcggccagaggggaggttggtttatcagggagtgagacctacctcaaggaattcattcgtcctagtacttcaccttgtggagcgccggtgttatttgtgaagaagaaagacggcagtttctgcttatgtattgactaccgggggttaaaccgggtcactgtgaaaaaacaggtaccctttgccaaggatcgatgagttgttggatcagttgaggggtgctacttgtttatctaaaatcgatttgacgtcgggttatcaccagatcccgatagcggaggcagatgttcgcaagactgctttcaggacgagatatggacattttgagttagggtgatgcttttcggtttgactaatgcacctgcagcgttcatgaggttgatgaacagcgtgttccaggagtttttggatgagtttgtgatcatctttattgatgacatcctggtgtattctaagagtcttgaggagcatgaggtacatctgaggagagtgatggagaaactgcgggagctgaagctgttcgctaagttgagcaagtgcagtttctggcagagagagatgggttttctgggtcacattgtttctgtagagggagtttcagtagatccaaagaagattgaggctatcagagattggcctagaccgacgaatgccactgagatcaggagttttcttgggttggcagggtattacaggagattcgtcaaagggtttgcgagtatggcacagccgatgactaagctgacagggaaggatgttccgtttgacgagtacaccattgttagcattgccagagcatggagagtcttacatagtgtatactgatgccttgagagttggtttgggttgtgttctgatgaagcgtgggaaggttattgcctatgcatcgcggcagttgaggaagcatgagggcaactatcctactcacgatttggagatggctgcggtcatctttgccttgaagatttggaggtcttatctttatcgcgggaagaggatcaaggaacttcggcgaaagaagattcctttgatcaaaatcatgtgggactgcgatggtgtgacagaggagacttgggagccagaggcgaggatgaaggcaaggttcaagaagtggttcgagaagcaggttgctgcatgagtttgcctatccttggtttccagtttcagtgatgttgagtttttgagcttttgagttgttgttcttatttgtctttcatttgtattttcgtttggagttgtaacgatcatgacatttgatgattaataagatgagtatttttttttttttggatttgacttgagttgtcttatttaagaatgtattgtgcggtttccgaaaatggaaagtttcccaaaaaggacttgtctatttttggaaaatttgagtaaacaacctaagagagaggcgtgtttacgagatggccgggagttggtcctaaggatatcctcgaggggatatgatggatggtgaggcaaaaaggtgtcttactcgaatccatgagagagtctggagatatggtcggaagcgtttagtattgtttgctcgagggacatgagggtcccaacgactcgtgaggagcggagtatgctcctgaggtaccgctaactcgagggacttggtgtcttcagagtgcgaggggtacggtggcttcgggtgacgatccgagagcatgctttagggtgacgactcgagagcgagttttgaggtattatttattccaagtgtcgtagctcgatgactttgtggctgagagtgagccgacacaactcagggtttgacatttgagtggggaagataatacgtgtgatacccgagataccgtaggcctaggcctgagagtgacgatttatgctcgaagattgcagtcttagagtggagagtgagttgtgagcaacaatgactagtaaatcgtgagtatatcgactggatagagagacctagagggggtctgattggagggagtgcggaccgtagtgatggttgcacggagttcctcggagtggaagggtgaacctagattcgaagacgaatctatgttagtggaggagaattgtaacgcccgtgaaccggaaaattggttaaagtttgtatttaaatcgtccggtttaattggtttggttaattggaaactctagagtatgcctataaaagacggaaactcgaaattagggctttagttagccacttttcgttttataaaagagaaaaagagagcgaaggagaaggagcagaatcgttagggtttgggagaattcagtttcgtcatatcaaatcgtggtcaaaggtaacgaaatttggtaaagttattctcaagtcatttatcgttattctccagtttaaagaattggatttggattaaaattggatgagttattcgcagtttcgtgagacgcgaattaggaccagcggggtttgaaactgagatcgtggtctcgtctgtttcccgatcggcacgagtttttgtgggcagcgttgtgacgtctacggctagcggttcactggagcgatttataagttaacggttagtttgtagtttagggtttcgtctttgagactgctagtttctgatttttcctgtccaattgcttcaaggttgcttttggttgtgtacttgttataggacgtttctggactatttcagacgcaaggagagtctctcatgggttaaattgttgttagaatcaatttgttaaggtgagtgcgtgaccatgagcttatctgaacgattgggttgtatgatttgttttgtgtgatggtatgtaggtgtggtgattgtgtttttgggtgaattgttcaatgactggtttgtttatgatgtatttgtgattatacccttttaattgcttgtgtatatagctcgtagatgggaggatcgcctcactaagtgtttgtgataatacttacccatctcattgtactgttgatgcaggtaaagataaagtgtgatcgtggaatcatggcaaggaagagaggatgatctaggaactcgtttggtttatttttatgtgttggttattggaaccggttagggttgtgttaggatttttagtcattcttggttttgttggttgaattatttatttattcataaaataacatttttgacttgcggtttaattgttactttattggttggtttaattagatatttatgggaatatttaattatgtttaaaaaaaaatgggtcgggttgtttcaattagaaagtggttcgagtggggttggagagtggttcgattgggattgatgagtggatcgatcaggattcactttgattgggattcatttcgcttgggatttctttcactcacttcgatagcgaggaagtgttaaaggagcctgttcatttcggtgttggagtaggcgccttaaccttgtatgttatccgagaagatgatccgtacttaggtcgacttgtagatagtaatctcggttacttagcagattaagattatgatggtgagttagtcattgctaatgaaggtgatgaaggtgctaatccaaaagatgaaaataaaaaataaagagcaaaatggtgacatcagcaaagagagtgatggtgacgatggtggcaatcaagttgttgatgagagcaagtatccgaaatttagtattggtgatgagtacaacacaattgagtcttttaaggatgctattaacaagtattcagtaaagaagaggagggacattaaatatgataagtcggatagcaagcgtgttgtagctatttgttcagcgaagaactgtccttggaggatttctgcatctataaataccagcagtagtatagtggttattagagctttgaatgatgaatatgattgcacttggcaaggtaaagtgtcacttctctctaatgctcgcattgctgatctttatcttgaagagttcagacttaatccggatttctcatcaactcagttgcagaataagcttttgagacgtaatatcattattccttagataatctgcgagaggacacgcgtgagatgcttgcagattttttatgatgagcaagcggagtctttttctaggctttttaattatgtagctgagttgaaaagaagcaatgagggatctacaacgtcattgtagttaaaagaagaaaaattcatagattcaattgttgctttgctgctctaaaagatggatgaaaggcagcttgtatgaagattatacatcttgacggaacatttttgaagtggagaatgacaagaatgtttgttagtggcttgtggaagagatcctaatgatcagatgtttcctatagcttgggggatagttgattgtgagaatagtccaaattggcagttgtttcttgagcatttaatatatgacttagatttagaggttggagatgggttaacattaggtagtgatcactagaaaggattgatcgcagcagtgaaggatgttctgccgtttgctgaacatagaatgtgtgccagacatattcatgcaaactggaagaaaaaacatttcggagtagagtttgaagacttgttttgggctgctgcatattgttattatactgctcagtttgatagaaagatggaagagttgaagacttattcacttgatgcttataatgacttgaagatatctgtcttctttccatggtccaggtatgactcttataattttatagtaacattattagctttatagatttctcagttcatagatgtttgatgttttcttattcaggggtttcttcaccgagttctcaaaatgtagtgttgtggaaaacaatctaggagagtcattcaatgcaaccaaaccaatactggagatgctagaagagataagaaaaagagtgatggtctctaatgagaagaaaggggctgaagcagggaaagcaaaaggagattagacttcaagatctagagctttgctgaaccagcaaatagatttagcaaagaattgtcgtcctttaagttgcggcttgggaaactatgaggttgcctacttcaactacaaaaccaatatgcgaatggatggctttattgtacagttgcgggctgtggtctcttgtacttgtaggatgtatttgataagtgggattccgtgtagccacataatttcatgtctgaggcatgagaagaacactgatcaagaccctaagactttgatatctccttggttaaccacagaaaagctgaaaagatgttatttgaacttgatgcaacctgttaatggcatgaacttgtggagggtaacttcagctccaagggtaaaacctcctccgtaaaagaagcccaatggcataccaccaggaaagaagagaaggaaagagaaaggtgaaccaagaaatgcaaagataatgtctaaaagaggaaccaaaattgtaagtgaatctgttcttttcacttaatttgtttcacataagaaatcttattttgtttcactcctatcttttgtgcagcattgtagcttatgtggagaagaaggtcataacaaactcaaatgcaagactggaccaaagcctaagccaccaaagaaaccaccaagtaggccacgaaagcgacaatttgcctcgatttctgaagctgaaccaagcctacctagccttccaagccttccaaacgaagttgaagatcttccaagcctgtcatctgcacttcctaggaaaggtcatggaagacctcgtaaaagttagtttgatggtgcatcatcctctcaacctcctcctgaacgaacagagcctatgtatgacatagggcctagccatctaccaagtgtgaattcactacaagaataatgagtatctatagcattagaagataacagttaacgtatttgtgctatagttgacttatctctgtttttcatagcgtttgtaaattgagaaacgatattatacgtaatcgagaaaaataatagttctgcttttttgttttgggctgtaaaggctttttaacatggtatgtgatagcacatgccacattataaacgttataaaaaattttggctccagaaactattgacatgtgacctaaaaccatttagtaattttcttttattaatttcttattctcttaaacctaaaaaatccattttctcttctcttaacctaagtcttttcctcttcctctcttcgtctccttcctccactttcttctcctcatttcttcgtcttcttctcctctttttggtcaaataaatctaacgtaaatttagcacaataattttcaaagaggaataaaagaggttcctttgagtgtttgattttagcaagtttgataaatcgaagactgtgttgaagagattccgtcatattaatgtttgcttttgagatggagaaggataggatttcacggattctccaattttatctcgttggccacggaaacatatcgtcggagagaagaagatttgttcagatttgataaaacaattgtgagttttagtttcctcgtattaatcaaaatacatccaccgagtgtttgcttttattcctcactgaatataaagttcagagctttgtttttttattttgttttaactttaaatcattttttgtttttgtgttttgactatatcgagatttgagatgatcaaagaatgattttgtagttgctagttggacaagatatcggtggtttaggttctggaaatagtattcaaaaaattattagatctggtgcggcgaagaaagcgctataataattaacagtatgataacacaaacaaaaaccggtatattatgtctttgacctattatgacggacgatgatagagcgcttattaaaccgctatagtatcgttaaatagcgtttatgtttagcttagaatttcttttatgactcaaatctcttatatgtgaatttttataggaaggttacagtgtcttcaccagtcctgtaattggtgatgactatatccatcttggtaggtctattgttgactcacgaaataacacaatccttcccagtacgagaatgcaagaaacttgctgttggacgtggtagtggtcgtggcaagaagaaatgattatgtggcgttgtcttttgtatttttagacttgattagtttatcagatgtgtttggaaggtttggaatgatgtttggtttgctttgtctcaaacttggttgtttagtttactttatttggttgtttttgtgtctcaaacttgatgtttggttggttttgtctcagaattgagaattttaatcggaattgttttctagttttttggtctattaagaacatgaatgtgtgtctttttgacactacaaactgagcacataaaaacattgcatctagaaaacataccatactacaatatcataaccaaactaaagacttcatattacaatatcataaccaaactaaagacatcatattacaataccataaccaaactaaagacattgcatctagaatacttaagtcattataacatagtctttcaaagacataacttcaacttagtgttctcttatctatttaaacaagtagacaagtattgcaaacacaaccaaaccgccaattaccacattcttcaactccattgcatttcctacatctatcttctcaattaactttttcagcctaacaatctcttcatctgtctgagcaatcttgtccttttggatcttaattgtttcagacaattttgagagatcctaggatcataaccaccaacataaccagtcgtagagtccggaatgcagtgaatcaagttgtttaggtcttgcatttccaatcctagctgaacgatttcctccatcattacttcatcacacaatttctaaatatgattttctccatcctaaaattgtcaaatgttcacacataagatataatttaagaaagatggaagttactaattcattagcaaattttaaaaacacttaaattgacttacaccactcattacacaagtgtagaatattcttccccggtttgtggcagtccgagaggtttggataattgctaatccaccacagaaacatcgcctagtaatgccattttgcgacattgatggaccccttctctgttgacttgtggaagagctactttcaaacatcgttactgtcatcaaagagtgaacaagatcacctccaaattttacagttcaaatcaaatataaattcgacaaataaaatgacaagaacttcaattttaaacaagatatcgattttaaacataccagattcgccaattcagaagaaaaagagaagattgtcgataaataagaatgctcaaggtaaacccacgaaccctaatttcaaaataaatacccaatttttgttttccactttctaaattaacaccaaaaaatgtcaagatttttggatgtcagagacattccaaaacgccgcgttagcgatgccacatcatcgatatgactaaggactgtttagtggatgactttagagttgatgtggttgacttgcatagttgggacatggagggtagattcgcaaacgagatcgatttcgaggtttttcttttacagaaaatcctttaaataaataatcatgacttttcttatttaatatgtaaaaataatactctttctctttcgttataagtaatgtaaagatttttgtatacaaattaaaaaactataaaaatcttattttcctaaaaaaaaatttattaattatagttgatttaaccagtaaaatataattaaaataaaacaaaaaatttctaaaatctatactattaagagagaatcagggacatccaaattacaagccgtttgagccattttttaaaaacacattataacaaaaaatcaaacaaaaaaaaagtaaaggtaaaatagacaattccggtcatcatcacagccgacccgaaccgcgactaaacccgacccgaaataaaattttgcggatccttcaagatgataaatggtcctcgacgtttcttctcatctttttgattctcaaagtatctccttcgcttacattcctgtataacaccagttctcatcacttctctcctaaatcgattcacaagcctctcctctgactcattatcttcaacaaacacttgcacattgtatccagaactgaagagagtgtgttggagtaagcaagcgaggggaaaatcacggaagcaagctcagaggaaagtgaaaaagcggttgaagaagattcttcgaccgccattgattcgatagcgagatcatttcttcgcctttgggagattgttggagaaggaagagtgatatttggtggtggtgtaggtttggtttgagatttgaatgtttaaatgaaggagatgaagctcgtgatcgtgagtgagaacgaagccgccattaacgcgtcgcgaggaagaagaagaagaagaaattaaaaaaagattcaatttataggttagtgaatcaattacgggtcagaattttgaatccgatttaataatacaggtttggttgatttagattcagatgtaataaatgggttggtagtgatatgggctagattggttttataaggcccattataaatgaagacgcttcaatatcgctatggtctattaaatatgaaactgtttcttgatattcaaatctgccaaattatcctaaaatgaagcaattttgatcaaagtcttcgtacttcctacatatgaagaatatcttgaatattgctttttatattttaaacaactagatattttaggataacatctaatttgaaatcataaatatgagtatacctctctatttgcattctagccattttcttctttatgctatctaaaagccaattcttgaatacttcatataaattgtctagtttgaactgcattgaaagtttatagtttgtaatggacccaagtaagaaagaaccatttttggtcatacatatctcggtttacttggattatatatataaaagaaaaatataattaaattacacataataaaaaattcaaatgtttaagaataaaatttatccatttaattaaaatacctacttaatacttagtacacataaattataatatgtagtcactactcaaaattaaaatacaatatttacctcaaacactaaactaataatccaaaacactttactcaatactatactataataaaatcttcattctaaattaataatatcaatttagaagtttaggaaaaaaaaaagggagattaactgtgatgggtaagaaattaggtgttattaccagaacacgacagaactttttttaattactgttatattttcgacttttttttattacccagcgtgcccctactaaacgttaccggaaaaaacgtaattacagggaatgccactgccacgtcagaatttgctgacgtggattaaatgaactcagccggctgagttacggtatgttgcggctgacttacgtcaagaatatatgagtcataacaaaacggcgaagtatgagtataactcagccagacgttacggctgagttgtaaaatgttgcctgagttatagtataactcaggcaacggtatggttgagttaaggatggtcggccgagttataagaagttatacgataacccagccaacaatatggctgagttatgagaaaaaggctgacttatttcctcgacacggtcgagttatagttttgattggcttagttatggaaggatgtgacggctgagttatggtcgagtgctataaatcagccgccaatagctggattacgatataactcagccatgttatggctgacttattttcaaaagattaattactataatatcatgcagttatggccaagttgttgaacgttacggttgagttagttgagttacgacataccacggctgaattaactttgttttttttcctgttttaattactgtaatagtattcatgttgcggctgacttaaagatttgcttcatgactgtgttatgaactgttcgtttggtggctgacttgccacgtcatcacttcaaaacggcgtcgactgtaataatccatgtcatcattccatgtcagcatcctcgacggaaatacgaaacgtcccttgcttctttaaatcgttttcccagactgtgttcaccgcctgaacgttacaacattaccggaactttcttttcttcattcatcttctcatacatcttcaatttctttcatctttctcttgatatggctggtcccgctacggtcatagttgtttccggttcgtgggtaaagaaacagagattcgtatttaaccccgacgaaagagggtgtagagttgtgcagctagaagcggaaaaagcagtttacgatagtcttttgaagatggtggtcgatgattacggagtgaatcagtcgacccatcagttacggctgagttacatgttctccaacaagactctgaaaaatatgcccttcgatactccaccagtttatatctccaatgatcgacagttgcaatgttatctaggtttgacgaaattcgagcagctacgtctctgtgtggagtttacggcgaaagattcaagtgatattagtcggaaggacggatcaagaggaaggggttcgaaacgccctattgaatctgactcaagagcagaatctagattcgaagttccgggttgggggtttgaaggtgtctgttacgattatcaagaagatgaagcaggggacgatgaagcaggggacgatgaatcaggtgtcgatgaagcatctgacaaagaagcaagtgacgaagaagaagatgatgaattttctagccggtttgattttttcgacgactccgatggtgcctcatctgatgatgaagactttgctgtatacggcgagcctaagaataatgacgaagattcaccgaaaccttctccttcgaagagaactcagaccatggaaatgatcggatctgctgggagcctgactgatttaaagttggagctatctaccctaacactcgcggtaggccaacaataccgtagcaaattcgagttggagtatcgactcaaacttcttgcgataagggatgggtttgattttgatgtaccaacttctaataagactacagtatcttacgagtgttgggtggatagatgtctttggagggttcgtgcatgtagacaaggaaatgatcctaatttttatgtttatatatacgattcggaacacacatgttctgtgagggaacgttctgggcgatcccgacaagcaacacctgatgttctaggagttctttacagggactatcttggtgacgttggtccggatgttaaaccaaaatcaatcggaataatcatcactaagcattttcgagtaaaggtaattacaatgtttcggctgacttactatttatctgctggctgacttatagatattttacggttgacttattgatatagtttggctgacatataattacattaaggttgagttatgactttaaaggctgacttaagatcacttgttggctgagttgtggtatagtttaggctgacttatcgattaatatgtttgtgttaacagatgagttattcgaagtcatacaagacgctcaggtttgcaagggagctcactctgggaacccctgatagtagttttgaagaattgccttcttacctatacatgataagacgggcaaatccgggtacagtcgcgcgtcttcaaattgatgagagtggaagattcaactatatgttcattgtatttggtgccagtatcgctgggtttcattacatgcgcagagttgttgttgtcgacggtacctttctccatggtagttacaaagggacgctcttgacagcccttgctcaggatggtaattttcagatttttccgttagctttcggtgtagttgacactgaaaatgatgattcttggcgttggctttttacgcaactcaaagttgttattcctgatgcaacggacctggcgataatctcggacagacataagtcaatagggaaagcaattggtgaagtgtatccgttggctgctcgtgggatttgtacttaccatctctataagaacattttggtaaaattcaaaagaaaagatttgttccctctggtgaaaaaagcagcaaggtgttataggctgaatgattttactaacgcgttcaacgagattgaagagcttgatcctctactacatgcatacctccaaagagcaggtgttgaaatgtgggcgcgtgctcattttcccggtgatagatacaatttaatgactacaaatatagcggaatcaatgaacagagcactgtcacaagccaaaaatcttcccatagttcgaatgttagaagcgataagacagatgatgactagatggtttgctgaacggagagatgatgcgagcaaacagcatactcagctcacacctggtgttgagaaactcttacaggtaactcagctgtaactagtgcataactcagtcgtcgaataacgataacccagtcataacgagaataactcagccataaagggaataactcagccataacgtatttgttttgtttcttgtctcttctctctaatagacccgcgtcacctcgtcaagacttctggatgtacaaacgattgatgcttcccgcgttcaagtagcttatgaagcatctttgcatgttgtaaatgtggatgaaaaacaatgcacatgccgtcttttcaacaaagagaaattaccatgcatccatgcaatcgcagctgcagagcatatgggtgtgtctcgtatatccctgtgcagtccttattataagagcagtcatttggtcaatgtgtacgcttgtgcaatcatgccttcagatacagaagtccctgttcctcaaattgtaattgaccaaccgtgtttgcctccgattgttgcgaaccagccaggcaggcccaagaaactaaggatgaaatcagcactagaagtcgccgttgagactaaacgccctaggaaggaacacgcatgttctcgatgtaaagaaacagggcacaatgttaaaacttgccgtgcatagtactgtttgtactctgtatgtgtcttccttcccttgtttggcaactgtggtatgtatttcgtgacattgtagactctcagcactgtaatattgctatttatttaacatcccgactgagttatttgccaaaatattctggccgttttacatgttacgtctgagttatttaaatagggaggttgaaaggttcggtcattttacatgttatggccgagttatataattagggaagtcgaaaggttcggtcattttacatgttatggccgagttatataattagggaagtcgaaaggttcggtcattttacatgttatggccgagttatataattagggaagtggaaaggttcggtcattttacatgttacggccgagttgagttcattttacctgttacggctgagttatagataaactatgttaacttacgactgagttatattcgtataatgttatttagtgtctaagttatttaattataatacggctgagttatcaaactgaattttgaaggcaaagaaaaaataaagttcccagaaatagttgtttgaaggatacataggaggaatgaaagtaaacaatggtaataacccgattccttccatcttgcattactcgaggaccatttttaactcttgcacttcttcgatattggggtcgacagtcacatctgatatcccggcataatttggatcttcacgtgtttggggccagtatgatacctgaagatcttccaccatgtgagtgcaacaaatatattgtcaataacaatactgtcattgcgaaaagatcgaaatttcctatgcaagtcaaccgccaattcgccaagagcctcacatttcaacctctccttactgaaacatataaaacagtcttacacttaagctaactcaagaaaaatacatgatgaaaagaaagaaatttaagaagtaaagaaacaaaagaaattatactatttgccataatctcgaaggtaagtctgaatccgtccatctcccaaccatcttctgtaatatttctcagacatccgacctcgatgagtgcaccaaccaaatctgggagtatgaaataaagattaaaaacaggcatgtgatttgtgaaagtatgaaatttgcattagatacgtattacttaccgaccaaattttcagtatgagcggtgtcttcaataatgtagtcaaaaggtgtgaatctgttaaataatacagtttcccttgggtcggaatgagttacctcagttgcattcatgaactcaatcatgtatttgtgggttgttgatcggacaaaaccacagttttcgatgacaccaaaagttctgatttctttccaatgattctcttcaagcatgtcgtagtaacgttgagaaaaccgacttccgattatagcttcaatttggataccctatgaaaacaacattggagggtgagtttatagggaataagacaagcacaaggttaagtatgccttgtatcacgagtgaagatcccattacccactcatcgacaaagacgacccgtagttcgaatgagttatctgtgataaacgagacgtacttcctaagaaccagaacacaaatcgtccagcaagttatgcaaggattcaagtcgcggaggccgtcgtaacccatggtgaaattccgagtcgttgaaaattaaagaaatattttgaactcgttagcttctgtttgtgcgagtttagccttctggtgtttatgggagaagccgtttttataggtgtattaaaccgctggtaattgggccggatataaccatacctcggttagtcagtaaatcgaattgaacttcatgtttttattgacaacttagccgtaatgtgatttaaatcagccataacaaggacgatttgtcgccaaactcagccgtaacacgcaacctttcgtattccttgacttgccttttttaataattcttgacaactcagccgtaaaattgttacatgtcttgtgtgtaactcagccgtaacgaatatattttgccgccaaacacagccgtagcacggaaactttttcccgccaaaacacggaacctttcgcattcctttacctgtcctttttaataattcttgacaactcagccgtataatagttacatgtcttgggtataactcagccgtaacaatatattttgccgccaaactcagccgtagtacggaaatttttcccgccaaacgaacagacacggaacctttcgcattcctctacctgtcttttcttttctatatatcagttacttgaactcatcatttagacgtctcatcctcacatcttaacgacatggtgcctcacatcgacggactgtttctaagagatgtcgaagccgtgctcaccgctcctgatcgtgctgatctcccagttctaaaccctggattgggtacatgggtcgacaaaaccactgttacgtggttcaaattcaatcaccaattagctgtcacgattggtgatatactccagcgcaactttcaccatgcgtggccgacgtaccggatgattcccgttgttttcaaggcaaggtggtttttcctcctcacggtaagcatcgagtttttatataaagcacttcctgtaaaccgtagaccaaattcttactatttgttctctttgtagcactctctgtatgcacacctgggattcaaggcacacgctgacggtgtggacgcagtttaatttggtggctagaacgttgtaccgagacaatatgcgggcgatgaaacggcgatgggcgcgtggtttggataagtcgaggtggatgacgacaacagtttggaatgatttggtggacatgtttactgaatttggtccagatgatgtcggtttcatgtcttgaatgcttttgtgtctcttacttatcgtccctttatctcattccgatgaactcaatatgtttctctgtttttttttttgtgatggctttatatctcatattatctacgatcgccttcgccttctcagtaaagtctgcggttatcgcttgaggttacttgttaaattttatcataactcagtcatagcgtatgattaactcagtcatagcgtataattaactcatccaaaacattataataactcagccgtaacctatatttccgaagacacaacagatattaactcagccatgattaactcagccacaacattaccagtataactcagtcaacgatattggattagcttggccgaagacaaagttccatttcattgcaagctactacttgaaccaaaaaaacgaattaaccctatacgctgagataaacatcaaacacataatagattccagtagcaaacaattcatacaaacataagacaaactagtagccaagaaaaagcctctgttcgttgatttttgggaacattaagataccaaaaacaatgacaatgataataaaggcaagacaaaagcagcaaagtttgatcatcaatttccatttctggttttccctttcgctcctcatcacttcttccttcagttctttcaccatcgcctgtaacgcttctagctcgacagaaacctcggacttggccgcgcttaactcactgtcgaagccggacaattttggccaactgtctacaaccacttcgtatgtaccatcttcgacacatttaaacaaatggtcctgtatattcaatcacatccgcaattaacaacgaaaccaataaaaccctcaaatcaattatatacttacatctttacgagtaggacaacggaagtatggtcttccagggttccttcctgacgtcgatgtatagatgaccacgtctaatccgcaattacacttcgatggtaacccacgtccccaacggctgacggattgcgtactcgcaatcgagttatcgaaattgctactcatttctttaatttttagctggaaaattcggagacgaaaagcaagaaagagctccggatctgaaatcagaaattggaattttataacttagggtttcgttttggggatttataagtgtgtccatgttcatttggtttttgtcacaacgacgacgtatctagtcaataacggagactctgtaacaaaccgacgtcgtatctgacgtagcggagaatatttttcgagaactttctaacataactcagccacaataaaggaatttcttagccattactttgttataactcggccaaaccctgaaagtgcttttcttgagccaacagttgtgaaaatcaagtaattaacatatcataaccacattccaaatagtggaaccgtgaaagtagatcatatcctataaactttatccaacagcctactttgtccaacatcatactatatccaacaacatacttcctagaggttttgacagaccatgttttgtcaatcgacacttgctgaaactaaaagttattttctgttttcaaattgcacatcttcacgctactaatataaccaacaatttggtggctggtttggtatatcataataacatatggtatctcataactcggccaaaacacgaaatcttattgcataactcagccgtaacgttattttattccacgtcgaaacagaaaatttgattattggagggtttagttaaggaataatttcgaactcggttgaattattttaaatattgacgtgttcgtgcatctatgaaaccaatcattattcgcggttccctattaactcatttttttaatctcgagaataacataataattgtttctcgataaactccgcaaaagcaaaacacagcaatattctgactgatttgatgacatcgatcgaaccaacaataatgcttgtattcaaatctcataataacatttggttttctcttatgtagttcgaacaatcgaaatcttctaacataactcagccacaataaaggcataactcagccatcactttgttataactcgcccaaaccctgaaagtgcttttcttgagccaacagttgtgaaagtcaagtaattaacatatcataaccacattccaaaaagtggaaccgtgaaagtagatcatatcctataaactttatccaacagcttactttgtccaacatcatactatatccaacaacatacttcctaggagttttgacagaccatgttttgtcaatcgacacttgctgaaactaaaagttattttctattttcaaattgcacattttcacgctactaatataaccaacaatttggtggctggtttgatatatcataataacatatggtatctcataacttggccaaaacacgaaatcttattggataactcagccgtaacgttattttattccacgtcgaaacagaaaatttgattattggagggtttcgttaaggaataatttcaaactcggttgaattattttgaatattgacgtgttcgtgcatctatgaaaccaatcattattcgcggttccctattaacttattttttttttaatctcgagaataacataataattgtttctcgataaactcagcaaaagcaaaacacagcaatattctgactgatttgatgacatcgatcgaaccaacaataatgcttgtattcaaatctcataataacatttggttttctcttatgtagttcgaacaatcgaaatcttctaacataactcagccacaataaaggcataactcagccatcactttgttacaactcgcccaaaccctgaaagtgcttttcttgagccaacagttgtgaaagtcaagtaattaacatatcataaccacattccaaaaagtggaaccgtgaaagtagatcatatcctataaactttatccaacagcctactttgtccaacatcatactatatccaacaacatacttcctaggagttttgacagaccatgttttgtcaatcgacacttgctgaaactaaaagttattttctgttttcaaattgcacatcttcacgctactaatataaccaacaatttggtggctggtttgatatatcataataagatatggtatctcataactcggccaaaacacgaaatcttattgcataactcagccgtaacgttattttattccacgtcgaaacagaaaatttgattattggagggtttcgttaaggaataatttcaaactcggttgaattattttgaatattgacgtgttcgtgcatctatgaaaccaatcattattcgcggttccctattaacttatttttttttaatctcgagaataacataataattgtttctcgataaactcagcaaaagcaaaacacagcaatattctgactgatttgatgacatcgatcgaaccaacaataatgcttgtattccaaatctcataataacatttggttttctcttatgtagttcgaacaatcgaaatcttctaacataactcagccacaataaaggcataactcagccatcactttgttataactcggccaaaccctgaaagtgcttttcttgagccaacagttgtgaaagtcaagtaattaacatatcataaccacattccaaaaagtggaaccgtgagagtagatcatatcctataaactttatccaacagcctactttgtctaacatcatactatatccaacaacatacttcctagaggttttgacagaccatgttttgtcaatcgacacttgctgaaactaaaagttattttctgttttcaaattgcacatcttcacgctactaatataaccaacaatttggtggctggtttgatatatcataataacatatggtatctcataactcggccaaaacacgaaatcttattgcataactcagccgtaacgttattttattccacgtcgaaacagaaaatttgattattggagggtttagttaaggaataatttcgaactcggttgaattattttgaatattgacgtgttcgtgcatctatgaaaccaatcattattcgcggttccctattaactcatttttttttaatctcgagaataacataataattgtttctcgataaactcagcaaaagcaaaacacagcaatattctgactgatttgatgacatcgatcgaaccaacaataatgcttgtattcaaatctcataataacatttggttttctcttatgtagttcgaacaatcgaaatcttctaacataactcagccataataaaggcataactcagccatcactttgttataactcggccaaaccctgaaagtgcttttcttgagccaacagttgtgaaagtcaagtaattaacatatcataaccacattccaaaaagtggaaccgtgagagtagatcatatcctataaactttatccaacagcctactttgtctaacatcatactatatccaacaacatacttcctagaggttttgacagaccatgttttgtcaatcgacacttgctgaaactaaaagttattttctgttttcaaattgcacatcttcacgctactaatataaccaacaatttggtggctggtttgatatatcataataagatatggtatctcataactcggccaaaacacgaaatcttattgcataactcagccgtaacgttattttattccacgtcgaaacagaaaatttgattattggagggtttagttaaggaataatttcgaactcggttgaattattttgaatattgacgtgttcgtgcatctatgaaaccaatcattattcgcggttccctattaactcattttttttttaatctcgagaataacataataattgtttcaagataaactcagcaaaagcaaaacacagcaatattctaactgatttgatgacatcgatcgaaccaacaataatgcttgtattcaaatctcataataacatttggttttctcttatgtagttcgaacaatcgaaatcttctaacataactcagccacaataaaggcataactcagccatcactttgttataactcggccaaaccctgaaagtgcttttcttgagccaacagttgtgaaagtcaagtaattaacatatcataaccacattccaaaaagtggaaccctgaaagtagatcatatcctataaactttatccaacagcgtactttgtccaacatcatactatatccaacaacatacttcctagaggttttgacagaccatgttttgtcaatcgacacttgctgaaactaaaagttattttctgttttcaaattgcacatcttcacgctactaatataactaacaatttnnnnnnnnnnnnnnnnnnnnnnnnnnnnnnnnnnnnnnnnnnnnnnnnnnnnnnnnnnnncaatcattattcgcggttccctattaactcattttttttttaatctcgagaataacataataattgtttctcgataaactcagcaaaagcaaaacacagcaatattctgactgatttgatgacatcgatcgaaccaacaataatgcttgtattcaaatctcataataacatttggttttctcttatgtagttcgaacaatcaaaatcttctaacaataactcagccacaataaaggcataactcagccatcactttgttataactcggccaaaccctgaaagtgcttttcttgagccaacagttgtgaaagtcaagtaattaacatatcataaccacattccaaaaagtggaaccgtgaaagtagatcatatcctataaactttatccaacagcctactttgtccaacatcatactatatccaacaacatacttcctagaggttttgaaagaccatgttttgtcaatcgacacttgctgaaactaaaagttattttctgttttcaaattgcacatcttcacgctactaatataaccaacaatttggtggctggtttgatatatcataataacatatggtatctcataactcggccaaaacacgaaatcttattgcataactcagccgtaacgttattttattccacgtcgaaacagaaaatttgattattggagggtttagttaaggaataatttcgaactcggttgaattattttgaatattgacgtgttcgtgcatctataaaactaatcattattcgcggttccctattaactcatttttttttaatctcgagaataacataataattgtttctcgataaactcagcaaaagcaaaacacagcaatattctgactgatttgatgacatcgatcgaacaaccaagaatgcttgtattcaaatctcataataatatttggttttctcttatgtagttcgaacaatcgaaatcttctaacataactcagccacaataaaggcataactaagccatcactttgttataactcggccaaaccctgaaagtgcttttcttgagccaacagttgtgaaagtcaagtaattaacatatcataaccacattccaaaaagtggaaccgtgaaagtagatcatatcctataaactttatccaagtgcctactttgtccaacatcatactatatccaacaacatacttcctagaggttttgactgaccatgttttgtcaatcgacacttgctgaaactaaaagttattttctgttttcaaattgcacatcttcacgctactaatataaccaacaatttggtggctggtttgatatatcataataacatatggtatctcataactcggccaaaacacgaaatcttattgcataactcagccgtaacgttattttattccacgtcgaaacagaaaatttgattattggagggtttagttaaggaataatttcgaactcggttgaattattttgaatattgacgtgttcgtgcatctatgaaaccaatcattattcgcggttccctattaactcatttttttttaatctcgagaataacataataattgtttctcgataaactcagcaacagcaaaacacagcaatattctgactgatttgatgacatcgatcgaaccaacaataatgcttgtattcaaatctcataataacatttggttttctcttatgtagttcgaacaatcgaaatcttctaacaataactcagccacaataaaggcataactcagccatcactttgttataactcggccaaaccctgaaagtgcttttcttgagccaacagttgtgaaagtcaagtaattaacatatcataaccacattccaaaaagtggaaccgtgaaagtagatcatatcctataaactttatccaacagcctactttgtccaacatcatactatatccaacaacatacttcctagaggttttgacagaccatgttttgtcaatcgacacttgctgaaactaaaagttattttctgttttcaaattgcacatcttcacgctactaatataaccaacaatttggtggctggtttgatatatcataataacatatggtatctcataactcggccaaaacacgaaatcttattgcataactcagccgtaacgttattttattccacgccgaaacagaaaatttgattattggagggtttagttaaggaataatttcgaactcggttgaattattttgaatattgacgtgttcgtacatctatgaaaccaatcattattcgcggttccctattaactcattttttttttaatctcgagaataacataataattgtttctcgataaactcagcaaaagcaaaacacagcaatattctgactgatttgatgacatcgatcgaaccaacaataatgcttgtattcaaatctcataataacatttggttttctcttatgtagttcgaacaatcaaaatcttctaacaataactcagccacaataaaggcataactcagccatcactttgttataactcggccaaaccctgaaagtgcttttcttgagccaacagttgtgaaagtcaagtaattaacatatcataaccacattccaaaaagtggaaccgtgaaagtagatcatatcctataaactttatccaacagcctactttgtccaacatcatactatatccaacaacatacttcctagaggttttgaaagaccatgttttgtcaatcgacacttgctgaaactaaaagttattttctgttttcaaattgcacatcttcacgctactaatataaccaacaatttggtggctggtttgatatatcataataacatatggtatctcataactcggccaaaacacgaaatcttattgcataactcagccgtaacgttattttattccacgtcgaaacagaaaatttgattattggagggtttagttaaggaataatttcgaactcggttgaattattttgaatattgacgtgttcgtgcatctataaaaccaatcattattcgcggttccctattaactcattttttttttaatctcgagaataacataataattgtttctcgataaactcagcaaaagcaaaacacagcaatattctgactgatttgatgacatcgatcgaaccaacaataattcttgtattcaaatctcataataacatttggttttctcttatgtagttcgaacaatcgaaatcttctaacaataactcagccacaataaaggcataactcagccatcactttgttataactcggccaaaccctgaaagtgcttttcttgagccaacagttgtgaaagtcaagtaattaacatatcataaccacattccaaaaagtggaaccgtgaaagtagatcatatcctataaactttatccaagtgcctactttgtccaacatcatactatatccaacaacatacttcctagaggttttgactgaccatgttttgtcaatcgacacttgctgaaactaaaagttattttctgttttcaaattgcacatcttcacgctactaatataaccaacaatttggtggctggtttgatatatcataataacatatggtatctcataactcggccaaaacacaaaatcttattgcataactcagccgtaacgttattttattccacgtcgaaacagaaaatttgattattggagggtttagttaaggaataatttcgaactcgtttgaattattttgaatattaactgcgggcgtgtgtacctgtgcatgtggaccaaatcattattggcggttccccataaagttgttgtttgttatctcgataatgatataataaataatctcgataaacctaacctaaagcaacacgctaagtagtgacatactgtatgacgacataactcagcaacaaatcagtgaaaacccagctgcaatgctatgacaagtcagccacttctaaatttattcagccaatacaaagacgccatcgtttgattagtacattttgtggcagacacgactatttagaaccagtgctttagtaccatactaattgcagtgaagatgatggctcagaggtctcttttccaaggcgaatctagtgttgatgtggtatttatctccacatctgaatagtacaaatcgttacccatctaacgtcgagtatatcatgtttgtgttaatgtaggagcttgaccgtatagaaataaggatgcgaacgaggtacggcgaaaacaggaggcgcgataagagcgttccgatcgagtgtgattgcaatgctaaggttgtcgttgccacttctcttgatcctgttacaaccggaaaacttttttcagctgtccgtaagaaatatcagatgtatccctatgaattaacctcctggtttttttataagggtcccggtcaaggatgcggtttcaagagatggtggactgttgcattttgtgacgagtttgacatgataaaagaggagacgactgagatgaagaaggatctggaagcagccaattagcgcgttgagtctcaggcggaaaagatctttcttatggaaaagaagtttgaaacgctaaagaagaagtatgagagcctgaacaagtatctgtgatcttagcttaatctgtttttctcaatttgaacttctttgtactgtcaattatcattaagtcagcgaattgtgcgattataactcagccaaaacgtacaatcggattaaatttataataactcggccgttacgttagactaactcatccacaactcaatactatctcaaccaacgttgaattaaaatataataactcagccgtaacgttagattcgctcaaccatacatcaagttaatctacgataagtccgccttaacgttagaataacaatgattgagtcacatgtttaactcagccaaacatcaagttaatctacgataaatctgaaagacaaagtttttgaatcacacatgcgagtataaaataaaaagtgaagtttgaaaattgaaaagacagagtttatgataacataggataaggagtactggaatccaacaacatacatataatataattgaaaataaaaaatgaagatacaattacgtcaatcgccatcttcattcttcgtcggactccgaaattggacgcccggtcgatccataccccagtttctcccaatcaatactactcatcgggcgttcacgctgcgctctgtaggccttgccaacctgcgccagcactttctcgatctcctccttcacgttaaatccgtcccccatcctctccactctccataagaccttaagttccgcttccttctcatgcagtttgatatcgagcaagtgtgcttccgccgtctcccttatgttgctcctgatgtaagagatgacggatttgaaatgcttctcctattcatacagctttagggtggggctgtcatccacagacggccacttgttgggaccgtcatccacacaccgccgcttgtttgaacctgaacctgaacctgatgcatccatgatctcggaatggttttatttctcagagaaaggacaagagaagaatgaagagttgtagttgctaagaatcgacaagtgaaaagacaagaggaaaccagtgtatatatagttctctaacgacgtttggtcctctaacgtaacgacgtttggtcctctaacgtaatgacgtttggtcctttaacgacttttgggttcttgactattcaggtgtcgtaaactggtgtatgtatagtcctaaagtcacgtctggtttatttgatgggagggaagtttgggtttgacaagtcaaccaccacgttatacaaactcagccttcaaacgatttgtgtgatgacaagtcagccaccgcgttataataactcagctaaacatcgaattaaacaacaataactcagccgtgtagcacgatttgagcgatgataagtcagccttcacgttagcatatatcagccgtaaaacgaatcgagcgatgataagtcagccattacattggtttttgttataattaacataacaatagattcatacagacataattctggttatcaatcctaaagtgtcaatatttagtacaatcacatgctaataatcccaaaagacacagacatgttcgaaaaagcaaatcatgtctcataaaaccgaatgggcattctgtgaggtagttcatcgtagatctctgttgccatcctaacccgtagcccctggatatttgaatcagtaatgccatcaaaagaaacaccaagcaataaacattcaagaatctttaacgggtaaaagccgcagtccctggtgataatattctgcgggacctttgtaaagttcctccgccggaatgaaaattggtcgtattgcgggacacggacttcgggagggataatttcactcatgatctgtggaatcatcctcgtgaacggcctacagtgttccaggatttttccatcgcttttctttgtatgacatctgacgatgcaatcatagcagtccacgtgacccctaggcaagtccacgtgaatggtcacccaatgattacctcctgtttggaggatagtatacaagttatccacatctgttatccacttcttgtttttcgggtcttctccacccaatccgttgatccaactttcatacgtggtacctttgaaagaaaccctcttcggcttcatcgcccactgtgtgtaatccctagtccacattgacgtgaaccacgggtctagaatcatgacgcgttcgctgtagtatggggtgggatctcgcaggagcctcatggtgaggactttcacatacgcagcaatgtgctggacaaaaataaaaccaagacaaaacacaacattaactcagccgtaaccaagtaaaactcagccttaacacctaaataaatctgtcattagctaaattaactcagacagaacgacacgataactcagccacaaccttagaaaaactcggacagaatataacaataacttacattgtaaatcagccattatctactttaactcagacagaacgacacgataactcagccataacattagccaaactcagacagaatataacaataacttacatcatcacccagccatccatgtttctcgtctggccagtcctttctttcggccttgataacagagtagaacagcacctcgtccatcccattttgcaaatattgtttgctaacaaatagtaaagaaagttaatataaacaaatagtgtaagcatgtcgtatttaacaacttagtaatgtataaagggccataccattcgggacttgtcaaataagccttaagcttctgcagtttggccagatcaaccggtgccagaggatcatagattgctcgtgaaggcagacaaccctttctcatgcagctcagcccgttgtctccaataactggaaaaatgtgagtgggcatagcttcggggttaatcaatgagctcccatccggggccagcttaacagtttgagccgaatttcttttacactctttagcctctcggtttcctcctcatcttcatcagactcaggaagcatttcattatactcggatataaccttatccgtgacatcaactacatccgaatcttcctcagctttttccttagcttcctcagctttttccttagcttcctcagatggttttggtttctttattgtaatctttggcacagtaggaggcacctttttaggctgttgcaaaggctttcttcctcttcctcttctcgctggcggtttctagattagctcatttaatgttttctcctttttctgctttggcacatttggggctggtggcttcctagagcgtaaacggcgattgagaagagaaacagtcttaacgaaatcaaaatcagacacaatggagaccttatcaaattctccttcaagcttcctacttaccccaacatcaggcgttaaacaacgaaaactcatacctatgtatatatataactcagccataactaactaaactcaaccgtatcatattcatatacctcagccataactaactaaactcagccgtatcatattcatataactcagccatgactaattaaatttttaactcagccgtataatattcatataactcagccataactaactaactaaatttataacatgaaaacaactcagccataactaacaagcgtttataactcagccgtaaaatatttagataactcagccgtataatttagataactcagccataactaactcaaagttataacgtagccgaataatattcagataactcggtcataactaactaaaagtttaccggaggaggactaggagcagcagattggttatttgtaggtttctttggaacgtctggtgtcttttgagtttgggccttaggattgtcttcctgcgtttggggctgtggtttggctaaaaacatatctctaatataactgcttgattttgaatcagctatggccttcagctgctctttaatctgtttgacatcgttcttaatcgatccaaaccttccttcaaactttgcttcaaccctcgattcgatttgacatccaatcacatccagacgggaggacatttcttttatgctagtatcaacagtgtcaaatcttgagtttaagggagagatcaagttggacaccacatccacgagcgactgctgttctccctgaccatcctgctcacgagaacgaacattctcgtcctcatcagattcgacagctacttccttcttcttattcttcttcttcttcttcttttctgcatctttctcaagagaatcaacatcctcactgtgagagaccttctgcttctttgcgggagattcagacccctccgcttctttatcttttaagagtttcttcttcttctcactcgtcttcacatcccaataacctttaacaagcttaacctcgtgtaagtcttggatcaagttatccagtgctgggtcttctaattggtctggccaaaaatgaaacaactcgcttaactcagccttttcaaccattgtacagacacgcagctacaacacaagagataataaaacccatcagtatgtttaactcagccatcacttaatataactcagtcgtcacgtaagctaactcagccattacagaacatatctcagtcgtcacttaatataactcagccattatagaacataactcggtcgtcacataacatatttgccaaaaaaaaaaagaacataactcagccttcacagaaaaaaacaaaacattaactcagccgtaacataaatatttgataaaaaacagaacataacagagccgaaaccgtacctcaccaccattcgctttgatatcttcagcaatgaccgattctatagttgcacgggtacggctgccaccccatctaagcaacggaatctcatccgcgttaacaacgttcccaaaacgctcggcgatggtgatgattgactcatacgcccaagcctgcaacacgaaaaccagaccactgacggtgtacgtcttgccaataggcctcaacaactttatagaaacgacaagggcttcatatgctgctcgaccccatggataagtcttcatggcttcgtcgtcgaaaactcttttggcactctcaaatggtatcctagagttagtatgcaagccaaaaagtccaatggatagaagaatcaataatccaaaccatctacgcttttcaggaggccaagctctgcacgttactaagccctgcctaagttcatctagattaggaccttcaccggttggcacacgcaattcactgaagaacgctttgtagtcagcttcagactcaaacttttctgtaggcagttgatctatatttaaacccgtgatatgatgaaactcgttcaatccaaaccggatgggtttaccagccacgatacaccaaagcaccttcttcagtattctcagctgtctgcatagtagataatgtacggtcttaccagaccatagaaaatgactatcaacaagcttagcaattaatccaagctctgtctctttcagttctgcccatatttcttttcctattgattctctaattgcagggaactctcccaactttatattatgattaatgcctttaccctttagattagaatccccctcttggtaaagtcttggagggtactcccttgcttggtcttcagacatctgtataaccataaatcagccgtaagcattccataactcagtcataacataaaacaaactcatccacagataccataactcaggcaaaacataaatctaactcagccatagataacataactccgtcataacataaacccatctcagccacacataacataactcagccataagataaatctctcagccatattttaacagaaactcagccaaaccataacataacaacagctcagttaaaacataaaccaaactcagctatatcaaaacagaaactcagccataacataaacaaactcagccgtcatataacagaaactcagacatcgatgtaaggttaaaccataactcagtcacagcataaaacaaactcagacacggatgaattgataaatcataaatcagtcggcaaacaaacagtaactcagccgtcaaatcaaatagatctaagaaatcggccaccatatgtcaatcaacgacgacgttaaaacccagctttaaaaaccatcgttacgcatcggaaaacgatttcagtgacgggaatcacttgcgattgaacttagatgtcagagtcttacttaatggaaacatactcaccggaacttagatgtcggatgtgacttcgcgcttacggaaatgcgactccggaacagacgagaaaagagcaaaacggcgaaagaaaatcgattttgttccgtcgagagagaaagaggaagaaagcgacagttttttttctttgggagatgatgaacagtaaagccaagaaataagaaactcaaacgttatgcagtttggagatgattaatgacgtgaattatggtaatgacatggaatgatgacatgtataatcactgttttttcatttaattttaagttaaaaatgaattaaataataataattaattaaaactagttaggagtgttaattgtaattatacaattgaaacatctgagtaataaaaaaaaaatgtgttctattataaaaataaacatacaaatatgttctatcttagaaattatttcaaaaaaaatatcgatatatacgagccgggcaaagcaaaagttattaatctagtattacttgaaaagaaataataaaaaaacaggaacgataaatgtgaggccgagtcagaatggcagagagatcccctcgtgcggcacgctatttgttcttcttcgctttacccaaaacctcatcatcatcactttgtgcatctttgacctttgactacccacccacccccctaatataatggacgtgggctagtcctttgttttcatattaattttaccttgttaacttacacacatccacgtatacacatcctaacatgcatacataaagaatcggtccaagtccaaactgatttgggtgtctggttttttcggtttttttttgactaaatgatatacaattaaagtaaattatatgataaaaatatataaactacacgaattgtaaactttactaaagaattttatattgaacctgcacatcttctaaccataccaaatttggaaaacaagttttaattcgtttgacggtgaagttataacagtatagtaatttacgttttgataattttaatttatatgctaattagtttaagttaaacccaacaccaccattgctcccaaatctagcttcattgacgcgaaacattcgagcaacataaataggtcagtcaattgcttggcaaaccttagcaactatataaacactttgtacggtattttaaactttcatactcgtatcgtttttggttcacatctaatctaaaaccacaaaatagttcaaatttcaaaaaaaaaaaaaatagttaaagaatactaggtaagccaagctttctatttcggtatataaaaaccacgtaagtttcgaacttttggtttataatctatattcggtatatgaaaaccagtcattagttcatttctattttagatatttctctgttccaaaattggattaaacccatagcacaaaaaacctagctctcttatactattttttaaacctacatgtgatttcttctatatatatatatgtatacatttttaatttataaatttaattataggaattattttttatttcaataaattgcataaaaattatataaaacattatttagatactattagacaagtatactatatgtaatatttaacaaaattttaactcttttggatatcaaagtgttaacataaccaaattttttcatagtgtgctccagattttttgaagagtaaatctgccccaaggtttaggtattctgactaaatgtatagtcagaccctaaccaaacaacataaaattataaaactaaggaaaaagctcgttattttattttcaagtgactttaatgattaatcttgttaagtaaaatgtcatagacaaagagaattgcggcagaagaaaaaggggaggaacgttgacatcggatcctctgcataacacgtgaggctttcttacttccattttgcagcctactaaatttgtttttttcttctaattttttaatctcactttttgaggttcgcaaaattctatggctaacactttgatatgctgttgaaaaaaccagagtccacgtgccttgtaccttttttccgaattggtcggttctgacttacgtgagtttacactgatattaagtatgaatgtccgttgagcgtttttgtattttgagaacaatcattgtgctgttttacattaccctatgaggctatgacattaagaagactagatttttcgaacaattattaagcaaccttcttgagttcgtaaattgaagatttaaacagtcagcttaattgtttgatgattaattattatatcaatttagttgaaatctaaatgagcaccatagttaagaaaagagataattgggaaagagacaatggcttggatgtaaattagtattttgataatttgatatgttacaggctaaggtagagattattaggtccatgagacgggagacccataatctggagaaagcatgtaatgtccaacatttgaaaggtgtgatggatcttgagttattgataagtgtgcatcttacatattttgagcatccatttgttattactatagcattatatcaccactattttataccatttctcgtcatttatcatcactttgcatgtttatgatagttttgcatgcatgttgcatatttgtgttattttcaggtgatttgaacctgttggcgagctaattggaagaagcagacctgatcatatcaatacactcgaccccatggccgagtagatggcttcacgactttaacaaaccactcgaccccctggtcgagtagaaggcctcatcacttcacaccaccactcgaccctgtggtcaagtatcatcatctccaccacctgaccatcactcgatcacaccactcgaccccctggtcgagtctctccatcatcacacactcgaccgatcactctaccaacaagccaagtaccaccatctccatcactcgacttcatactcgactgccagctacagagtcttctccattccgcactcaaccagacattcgagcacaaggaagagaagaagactccagcttatcactcgaccaatcactcgaccacatgggtcgagtgccgttcttaatccgtcccaatactgtttcgttttgagtattagggtttcacaatatttcgctataagtagcatgtatttttcattctcgtttttaactaagttttattccgcagacactatgttcttgacattttgtaatccgaatatctcttaatctatttagtatttgcttttcattttgtttactaagttgttcatcctgttatcatcttgctatcactctgttgctatcatgttttcattcttatcatcgtttatgctttctgcaattatgtctgagtagtgactaggtttctgaggatgggttagagtagtttagaattctcagtgtgctaggttgttgagtttgatttatagatcccttctagattagttgttcttaatgcctattgctttctgatcaacaggaatttgagcccagacatttctgcacccaaaaggtgttcgatgaaatgtctaacccactaattccaaagattcgtggctctgtaccaaggtattggttacatggagtgttttggctttaacttgttgattcgtaatgcctgttaggttagctctcgtcaatggtgattgagtcagggactggtttaacttgagggtctctattgcggtggcacttagatttagttatcgaacttgttgtctagggacaatttattgagcatgtcaatcacctgtaaactgaggaaacaaaactactcaattaccccatcctcaggaaattcctcatctaattgatttcgttgtttactgcatcttgctgcttagttttgcacttctctcctgttatcactctgatactcgaccacacccagttgtctggtaacagactgtgcagtcgagtatctttgtcactgtctctgttgtttactcgaccagtcactcgaccacacccagtgcttggtaacaagttgtgttagtcgagtgttttaactgttctgcttgattttatatttcctgcatgttaacttaggactgctggaacaccccaatatctgttattgcttggcttgattctatgaactcttattgcatcttgattgctagaatcacacccatttggattgacaacctaaattactacaatgaaattattggtgttttaggaaaattgactaaaaacctattatcagttatatataaaagatatgagcctaaaaatacaacatccatcttcctttttgatccaagctttgaagacacaaaatctattatttttactatttctttttaaagttctataaggtgaaatcttacctcttgtatttgacgattaaagaagtaatctttaaaccctattaagttcttattcatcttattctaatgattttattaaaccttactttaataagttctttcgccatgctagagtagttttctagttaggttttaagggctagtcaaagggtggacatgatcgattgtttaggtggcgatatctaggattttgtttgatcgtttacactattatgtttctagttaagctttctcttaacgtatgtagttagccgcacaaactaactctaattaaaattgcttacgtttcctaaaaagtagcttaaaaaacctagtttatgaatgtgtatcgtgttataacaagcacacaccaatttgttacagagttttgtggactagaattgaactctatcttattgctttggtacatgcgttcttgcatgcgtcagttgaggtattgagtataaggattttagccgactaattatacaattgttgatgcaaaaaaatgagttttataatgtccaacgggtgtcacaaaggtttgcaaccgtttgtttaataaatttatccatcaactgaagagttgcattggttagtaaagtttttaaaacttaatcttcaatagaaacttcgacgtaggtttttgaacccatatttgaactctccacatcgtatttgaaacaaaactattgcaaccctgaattagtttatcatttctttcaagatccatcaatgtagcaccgataccttttacaaattattgggagagtaattagaattgatcgaactgtccacttaatcgaattaacaaagccctctatttcttttatttgcaatctatcttggagtattatcaatcattgagactcgctctccccaattttaaaacctctttggatctcagtctttaatactaaatcgtttattatatttttaatttacatatgtacaaaataatcgttagaaaactttgcacttatatttgaaaaaagtaatctattatgatagtagaaactgataaatcttattgatggagaaggctttattatatacagaggaattgctatacatgtaaggtaaagagatacatgaggaggggtaattaaatggatgtaatatgtacaactatatactctaatacacctcctcaagatgaacaaccagtgtagactcttcaatgtggaaaggttttttaagtgtaatcttggtgtcttgtttacttttatgtttaaggtttttacatccaaatttataatatatttttattgccttatacatttttttttttcaccaaaatactatttatattaagttatcggaaaaagactctcctctaggaaaagccattcaggaaccaatgggcttacatggaaaaaagacaattacgagctcgagctttcttagctaaataatgtgctcgagtatttaaactacgaggaaagaaacgaatactaaaagaagagaaaaaacacactaatgaacgataagatgccaattccgctgcgaatattggccaatcgtcttggttgtcgagaatagtaatcaaatttgagcaattggaggcaaatacgccagacgtctcaccaatagagatcaagcactccatcgcccataacaaggagtcaaattccgcgtggagcggtgataaactccggcgatcacttttgagtcccatatggaggacggcgtcgtgtcggacaagaacccagccatgaccgcttagagaatcatctgcatgccaagaagcgtcaaactgacattcagggaactcagcagggggagcttgcacgaaacaggggggatagaatcttcgatgtggtcctcgtcaattgaggttgcttttttccaaactgcagcctcttgaagggccaaagcgagagtttcaggagggggttctctgatgttttcaaagacaaagcggtttctgcttttctagatataccaaagtatccatggaaatatattaataacctcctcttctattccgaattcgtggccacgccaaagaagaaaatcgaaattataaaagagggaatttctagggaaaatattccctgaagagggaataggcgatagcgcccaaatctggcgtgaaggtggacaatgaaagagaagatggttaatcgactcttccatctcaccgcaccgagggcaactcatatatgtacccatatgtctgtaagctagcatttgacaagtagctagacacctagagatacattgccacgcgaaatgcttaaccttccatacttgtgcatgaagtgccgaaacacctggtccctgaaaagagggatcacaagtaggatgagataaatctctcgcggcccaatatccgaacttaacagtataattacccaattttgtataagaccaactaaacccgtcactcaagtaggtacgacttggccgaatttcctaaaatgagtggaatatcagcaggatcaatcaaggctcgaaggctatcaagcttccacatcggtgtattttgatcaatcaaatcatttacgtaaaggtggggatctcttgtttcaaggatactcttagctggcctcgcgggaattgtagggatccaaggatcttctcagacccgagtcagcattccagatcctatggtcatgcgaagaccgaaaagaagaagaggtttcgccgtcataatgcttctccatccataaaagggccgattagaggcacctatatgtagtgggtcactgaaacgaaagtatcttcctcgtacgaccctactcagaagagaattcgggaatgtgatcagacattaaagttgtttggctagaagagctaaattaaattcttcaagcgtttaaaaaccaagcccccctccgaatgagggttacaaagggtatcccacgctatccaatgaatactattgctattttcattggatttccaccagaagtttgcaatggtactacttaacttggagcggattgctttagggaggaggaaacacgacataacatatgtcggaagggcctgagccataaacttaataagtacttctttgccacccttggacaagaatttggctgaccatgtattcaaacgtttttggagacgatccctaacaaaagagaacacttgggttttggagccatgaattttctctggtaatcccaaatatgagcccataccaccatctttatggatgccaatagctgattttatgctattacggatggagttttccacatcatgtccaaacatgatagaagatttagcaatgtttagttgttgtcccgagacctcaccataagtacgtagaatctttacaatttcttgtccttgtaaaggatctgctttacaaaaaaagagactgtcatcatcaaacaaaagatgagaggttgaggtgctagcacaggaaatttgcaggccttgaattcgaccatgccattctgcatcttttaaatttgctaccaaagcatctgtacacagtataaaaaggaaaggagagattggatctccttgacgaattccccttgatggtttaatataacctctcggggatccatttaacaagattttatatgagaccgaggagatacaaaaagttattaggtcaacccatttttgagcgaaacccattttcaacataagagcttgtaagaaggaccattcaacccggtcataagctttactcatatccgtcttaatagctatatactttttcctgcaagccggatttgtccagagcgcatgaaaattctcttgtgctattagaatattatctgtaataagtcgacctgccacaaaggcagattgtgtctcagatatcaaacctggaagtaacttctttagccggaagctaagaacttttgaaatgaccttgtaacttacattacagaggctaatggggcaaaactccgccattttcctaggtcggtctacctttgggatcaaacaaatatttgtctcattcaaatgctcatcaaatgagcctgtagaatggaaattttgaactaatttaaccaggtctggaccggttaaatcccagaaccgctggttaaaaaaacttgttatttcatctgggcctggtactttatccgggtttaagagaaacggacacgtttaacttctttcggagaaatctctttgataagtttctggttcatcgccttataaaagtagaatggaaatttattatggtgcacggttgtgtggtgtttccctaacagaatgagattaaagaactgaactaaaatctgtctactaatacttgtgtgtgcatatgaataaaaatattatcaattggtagcaaaaaaaatgaaacagtaaaataaacgagacattaagattatacgtggaaaactcttcaatgtgaggagtaaaaatcatatgaccgtaatctacaaattttaccatcaaaaatgtaattgagttacaaccacatcttggttgtttccacataagagactaagcttacaaagcaatccctaataacaagaaaacaccaaaaaagaaataaaagccttacaaaaaaagaaaagccttaaaagtcctaaaaaccttatattaataaagattttgatcactaagtcagatctccaggataaataagactggaaaatctctgtaaaatttcagcataagccaagaaaaaaactcactggtgaatattctaacactcatgatccaggctgtttcgtttctcacatttcccacactaaattcacctttttcttaaagaaaattaaagtaagctcaaagactgaaataattacaatatataactaatcattaaggaatcaaaactccattaaatatgctctataaatactgaccaatcaatagccttctaaatgtctaaaacccaaatcaaacccttaaagtcttaaacccaaatcaaacccttaaacccacctaaaaccttcaaaccttaaaatgttttctgatacacttttggctatgtcaatatctctctttcttggtttaagcatattgcttgttgtacacggtaaagatttcgaccaagacattgacataacctggggtgatggtagaggaaatattttgagcaatggtactcttctaaatttcgatcttgatcaatctttgggtttagggtttcaatcgagagctgagtatttgtatggaaaagttgatatgtagatcaaacttgtcccgggaaattcagtcgggaccgtgaccaccatctatgtaagctcttcttaattagctagacatacatataaatctgttaccgtatgttatattgtatgatacattttgagggcttttggtgtgtagttgaagtctcaaggattaacatgggacgagatagatttcgagtttttggggaatgttagtggagatccatacattgttcacactaatgtttacactcaaggcaagggtgatagagagcagcaattctacctttggttcgatccaacagccgcgttctcacaactaatccgagtcacatagtgtaagcatatattccacaatccaaatgtttagacatcgtactgaaagtgaaccggtttggttttggattaatttgccaaatcaaaaatcctaaatcactagattcgtgacgtttatacgtaccgaaaattatatagtaagataaaaaaaatatgtaatgaaatatacttcttttgctatctttatatattttctaaactcaattttaattatactatgaatgatatagttatataaatatataagaggggtgacaaaagctaatcacaacattataatatcttaattagaattaatagatgccccaaacaaatcggaaaatttcagtcatgaccatccatactaaatcccatatttgtctcaaaccaaccgttcaaacataatctttcccgtttaaatctaaagaacactaagtcaagaagataccttccaaaaaacagtcatgagctcgaactttcaaaacagcaaaccctaaccaatatatttttctttctcttgcttccaaaatcaccttttctttttatttcttttaatacaaaaattaggtcaaatgttgtttatatactctcacctaagccatagtccaataataacattatgaattaaattagccccaagttttcgttctcttatccaaacctaattggtttcttccacttcgtggaaaatggacaaactctctttcttaagcggagtaaatagtcatcccggctatcctttgaaaaccaaaaagctttcctcctctcggtaatgacattgttatcatatgagttgcattatcatatatatatttcaatttaactttctcaaccacattatgtattcaatgatacctattatcaatctgttttgaatgggaataaaatgtgagttcttcgcgaaatgaattgtgatatgattatcacaaagtaaaaagtacttatcttacttgactaagcttctcaagataattcttcatccacaaaaactccttaaaagcttccattgcggctataacctcagctccagtggtagatctctaaacgttctcctcccacttgactcaataaccaacatatatgaatatgatgaactagcagtaaccgtcttcatgtttcctcattcaagacattatgcttcactacatccatcaacatctttagacattgagttataaagagacacctcccaggaatttgataatatatcaagaagcaacaaaatgttgtaatcgtagatgtataaactctaagccgtctccacatataacctcaggttttcaggattagccatgtacacttatagttaaaatatcattaattaatgataagtgttaaaaatatggaaataaaatcaaagaaaagaaatatttcatttatttttttattttaaattaatatatggtatttaattagttgatattaaatgatattatagattttgatccacttaatacttattttattatttttgactttgtagtgttctaactcttagatcatattacaatatctctaatattgttactttctcaacaacttaaatattaatgaaatatttactcagatgttatagaaaagttggaatattgttagaatatcattcattttctaaaaattactcatatgttttgtgctattgtgtcattacaattaacactcttgataattttcttaattatgattcttttaattaaaaatagttaacaataattatgataatccatgtcattaagagaaaaaaaacaagtcacgtcattaacgacattaggaggaacgtttcgatttctctccctgttattgttttgcggcaaatttacctgtcacgattgagttataatgcttcacggctgagttataatgcttgacggaagatgaaaggtcgcataaatctacatattacggttgagttattatgaatagacatatttttcgtagccttgttcgagaacatgtagctcatctttaactaatggctcacttcattcaatccgtagtcatcgagcaccaacttcacaagcttgtcatgtgttgttttcgcatctatttgcataactctacaccctctattgtagatgttaaatacaaattctttacccaattatcagaaacaacaattaccggaaccggatcaaccataccgggagaaggatgaaagaaaatgaagaagaatgaggaagacgataacgaaatggaagttccggtgatgtgaaaaattcaggtgagaagacgagttgaaaaaaagatgtttcatatttcatttgatgatgatgacgtggaatgttgcattcaacgttattttttaattgatgaaatggcaagtaagccaccaaaataacatgaaaatttgcctaaataaataaaccatcaaacaaagatataagtcagtcgcaacatgaatactattacagtaattagaaaacgaaaaacagcaagttaattcagccgtttaatgtcgtaactcaactgacaatctttaactcagccatatcgtttaataatttggccgtaattgcatgctattatagtaattaatcttttgctattaagtcagccgtaactaggccgagttatccgttaatccagctcataatggctgattttatgacactcaaacataaatcagccataacgacatctcagaactaagctgcctttgataattcagctagccggaaaaagttaactaagccatgtcgagagaataactcagccaaaattttgacaaatcaaccatcggataaaaactcagtcgtaatttaggttgggttatgctcaaaattctcaactcagaaaaatcttagtaggtcagccgtaacgtaggctgggtcatcttataactcagacaaatttcattaagtcaccgtaactccaggctgagttctattataacggatgtgagtaaggataaaataacatcattgtaaatattaaataacacgacacaaatttaatatggatcattattactatttattggttatctccacgggaaaaagacatattttacactgagaatacacatttaaaaatacatgaaaagtgggttaaaaagattatttataaggaaggaattctaattaatctagactaattggatccaataacataggccaaatccaattcaagtcatacccaacaattgtactaacatcaatcctaatctatatgattgcggattttgtatatcaacatttgtatttttaaaattaaataaatataaatttagtattacataaaaaggtaaaagaaaataagatactcattcaccagtgatgactttctttccagtataatcatttccgagtattttcttgatgatgttgtttttctattgaaattttacatatactttctctttcgtttggaatgatcctctgttttgtgaatttaatcaaattttcaaccaaatgttagcagtcataaaagagtgattgcgttacggattgaagttttattggaagataatgacgtttagtttgtttttcttctttttcgagttaagtaatggatggccaaattatacaaacgaggatttggagatagagaggaatcaaaagttagctctcgcgggttttgaaatttactgaaatattgtaatttctcaaccgtcatccttagttagtcctatgttttctctaggtctgtgtaccactcttttccgacggccaaaacgctacttccagagattttaaagacttgtttgccgcccttaaaaataatcatgtgatttatttccatgttttgttctcattcacacgctatcgacaatcacttccaatagatcaccaatcatgaaatcgtttcaactcaagtacgtttaagtgtagattctcttatgatttttgaccgaaaagatgataacagtaaatggctaaatcaattattttaagctctcctcatgcaacattttatttcctaaaacaagatgttttttttttaacgactgcttccattaatgaaattgaaagtgattacaatgcagagcatttgttaaaaatgagggaatataaaaatgatattgaaataaactgttgttaggaagtcttgttgttgcaagaatatccgctggttgattagttgatctcgaggtccaagtgaaagtaacttccgagaatcgattttgccaagcctttccttcacgaatccaattaaaactcccaaagctgatagttttgttgttcataagctcttccacacgtttacagtctccttcaaaaatgactcgacgatacccttgactccacgtatgttgcatagccattatcaaagcctgaaattcactttccaaagcactattggttgaaacccccactgcttgtcctgcacctctgtaggttccttcatcatctctaagtacccaacccgcctttgatgcttgcgtgagaggattataagacccatcataattgcattttacccatccggttggtggtctcacccactcagcttgtgtttgattccttgtattatgtgtttcctgccccccgtattgttgaaagctcttgatataatcttgcgcactattccaaccttcgacgtcatgcttagctctctccaaagtattcagccaagccaagtgcttttgttcaaagacaagcaggctcctgctcttccatagtcgctagagaatccagagagctaagtgaaagagttgcagattgtttttgcctagattacccaatagaatagcctccaattttgattccatcgacccactagcggtgattaccgcatgattaggaatccctgatgctctccaaacctgttgagcataataacaatcaaaaaacagatgtgtagttgattcttcctcctggcagcactggtggcagattgactgatcattaatatgtcgtcgtcgcagattggcacccgtagccaaagccccagaacagaatttccatatgtagtgtttaatcttaggagcagtgtctagtttccagatttttgctttgatcgcattgtctcttggtggcggctgaatggtgtgatctaggtacaattgatttgctaaccaatatgcagatttaactgaatatagtccatctttggtataatgccagcccaacatatcttgagttgcggtagagcatagcttaattgacataatcaggttggcatcttcctcaatcaccatctctctgatggtggcttcattccaactattcccaggtgtttgaatccaatccgataacagaataatttccggagggttgtttcttgctcgtggagggcacggtagattaacaggcagccacgggtccacccaagcatttacagtagagccattaccaacaacaatccgtagtcctcttttgattaggtcgcgcccctgaagcaaagatttccaaataaaggaggcgtgccttttttgcgtagcattgaggatatttgtatcattgaaatatcgtctttttaacatccttgccatgaggcagtctggtttctgcattattcgccaaacctgcttacctcataaagcaagattaaaattctcaatgtctctgaagcccatacctctctccttctttgacagtcccattcttttccaagcaaaccaatgcattccctttttatcttcaccattactccaccagaattttgctagtatcccatttatctcttcgcaaacttctcttggcaacttgaaaatgttcattgagtatacggtaaggctagagctacaaattttagaaggacctctttacctccagaagaaagaaatttcttactccagccttgcgttttctccctaaccttatcgacaatgtacttaaacatttctgcttttttccttgtgacctcctgaggtagccccaaatacttgcccccacctccttcattgtgaattcccagaatgtgtctcatgcgagttttaacttgagctttgaccctgcttccaaaagaaatcgccgatttcctcaagttaactgcatgtcccaaaatttgttcatatcagttaaggatctctttgattgctttgcaggacttgtcatttgctaacgtgaaaaatagggagtcagcggaaaataaaagatgagtgatcgctggaccttgatcgcagattttcagcccttgaagtaatctcttagcctccgcttgtttcatcatatgagagagaacttctgcgcataagataaagagatatggtgacatgggatcgccttggcgtatacctcttcctggaatgatcatccctcttggagatccattgataagaacagaaaaactcactgtagtaacacacttcatgatccactgtacccatttgctatcaaaacccatatgcaacattgttgtttccagaaatttccattctaaacgatcataggctttggcaatatttgttttcaaagccatgtaagatttagactgtcgttttctgacctttagagcgtggaaaatctcatgggctatgatgttgttgtcagtgatcatcctcccagggatgaaagccgcttggtagtcagagattatgcttgataagtgcttcttaagactgttaaccaagatctttgaaataatcttataactgacgttgcaaagcgcaataggtctgaactccaccatactcacaggagcttctgtttttggaatgagacagagatttgtatggttatgtatcttatccagattcccttcttcaaaaaatagttccacttccttcaaaactgcagggctaatctcactccagaaatgatgatagaaagctgctgaaaaaccgtcgggacccggagctctatgaagaccaatgctataaacaacttccttaatttcttcttgagtcaccctttgtgtaagttgcatattcatttcatgtgtgactcgttttggaaaatcctgaaaaacatctgcttgaagtgcatctgaacggtttgaggattgaaacagatcatgaaagtagttgactgcgacatccgcaatagctgcatcacctctgtgaacaaaaccatcgctgtcttcagtagagaggattctgttccgtgctttccttgctttcatcactgaatggaagcatttcgtattcctgtctccttcatgagcccaagagtttctgcttttgagtttccagaaaatctcttcatcaatgtaaggttgattgagttctctcttcaaattatttctttctactgtagttgacaaacttgaagtagccgccttatccagtttatatcggagtgtcctgattctttctttagcgttggttttgtgaccccttttctagcgtgatatttgtctccagcatctagtaattctgtctgtaaaggggatgtccgtctcactctgtctaataccaccatgccaacctcttaagactgagtctttaaacccatccttatgcagaaaacgggtatcataacgaaaacagcctctttggtcttccactgtatcagagacgtaagagaccaatggacgatggtctgattcacccagctcaaggaactcagtttctgaagcgggataattgttgtgccattctgtatttgccatagtgcggtccaagcagcaggtgactaggtgatctcctcgttgcccaacccaagagaatctatctcctatctgttttaggcctgtaaagtcacaattcctaaccatccttctaaaatcctggaaactagcctctggtcttacccttcctccccttttctcgttattgcctaggagttcattgaagtcccccatgattagccaagggctgttccttctattaattccaatcctctctattctctcccaaagatcatttctatagcttagattgggatgcccatacacaaaggaaatgtagaaagatgattcattacttcgaacaaggcaatctacaagattaggggattgaaataaaactgaaagatctacagactgcttccaaaggagtactaagccaccattaagacctacaggtggaacagttacataaaagggaaatcctagttcacaagctttatcccgaatgtcgtcatcctgctgcttggttgctgaaaggcatatgatgtccgggagatatcgtcgagatatctccttaaagcgtcgaactatgtggtcaatgcctaaacctcgacagttccagcaggttgtcctcatgttggaagtggtggttcagggcccagcgcgcctctcactgtggttgcatcaacttcaatgctatcatcgttgttctcccgtacaatattcgccagctggcttgtgcctacaccaaggtccaaatcgttacgcttacgggttgacggtagggaggtctccatggtttgcatatgggatccgtcttgattcatcgcagacatggattcagtcgcctcaatttttatctccatagagttgtcttcgtcgtcacgcttacgtttgacacgatctgtggtagtgtcaggagccaagttgatcacacactcagagtccatgatagccagagggtaggcacaaggtggtagagaattataatgaggggttcctgagatatcaaggcagtcattagcagaagatggaaaagggttaaagagctcaccaccagcattcccttcctcctgaaacattgtagagtttgcagattgtaagagagcatcatggttaggatcaatatctgcaagatcagcttcagcatcctcaaccggaccattgttgtcatcttggtttacagcatcctggttttggacattaacagcaacatgttccaaaccctccaaatcttcatcatcattaatctctctaataaccactccttgattacgcccttgcggagcctggtcatcctcatcgtcatcatcatcttgttcttctcccccattcacgataacacaggcccctgagtcatgggtcagcatcccacaaacctcagaaaagcctcgaagcctttcatatctgaaccggaaaagtgtgttaacacccgcagtgaattggaacttcctctgaaaccttacggaaatagtgatgtcccaatgtacgagaacacgaacaaaatccacccgcgccacagcctctacatcaaaatcaattttcagcacttgtcccagggcccgtccgatgtgctcgacgacgccacagttgagaaattggaatggaatgcctctgatttgggtccagaaaggaatgaaattgaggagcggcaacaagggctcccatcgttgaagaatcagcatttgatcattgaaagcccacagacctcgacacaaaactgattccaaggattcttcatttgggaaaatgaattgaaaatcccgaccctccactatgcggctgtgaacaagtccggttttaccccagattcgcggcatagaagcgatgattgaacggaggttttgtcgccttggaatcacaggacgcccgaaaaaggatgaaacggttttctgcgacagcttggttcacaatgtcttcaggtaaagcaatgggttcgtcattcacacccaaattgaggtcttggacagcccgacgcaaattgtcaccaatttttgagagattttgatagaagcgaagaggatagaaatttgcagagatgatattgaaaattgtagagatttgtcgaattgcagatctgccaataaataggcacataaacgcaaccgttgatgaagcatcacgccagatcgtggatccgaacgtggatgaaaaccagagaagtggtggaaaagaaaccacccactacgccggcgaaagtgatggaaaccgtcgtccaaccgacgagaagaagatgataaagtaaccgtcccaaaatcgcattttgtgtcgccatttaataaattattttatctataaaacaagatgttacaaatgtatttttgttgttggtaatagttgggacagtaattaataagtatgaaatacaccgtgaaataaatatatatacttttttgttataaacttatgacattggtgtattatttattttttatgttttattggtagaaacttatgtttgaatttgattacactcctggtagattttttataactaaatcgtatttaagattgtataattgtgttttgattgttaattttaagattttatctgtgatatattgtcatgtattaacctcgatccaaacccgtcttaccatataatcccgtcccttaaaaataaacatcatattcttatttttctttttaataatacttttattttaaaaatatataattcaatatacactgcaggattaataatttcttctttttaaaaaaccgattaattgttgtatataatactttttgttgttatttattataaaattatgattgattgtgtatggcttcttattggttagttttcaatatttttgtccattattattttatcttttatatggttttccatattatttggttttgtaaaaacatttttgctttgtttttgcatcattttattataacccgacccacaataaatgagcaaatgtttcttaatcgattaaattttttttaatgatttaattttgttatattttagattatacataaaaaatatatttcattgattgagtaatatatatctgtttaaaaacttttgaatcacaatatatccagaaacaatctaaaattttattaacaataaatattttattataattcaaaataatataaatataagatcaaataaaagtgaaatgagaatcatatatttatgtttgtagagaagttttaggaaattagctcaaatgttttatattagcattaaacatcatatttgattttcttatccaaaaataaaaagttaagatatagtaaataaaaaaaaacatatccatacaaatgagcaaatatgtactttaaaattgttaagtagatgttgacggacatgttgaggaatatatttttgatatgatgattcatttaaaaaaaagaaatatttttaaatttttatggaatttaaagtttatatttgtatttatttaaaataaaaaataagaaaatataataaaatcattattgttaattttacagttaaatgagtttatatattttttatttggtggaagattctgattggttagagaaaaaggaggtgaataaaagaattc

SEQ ID NO: 210 - DNA, 96095 bp, Arabidopsis thaliana
aagcttcaacggacaaacccaaaaatcaagtttgaagattaaagcgttttacccaaaataactaaaacatagagacacaagctgaaagaagcttgataggggaccatgagaagtgctgaaaccaacaatcacaagcatgcatatgagggaaatcgcaaacaacacaaaaacctcgactggtaaggagatagtcacagtacaacgagaagtacaatgtgacgttgagacaaaattcaaactatcaaacgtgcttctagattgaaaacaacctaaatttgcgttagatgtaggcatagggactctagagaagtattcggtgagcaaacttcgctgaagattgacgggatccaaaccaacacatgtcgttctatatcggaagcaaaatgggtttgccggagaagtatccggtataagcagatggaacccggagaagtatccgatgaaccattgaatgccaaaacaggcggaagacaacatgtaactaagggagagacaaaggtttcccgaaatagttgtggacgcaaatgatgagcgttgcacaacattagggcataccaaaagaaagctgcccaaaaaccttaacgggcctctacaccacccaaaagataccaagatgggcaaagcccaaactaaagtcttcttccaaagttgtaaaatgaggatctgacctaatccaaacgaggtcgagaacatgcgacggcggcgggtgacagaggcgacaaaatcatcgaccacggagatcaataaatggcagagatcatcggaaagataggtcgacgaaacaacaacaaccggtaaagatgaaacgcatggctagggaaaaaacggaaaaatgagccggtaacgaagtagttgctggttcttccagaaggaggcggagcacgtcggcctggtgagccaatgaacttcagagaaaagattctaacagatctgcaatcgagaagacgcaactgcgagattgaagatggaaggagacggagatgatggactcaaggcttgaaaagattgagacgagacttgttttaattctttgggagaagagcggagcaacaaagagaagacatcgtccgatgccggcgagcaacagctacaccagcgccggaagatagtgaattatataaaaactgtatgagaaatgatgcaaattttaatgaaagaagacttgttttaattctcctttgtattagtttttttttgtcatgtcattttttattcataaactatacagtcaacaaaaatgtaaaacgtcaaattatatagtctaagttatttagtaacatatatattattcagattctcccaatgttttagaaatacaagttttacaatttgtggtacaaagttataatgcttcttcaactttcttatatttttcaaaatttattttaccgtttcatacaaactttagaactattcaagttagtataaatcaaacacggattgtaaaaaaaaatgtgaattgtaaatatataaaaacaatggtcaattatgtgctaatgtagagtatttctttatattaattaaaaatatatccaaaatttaaataaataaagatataaaaaatatttaaacatttacgggcgtaaccaggtttcctttagtaaatttaggagtaaaaagatgtattttggctagttattatttatgggaataacgtgttatttaaaggattgacaatcattttttgtgagaggtatcgtataacactgttacactagatgcatctcaaacaatggtcccgtgctttttttttcaataacaaaatttcaaaacttatctcagaaatcataattcgaaattatagaatccacatatctcagtttagtcggtttattatttacaaaacaatttttaaccacctaaaaatgatattaaaacaaattgtgatttttaattgtatattactatttgattgacttgtcaagcctcaccaaaacatttaattttacaatcatgccattaaaattaaattatttttttctccctctccatctccacacgctacatctttctttcttacatgcacatctcttttttctgtatttttattttcttttttgatcaacttaaatctaataattcaaatatttgtcaatataaatttttttctaaacaattttagatccataacattaatattttttctctataatatgacatgtattatgtataattgatttcaaatattttatatatacatagttatacatacaacttattcagtgtactgatgtatgaaagtgtatttatttttatttgtatagcatattaattttacaagtgtataagaatatacatttatatatatttgtacacaattaaactgtacacatacaaaaatttatatgtctatacacttgtacaattaatatgatgtacgaataaaattggatatatttttatgtaaatgtaaatttaataaactatgcatataaatatgtatatataaaatatttgaaactaaatatacataatgcatgtcaaattagagagaaacaaatatagatttttgtggatctgaaattgtttagaaaacaaatttttaaaatgggtattttaattctggagatataataaattagaagtgtgtaaaaaaaaaatggttattgtcgacaatattcaatttctgctttggaaactatatttcatatagagtcttccaatatactatacacggatacaccctcctcaaacagtcgaaagcccttttaagtaattttacaattccactacaaaaccaatctcacaaaaattgtattacacaaacattcaaaagtccctattttgctaattataaatagtaaactaactacttttataattatgtttcaaaaaaattaaaatttttccaactcacttagtttttaacaattattaagtgaagaatccttaatccacataagatggttattgtatattgtcaatatgtaaccacactaaatttactcaaatttgttgccactcgtaactacggttggggtcagatttcacccaaaagaccgagccaaacagataaagaccataaacgtctcgggagctaagcttaccacttcaagggcagagacctattcacgagacgttatctactcgggtatctattacccagctcggatcattcaaggaaacacaccccgagcaggggaaggaaacacctcgggaccccggaatagaaccaccatgcggctcggttgttgttccagtaaacatacccgagccaagctttgacgcctcgtggatcgtttaggcccggctcgggagatattaggtcttgtagaatgtgtgccgagccgaagcctagcatctcatagttagaatgtgagcttatggccagctccttcccacttgtccgagactccaccttcttttctcggaccaagtcctagccaacgatcctattgaggatcgcgggcgttacaagtctcccccccttgaattggattcgtccccaaatccgcatcaagttgatctttacccatctccttgaaccactccggaaaattggccttcattttcttctcggtttcccaagtgtattcttcacggcctccacaattccacaagacttttaacaaatccattgattttccccgagtccctttcttcattcgatccatgatccgtaccggccatgcttccaccgtcatgttctcctttaacccgggaggtacatcttccacgctttcttcttgatcacttaaacacttccgtagttgtgatacatggaagacgttgtgaaacgcgtttagttttggaggaaggtcaagtttgtatgccaccgcccctactcgttcgatcaccttgtacgggccaacataccttgggcttaactttttccttgaggtgaatcgccctgcccctttgtaggtcatcgcctttaagtacaccaagtctcctacttggaattccaaaccctttcgacgcttgttggcgtagcttttctgacgatgttgggcttcctttaacttgatttttaagaacttcattctcttcgtgatttcatccacgatcgtaggtccgaacaaccgacgttcgcccactggcgtccaacacaactgtgttctacaagctcggccatacaacgcctcatagggagacataccaatactagcttgaaaattgttattgtatgcaaactctactaaccttagatatttctcccagtttcctccccaatccaagacgcatgccctcaacatgtccttgagggtttgaatcgttcgttcggactgtccatacgtctgtgggtgataggcagtacttaggttcactcgagtccctaaggccttttgaaaagccttccaaaaatttgacgtgaaccttgtgtctcagtccgacactatactaaccggaatcccatgtaatcgcacaatctcgtctatgtacttctcggcaatgatttcggctccatccttatccgagattgccatgaaatgcgcggacttagtcagttggtccactacaacccataccgtgttgtgtttggacttgatccccgtcgacagtcccgtgacaaagtccatcgttttatggtcccacttccattcctgtatcggtaggttttgtaacaacccacttggtacttgatgctccgccttgactagttgacaagtcgggcacttggccacctctttcttcattcctacccaatggtagtaccttttgaggtcgcggtacatcttgttcgacccccgatggattgagaatttcgattgatgcgcctctttcaggattttctcctttaatgccctatcattcggcacacatactcgatcgttcaccagattgtaccattgttagaggtttggtactcggtcttattgtttagtgcccatccttttatctcctcgtccctttcctaagccagccggatcctactaagcagatcggcctgatcggcggctcccaaccctaagggttcaacttccttagacaaggcattcaaatgcaatatccccatcatgttaaccaagttcatttggttcctttccgcttccacttccgagcgcctcctactaagggcatcggcgacttggttggccttgtccggatggtatgctatgtccaactcgtaatccgccacaagtttcatccaccttctttgccttagattcaactccggctgggtgaatatgtactttacgcttttgtggtcagtatagatttgaaccttagcaccatacaaatatgatcgccaaatcttcaacgcaaatactaacgcggccatttccaaatcatgcgtagggtagttcttctcgtatttccgcaattgcctcgatgcgtatgcgataacactccccttttgcatcaatacgcatcctagtcccattatggacgcgtccgtgtacaccgtatatggctcaccttcctctggtaagaccaacactggtgcattagtcaacatggcctttaactccaagaaacttttctcgcactcctccgaccagttgactgcggtgtcttttccggtcagtccagtcatgggttgggccatgctcgcgaaactcattacgaaccttcggtaataccccgctagtccatgaaaactcctaatctcggtggcattccttggtcgtggccactcctggatcgaccgaattttctccggatcaactgatactccttggtctgagataatatggccaagaaaaccaacgctcctttgccaaaacaagcatttacataactttgcaaatagctcatgttctcttagccgttccagcaccgcccttagatgtttttggtgagcttcccaagattttgagtaaacaaggatatcatcaatgaagatgataacaaactcgtctaggaaatcccggaacacactgttcatcattttcatgaaggctgctggcgcattggtcaatccgaatggcatgaccacaaactcataatggtcgtacctcgtccggaaagttgttttccttacattctttggctcaatgggaatttggtgatatcccgaggccaagtcgatttttgaaaaccactgtgcgcctccaagttgatccatcaactcatctatccggggtaaatgatatttgttttcaccgtaactttattcaatccccaatagtcgatgtatagcctaaagctaccatctttctttttcacaaacaaaaccgacgcaccccatggtgagctactcagcctgatgaatcctttctccaacaactccgccaactgtttctttagctccgccatttccgccggtgccatccggtacggagctttagatatgggggttgtcccgggttcaagttctatcgtgaacaggtctgaccggtccggtggtacaccactaacggcagcaaacacgtccgagaactcgttgacgatcggaatgtctttcaactccgcactcgcccccacttccttggttgtgatcgtggctaaatatgcctcacatcctttcctgagcatcctttaagcctggattgccgagattactaagcttcccgaggttgttcttattctttggaattttaacataccctcgtccctctcgaattgtatccgtcctcagtgacaatctatgtgagccttgtacttccccaaccagtccatccctaagataatatcgtgtttctttagtggaataatgattaggtccgcgggcatattgacaccattcactacaaccgagatgccccgaacaagtccggtcggatacattgcctgtctgccggccggtcgtattattccataatcggtgtttggttctttcctgaacccacctgattcaaccgattctatactaacaaaacaatgggtagccccataatcaaatagagtgtgcgtttctacgtcacctactctcaaggtccctacacattcccttagaatgttgagtacctccctttccccttatgcatgatgcaatgcaaatgcagttagagaaataatgaatagggagttgcgatcacgtatcagtaatcgccctgaagttctcggcatcgttagcttcctcggacagctcataaactcgcggtgccacggcctgccgcttagggggaggtggcaacccattacccccgcgattgtccctttgtccggcctgcttcttcgcagtaagcttatggcactcccgctttagatgtccaaccttcccgcaatagaaacaagtccttgtctcttcaccgagaaccttggactgtcctagttccattctcgggcagctttggatcgcatggtccttgcttccacaccggccacatacacctatggccttccagcaagttccgctgtggctcttaccacatgtcacacattccctggtcttagcatcggacttggtgttatccaccttgtcaaatttccttttcttatccgcgggtttggtgtgctgattgttccggatcagagctttctcccgattcaagtacctttcttactcgatcccttcctcaatcattgttgccctttcaaccgattcggaaaccaagttgaatgtccggaccaaacaatggttgcggatctctattcttagtccgcggataaatcggcgcaccaaggcttgttcctcctcaagtttgcgtcccacataacgcctaaggcggttaaactcctcatcatattcacgtaccgtgcggttcccttgaactaggtcgaggtacgcacattcaagcctatcccaagcctccggtggaaagtacttcttgttaaactcgtcttcgaaatccgcaaaggaccggacctcgtcccctctgcattttttgacgcttaaccaccaattatgggcgtctccttcaaggaagtggactgcaatgtccctttggtaatcctcagggcagcgagtagacttgaatttcctcttgagtctactcctccactcatcggccacaatcgtattcgtattccccatgaaatgtctcgtgcctagccttgagacatgttcgagaaggctcagatagtctcccctttttcgctcatgattcacatccacaacttctgagtcatcatcctgttggttatccaccctttaaaccaccagatccgctacaacggccttggttaatgtggctagttgcgccatcattcctttcatcaaatcccactgttcttgggtcgttgaagtattgttccggttatccgtgttatcccttgcatcgctactttccggtgcttcctcatttatagacttcttcccggcctcatgtccggccgagtctgtctcatcaagcattgtcccgactctggttttcttgttgatcattgtttcctcctcaaccaaagtctccttaacaatgcccttgtccttcttgctctttcccgttttgctgctcttactcatctgcgaaaccttcaaagttaatccacataactcatagtaaaatcgcaaaagagtaaagaacaactaccgcgagattctcaagtcaacgagtggtgataccccttaacccaacacctagtcctagaaccaagcatgctctgataccaacttgaaaggccccgatctagactgcctaagtccggacgagatctcccgccccaagccactaagtgactcggccttaaccgtttatgaggttcattcctagtgtaatccgttttatatgattctatgattcaatatatgagacgaatagagtaaacaacttatgagtttgcatataagctattacaagtcatataatcgatccctagactatccgaactatcaccacccatcatcacgaccttgagtctctcgcgcctaagccaagtccttcccacgatcaccattcgttcctgaaagtcatagagccataagtaatctcatttacttagtcatatgcaagtccatgcaatgctctataggccatacattactcggatccgtagagaggattcggagaggggaagatcgcacatcagtccaaccgatttccagtaggtcaattaagacccgccgaatcaacacatccgttccttgcatctttccgaagagttgtatatcttcgcccgtaactgctcgcccttatccaccctttgggcaagtaaccgttcgaccataactgcccaagtaaccgtctggataaccgcccagctggtcgaacagtcgaccagctacctcgagctcaaccgtcactcttccaactgcctcgagcttaaccgtcactcgtctggctgcccgagctggactgtcactcggcccaagtaaccgtcactcattccagctgagcttgagcttcagacgaactgacccgcatgatttcccctttgtctgagcttatggccagctccttcccacttgtccgagtctccaccttcttttcttggaccaagtcctagccaacgatcctattgaggatcgtgggcgttacatagttgcccaaagcaaagacttgcacattttataaaaaggatccaaagacaatttccgaaaaacccggaaatgataatgaagaatcttcgaggatattgtcaaatctggatgttttcctgaagctcgcaaaaaataaggaaaatctccttcctgcgaagaccctcagtagccaacttaaagataagtagaaatcttctgagaatataggatgaggcggtcattaggcctatatatgacacataaaaaggctctcaacataggctataaaaacactccgaatttgaaggctaaaaacacttattctttacttttctataacacttgtacgatcaaatcatcgtttcttatcaataatatcaagaacaccatctgtggttacttaccgattctattgttctttgagattctcgcgaagactgtttctttgtaagaaccctaagaaacaatttccattgtgtagatttcgactctcacaatttgtcgctagaaggaggtgaaatttgagatttctcttactacaagaataaagaaccatcaaaccaagcagcaatgaccaacaatcaggtccccgctaacacaatggacatggagggaaacccgattcctccagtccagacaaacactcctaaggtcgccactcccgcagtcctagcagaaatgaaaagcatgatggcacaacttcagaagaaggtggactatcatgaacaagcgaatcggtctttggcccagcagctcaaggcggctaccttccaagggcagatcatgaccacccgctttgacgtgcgacattttcatgatcggcgagtagcggcagacctcaatccaacgaggctcgtgatcaatacgcctggtaacacgacgaggccagtccgatgaactgtgccagcgctcagtggaatccgagcaaaaccaacagctttgggagagccgaacgcgacaaaccaagtggaggaaaccgatccgcagttttacattccttgagccgaggctgccaagggctgaggaatatgataggaacaagaaataaatgccatcaaactctccctagccaaggaaaaaaccgagatgaagcttgttcgatcgcagctgcatagcgcagtctcctcgtctcaaaacatcgatcacattctggaagagtcccacaacacacctttcactcgtaagatctccaacgcaataattttagacccgaggaagctcaatatcgagtacttcaaggggcatttaaagtcatttataatctctatggcccgagccaagttcaagccaaaggagaggaacgcttgtctctttcatctatttgtcgagcacctgaaggggccggccttggattagttcttaaaacttgaagagaattctgttgacagtttccaagagctgccaacacttttcctcaaacaatactcagtgttgattgatccaggcacatcagacgctgacctttggtcgctatcttagcagccaaatgagccactcaaaggattcctcacaaagtttaggttgaccctagcctaggtcgagggaatcaacgacgtcgcagagctctctcccttgaagaagacattgtggtacaagttagaattccgaaaagagttaaatatgtcaaaaccacaaacgatccgagacgccatgcaccgagcctcagattacgtttcccatgatgaggagatggagttgctgtcaaaaaggcacgacccgtcaaagcaaacacctcaggctgataaatcccaatctagcactctgagccagaaaaagggtgctctagacagaaccttcgtgcatcacgaggggcgaaacttctcctaggcccaaaattaccaagctgatacaccccacgctcgaggacgtgaaatcagaagaatgcccgaatgtgctttatggcaacgcacaaactcagaaaccccatcaccgagtgaacacccgacgcaaacaacaaaaaggctaagttgggctgagctgaagaaaaagctatcgaagaggctcgggaatcggctgtaaggctaagacagtaatcccaaacgatgtgtcgaagtaggtggagatttaggcgaagagcttacagccgagctgacttccttcctcagagataacgtcataactttttcctggtcgccagaggatttgccttgagtaagcgttgaaatcgtgtcacacgagctcaacgttgacccaacttttaaatctgttaaccagaaaagaagaaaattgggtgggaacgtgcggaagctgtgaaagccgaggtggaaaaactgctaagaaatggctctataaccgaggcgaagtatcccgacaggctcgctaatccagtcgtggtaaaaaagaaaaatgggaagtggagagtctccgttgacttcaccgacctgaacaaagcctgtccgaaggacagctttctgttaccacgtatcgatcgcctcgtcgagtcaacctcagggaacaagttactatcgttcatggacgcctttgttggatacaaccaaatcatgatgaaccctgaggatcaggagaaaatgatattctacacgaagcaaggtgttttctgctactgagtgatgccgttcggacttaaaaacgttggggcaacttattagcgctttgtcaacaagatcttcgccttgcagatcggaaaacgatggaagtgtacatcgacgatattttggtaaagtctttggaggaagaggaacatataacctctacaacgtcaagcttaatccagccaagtatcgcttcagagtaagatccggtgagttcttggggtatcctgttccacatcgcggcatcgaggaaaacccaaaagcaaatcgaagcattgataggaatggcgtcaccgcaaaacaaaggctaagtacagcaataaaccggagagttgcagcccttaatcgattcttctcccgatctaccaataagtgttgggccttctacgatgtgcttcggggaaataaaaagtttgagtggacaactcagtgcgaggaagcctttcaagaactcaaaaagtatctagcgagcccacccatccttgcaaaacttgttatcagagagccactctacttgtatgtctccgtatccgatactacggttagcaaagttttagtccgagaagacaggggtgagcaaaaacccattttttatgtttcacagacatttactggagcggaatctcgctacccgcaaatggaaaaactcgccttagcggtcatcatgtcggctcgaatattgtgaccatatttccagtcccacaccatcatgctaatgggatttatgccactccacgtcatcctacacagtctaaaccagtcgggccatttggctaaatcggcgatcaaactcagtgagtatgatatcgagtgtagaaacaaaacgttggcgaagtcccaggtcctagccgatttcaatgtcgaactacccacgaaagaagctcgaaaaaattggcttgacacgacatggctcctacatgtggacggctcattctccaaacaaggtttgggtgtgggcatccccctcacttcacccacaggcgaggttctcgaataatctttcaagctaaatttcgaagcaacaaacaatgtagccgagtacgaagcactcgtggccgggctgaagctagctcaagggttaaaaatcgccaagatcagggctttttgtgattcttcactcgtcgccaatcagttcaacggggagtacacggctcgggacgaaagaatgggggcttatctcactcacagccaagatctggcgaaacagttcgacgagttcgaactatcaaggattccccgaggcaaaaacaaatcggctgatgccctggctgctctggcctcgacgtctgacccgtacctgaggagagtcatcccagtcaaattcatcgagaaacctagcatcgagcttgaaaaagaagagcacgccttctccgtgcagaataccacagattgcaaggatatttttgattcgaatgataactgatatttaggttgcgactcagaagttacatatccgaggggaaagtgccatccgacaaatgggaagctcggaagctgaaagctcaggccgtaggctttgttatggtcgaagagaagctattccaatggcgtctatccggacctttaatgacctgcgtggaaaaggaagcagcctacaaaatcatgaaagtaatccacaaaggctcatgtgggaatcactccggaggaagagccctagccatcaagataaaacgccacagatacttctggccaacgatgatcaagaattgcgaaaaattctaaagaaaatgcaaaaaatgccaaaggcacgcacccacaatccatcaaccggccgagctcctttcatcaatcgccttgccgtatctattcatgcgttggttgatggacatcatcggtactatgcacgcctcgaaatagcgaaagttagtcctcgttgtgacagattatttctctcaagtcaaaaacttcgtgtggaagcacattttatgtcaccatgggatcccttacgagatcgtcacaaacatcgactcgcaatttatttcgactcgtttccaaggtttctgcgataaattaggaatttggctcagcaagtcgataccgcgatatccccaggggaacgaccaagctgaggctgcgaacaaaacgtttctcgacggcttgaaaaaatagctcaacgccaagaagggttttggggccgaagaactcgaaggagtattgtggtcgcatcgaacaacgcctaatcgagccacgagagaaactccattcgcagtagtctagggtacggaattataattccagctgatatggaggtaccaaatcttcgtcgaagcctatctcccgaacccgagacagataataatcagagaatgcctaacgagttagatctgatcgacgaacgaagagattcggttctggtgcgaatacagaataatcaaaacgaaatggctcagttgtacaattcaattgtccgatagcggagatttcacgaaggagattgggttctctgcaaagtttttgaaaataccgtcgagctaaacgctggaaaactcaaggcacactgggaaggaccatacttaatctcgaaagtcgtctgaccaggcatttacgaactcgccgatttaagcggcaaagccattccaagatcctggaatgccatgcacctcaggaaatactataactaagtgcgagaagcataaacttgaactacgaggtggtttgatccctgagaagggtacttaggcagctcgtcttcgaacgagttcagctaccccccccctcacccccaaattaaaaaaaaggggagtgggtccgtatatccatactcccactttcatttctcttgtgagttttcacttcggcatgaataaaagttctacttttcacagtttgtacctgtttcaaatactacgatgagcgacggctcagagtatcttttaaacctacttggttacaacgcactatctaaattcgagttataacctgccggaaaaactttgcgcagaatctcgttctatcttcagaaaaccctgttatatcataacaccggtaccccagcttgtttttaaacgctggtgaaagagtgaatcggatcagatcgcaaccgagaagatttcaccaaagcaaaacgttaagtccattccattcacactggccctaaccaataaaacggttcgtaattagaaagcaattccgcgaaagagcgactcaattaggctacggtaacatcaaacgaataaaacgcatcgggatcatatgagaggccaaattttcaaaaggtgaaatttgtggataaagcaatccagacataagtctttacaaaaaccaaaaaggataaagccatcaaggcgctaatctttacgtacacaaaaataaaaggaaagctggttcgggtcactggtcaagtccttcatttcgcgaggcatcgccacggaagttcgaaccggcttggttggcaataccgatctcatccacctcgcattccaccgatctgttgcctccaggactctggggatccaaggtagaaggaacatgaggaatggccaactcttccttaacttctttaaggagactggtatatgtcgcctcggcgactgcataatccttctaccagctccttctcgtcctccaaatgcttcccaccctcaagcgcatcaatcagctaggcatttgctttagcctgagccaagtacatccagcggttgctggcttgatcaaccatagtcaacttcgcctcggcggccttcatcctctcaacaaacaaagctgcagaccgacaagcctgagcaacttcattatctcggagacctctctcctcagtcaacatgcgtttgtatctctcgactgttgacgatatcgtaacattggcctcggcaacacggacatcgttctccttatgagtgaaagcgttccgctcggctttctcgttctcttgcaacgccacagccgccttggagtcaacatcagcccgagcaagctctgctgcggctaatcaccgggacttagcgacggtgattagcgacggcgctgaggttagaccgcgctgaggaatcgtaagattgcaccatgctgttcatcgagctgatggcctgaagaaatataacaaagacataaggaccttgtagaaactcttgctcggagataaaaattttgaacatacccttaaaaagttcgatgcctcattggcatacaactcggactccagcaaagcgtcaagggggactgcaaaacccaggcgcaagccccaataagattagtcgaggcggtcttatcctcgaatataggctcggctaccttctgagcaatctcagcttccttcctctttttcttcttattctttgcttcggggtctgagcttcttatgcgcttccccgacgccttagtacggtcacgaaccggcaacccgaatattgtctcaagacggttcacggcagtagaaccgcttggggctgacaggaactcgtgccctttgacgggtttggcaaccaaaggcgtcgccctggaacacgatatccggagtggcagtcgcctcgggaacgctgcctacggcacccgcctcgagggcaacctgcgaggttccggcatcctcctcggcctttttcttttccctggcctctttcctcttcttctcatacacctcccgtaggctcagcttggtttcttgcaactcattaaaatgagaaaatcgatggtctgacgattctgagctggaggaacaggatacgccgcaacttaacttcatggctcgttcgactctttcccttgaaaagtgatctacccagttacacttcccagcaggtaactctccgtgaacaaaaacgatatcaccgggactcgcctcgaggaatcgaatagagcgagctgcaagaaacaaggaaataagttaagcgtcaaatctcaacgatcatctcgggtgtaaactaataattctaagtctaactaccaagagtgccccatctcgtcaaaatcgtcccgaccaggttttcgggaacactgacatcgttgagagccacaaagaaaaaatgatcagtatagggcccgtccttgctaaggaacccccagatgattatcttgtctttcgcaggggaaatgtagtatctgttcaccaccgacttgggtactcggcgaatctctaaataattctttcgatgcgtaagcgtgatctcattctccgtctcgtaattccgcaccaaaatcccgacgagatgcctcagggaacgtgttgtaatctaggaaagagtaatctggtatgaggtcacgtactacagaatcatcctcaagatcggaaaccagaggatgcagtaataaaagaacccttcataaagggtgaagaaaccctccagagggttgtcagctctcttgctcgaggttggaaggcgaaggacgacatctttgccaaaatcaaaccgagccgccaggtcccgaagtgattgctcggtgcaaaaggtcgaaccaggcggatcaggtacaacctttttcgtttttctttttttccttcccttgtcagatttccgcatcgcaatctgctcaatagcctagaaaattccgtcagtttcattcggcccaaagtaaagatgatcctcaactatcacctggagcaagggcttggttacgtcctgccaatttgatgttccagcctcatcagcatctggggcacgggtttttcaaacgagagacggctcacgatactttggaagatcgagttcacgagctatatcagcgacggcatcgtccccaaccacgaaagggttcggctcttcacgtgcgttagatgatgatgttgcaccgtcctgacgcactccaaaccatctcttgtttatggatcgggggaagatcgtctcaatgcatagagtcggtagaatctgagagactcattgtctgctcgggaatatttgacgagatgaaggccgaaaaacagaaaattctaatcggaaaaatcaaaataaacctaatagacgacggagcttcacctgaaaaagaaaagaatgtaaagaaatcaagatcaaatgagagaaagcaaaccttgaatttttttctttggaacttcaaatgaaattcttaaggaattttttgctacttatacagcttttagggcgcgtcgggtccagaggatattacgaaccgcgtcatgggtccgtgggctcatcaaaatacggggcacccgcgtgaacctcgggaataagcgaggaagtttccacttgtcaagggaaaagagcggctacatgcaacaaagtttgacagtcccgcgagatgaaacgtcagaagccgcgggacaggaagacgatcggtcggctcggtcatcgtactcatacatcttgtcgcctctcttaataaaaacaacgagctgggggggcaaactattggggttagatttcacccaaaagaccgagccaagcagataaagaccataaacgtctcgggagctaagtttaccacttcaagggtagagaactattcacgagacgttatctactcgggtatctattacccgacttggatgtcattacaggaaacacacctcgagccggggaaggaaacacctcgggaccccgggacagaaccaccatgcgcctcggttgttggtctagtaaacatacccgagccaagctttgacgcctcgtggatcgtttagatctggctcggaagacattaggttgcgtagaatgtgtggcgagccgaagcctagcatctcataggaggaggcggtcactaggcccgaagcaaagacttgcacatgttataaaaaggatccaaagaccatttccgaaaaacccaaaaatgataatgaagaatcttcgaggatattgtcaaatctggaagtttttctaaagctcccgaaatataaggaaaatctccttattgcgaagacctatataaggcgcctcaaggacttcgcaaaaagggtacacagaaaaaggctctcaacttcaggctatcaaaacgctatgactttgaaggctaaaaacacttattctttacttttctaaacacttgtacgatcaaatcatcgtttcttatcaataatatcaagaacaccatccgtggttacttaccgattctgttgttctttgagattctcgcgaagactgtttctttgtaagaaccctaagatacaatttccattgtgttgatttcgactctcacaactacaccgcgttgtagagagttacttagtgagcagcaaaaacaagtaagttttatcctaattttcaactacatcattatgtttcatatgcatctaattgtaattattattttttgttttcgattcgatttttgatcccggagtagccaaatagggcttcagaagtgtaaagagaaatttgtaaagcctgaaaccatatcttcatggtttacgtcaagaggaagaagcgattctttacggtgtcactcttgattccttcttattttttggtgatgcatcttctttattagtgaatacatcagacatgtgctaagtctctctaaatcgcttacgtaaatccttatattgcttgcgacatgaagagaataaaagacatggaagatgtttcatattccctcaaccaaacagatagtcaaacttgttttgctaggtagggttaaatgagaagactctgtctatttatttttaatttatgttgacacatggcaagttctcatgttttgacttgtcaagtatatgataagagatagcctattttcatatagatgatttgtaattggctattatcttgatgatgcacatcacattattttaactaataacaagttaaagttatatgattcgtgtttgttgtcccttcaacattcttcaatggttatacgggtatccaaagtacgaacgagatggatgtttattgttccaaccattttgattagtcccaatcccaacaaagaagaagaaagaaagggaatcatttttaagaaagtttttgtgttgttgatttctcggcgtagtgcttcttcccctatgcctcctatttgtatattgtattagtgtagtaagattgatctgtaataccggaaccataggtaaaaaccttttcttcaatactataattcacaattgaagcatctaaggctgcgttaatagaagatagaagattgaagattatatgatctgaatactctccaaatcgaataagagtaaaacctaaaatgcacattttcttccatgtctaatttgacatttttttttttcttgaatccctttaattactcgtcgatactttatagtctatgacatctaatgtaatttctaaaaacttacagatctttaatatttaaatttcccattgcaaccagatatggaaattcggtagttagaagtcacataattttttttagtgtcactttatatatgtaaatgtgactatagtttataattgactgaaaaaaatcagtgttgatattgttactttatatgtaaattaactatgaattaatcatatctaaagaatctattcgtactgaataggcaatgtagttatagtgttttgacatattgaataagacaaatagattaagaaaactaattcagatatgaatgtttgacaaagagaataaataattccatggttaatttacatataaagtaacaatatcaactctgattaagttaaagaaaccgattaagttaaattaaagaaagctgaaaagaacaagtaggattgacatgtatgggcgagtattggacatgtagttaaagaaaacgagacataattttatggaaaaataacataaattgatatagaaataagaaattaaaaggatatatcgtctgaaggaagcctcacacagttactatcatttttactctcaacatgaacataaattatataaactaatacattgtaaaggactataacttcaatcattgatcccatggaattgtcaaagttaccacagcttccttaaatctgtccataaaaaccaaggtttggctgagaccaagtgaacatgtttgggtccattccttgcatgtttgatctgtcaaactcgcgacggtactgtaatacttcacatgtttccattttgagcctttgtaattctacactccctttttcgttcgaaatagttattacttttagcctttcaatttctacgtgcaatttttcagtcaaagctgcaacaatagagaaatgaaaacaaacgtttgatagttacattcatcccaaaatgttttgtataaacgtttatacattgcaataataaattattttacatcctacacattaccattaaatctctgtatatcaaaaaacgttaacgaatctagaatgaacgcgcgtaatttgtttttaatttttttttatgcaatatattttacatctattttactaaattgaaattactgcacataaagaatatcttggtgttgtaagtactatcatgctaactgcaaaataagtggaatgtctagaataaataaagctgtttctaaatgagatattactttaagggtgatgtcataaacaaagttcatgcaattacgtaattaataacaactttaacccataaaactcaaacttttactatagattgcaaaactaaaagatttgctagagtattgatagaaattaagataacgtaccatcacgaagttgggcctgttgctccaatgattcaatttgaatcgtgatttccttcttctcattcatcaatattgttttatccttctgcatgtacattaaaacaatacaaattcatcaaacttcttatagataccgtttagacatgacaatctcatggttgctaattatatgatatgtttcacctccaaaagtttgatcttttcaaatattaaagcatttttgttctcaagaaattttattctatgttccaagtcaatcatgtactttaacttcctctgctttgaagatgcggctaactctcgatttttcaagattctgaaagagcatccacatagataaatgtcacaaagcatgataaaaaaacaaaaaaaggacaaataataatttagtcatacaagttcacttaccttctgactttcttaggatcagatacaatctcttgaagtttggtactctttgcaatatcttgaagtttggtactctttgcaatcttattcaattcatcatcagtataatcactgctaccaaactcgagccaggaagcatcctcttctccatcaactgaacttgaagaggaaaagttacccggagaaggaggcaacttcagtaagtaatgtaacaactatccaatgaaacagtcctgtaatgtctcctcaaaggtgccatgcctttggctgctcttctcttcacacccaaagggggcaatgaaggatttttattaaccttaatggaagagtctctactctccacaggagctgacggagaaaagctcatcgatggtaatgaattgcgacggaatgttgacgaagaagggctcaatgggggcaaggaggaggaggcaagtgaaggctgagtcatagaccgtgatccggaaggagtagtgatattgtcggatccattcattgttaaggattggagaagaccaacaatggagtataaatctgcatcatataaaacaagtcatgtttctacgtataactcatttttttacatgcaaaaaaacaaaatatcaaatagaaatgggaaaatgataaaaattaatatgatcaaagatattttgttttgcaccgtgacgatatcgagattgtcatcagttattggagaaaggagaacaaaaacacaattgaaacgtttaataagcaataaagagttgagaaaaacctctcagaaacttatgtttgtttggatggagaaaggagaatattatgtatgtttggatggatagtttgctcgaccctctttttatattggttaagaacaacacttcagtctcatgtttttatccccaattataaaaatttaatgattttccttcttaaatccataagtttgaatcttatttttgtgaaacaaataacatacaaattttgaagtcaacacatttgatggaactctgtgtctttaagtaatataatgaaaatatatttatatatatctaaggtaattacgtgttgctattgactcaatcttaatttaatttatattcttggcatgttaattatttttggctagtgagtgattttagagtgttgtttacttttgctagtgagtagttattttgacatgttgtttattttcctacttagctattttggtaaaacatttatttgtatttattgcaaagttattttggagtattgtttactttttctattgaggtagtttggcaagttttttagataaggttattccgtgttatttgtaagggttgacattttttttttgcgagagatgggaggtatcgtaaaacaccgtaccaccatatgcacccaaacaaaaccacctaaagatgatactaaaccaaattaaccgactacaaccaaacctccaaaaaaatgataacaaaatattttaaccacctagagatgatacaaaaaaaacatcaagtcaaggatccttaatccacataagatggttagtacctattgccaatatttaaccacactaaatctgctcaaatgttttgccactggtaactacactgagttgcaaagagttacttagtgagtgtttttgtttttttctccaaaaactgatccaaaacagacccagattagacatttatccaaactgtatagttataagatccaaacgggtaataaactttcccacccgaagaattctaaatccgaattaacccaaaccgaatctgaaccaaagtttgaatatataggcttagatagagagtatgtctttttgccctagtcaatccattttaacgtttcaaatggttgttaacgtttaattaatatataaaataattacatatgaagttgatatataaacgagtacaatttaaaagtgaaaatattaaataatatttttcctatcaaagactatatattattaaatttattcgaaatggttagtcacataagacggtcactccagaaggagcttacatgaaaaatgtaaccttgtgtctcaaggcttttgaaccatactctaatttgaaaattttatttgtatttcaggacatacctatctttttaacaatagtcaaaatcagtattatgttgttgtctaatatacattctaatttttctgtacttttttgttcgtttatcttcatattcaaaaactttcttgtatataggctctataaaccgaatcacacgtggatgctaaaatcctaatacctttcaaattttaagttccttaccgtattatttaaaaaataagaattatatgtttacactaaaccgtctttgaccaatgttaaaatattatcaatatgagcaatctagtaaaatagaatatgaaaaaaaaattcttataatttgtttagttttaatacacttggattaagctttaataaaatagtaaatttggataaagctttaatagttttgcatatttatgtactttaggggtttagtaaagctaagcctaaatgatgcaactgaaaaacttaaatttaaaacgcatatttaggtttcattagtctaaagagacatcttgacctccaaataatcaaattgaaacgatggtcttgatttccgcaccaataacaatggcccttcggattcacttggtccgttctcttattcggacatccattggaacgatgcccttcttcgctgcagaaatagcatgtgatatatgccgtcgttggttgggtaaccacatggcaagatcgtgcgaaatgtcccaattttccacacttgtaacatgcccttggatcataatcgtttctcctcctatcattgttatagctcgcccttgttctttctcgatcattgtctctctcttgatttagtgtgaatttaggagccatcctcaacggacgagccatcatcgacggagaaaaataaggcaattgagggagaatgagtagtaaaatcagtcccgaccttaatccagttttagaggcagagaagtctcacaagaatgaggaagaaaagtctgagaaggatgaggaagaaaagagtgaagaagaagagagcaaagaagaagagaaagaagaagaggagaaagaagaagaaaagaagaagggaatgacgacgaaggagagtcctccgatgatagtattagatccttgggcggaggagaaaatgtctcaggagtcctttttgccaaactctaaccccatctctcccttagaataacataaattaatttggatttaattttattctgaaaagtagggattttacaaatataccccaactgaaattcaactttacagagaaaaccaggatctattcgaaccctcacccgacccatctctcccaagcgggttttccaagtttcgagacttcaatttttgagcggactgttcaatttctctctttctcctttctcaaacttgccctccgttctcaacaacgaagaaccctaatctattcttcaccttcttctaagtgtaactgcaaccctaatctccttttcttattcttctccttcttctccttcttctccttcttctccttcttctccttcttctccttctctcaatctctcgatttcttgttttctcgtttcagataatgcctgtaaagaagaaaactgggttaaagaggaagagaggagtagcaacgaagctaattgataaaggaacaaaagcaacgacggaggagccatcctcgacggagcaaaataaggcgatagaggtaggaggagtgaagaaatagtcccaaccttaatttcggttttagaggcagtgaaagaagataagtatgacaagaatgaggaagaaaagtctgagaaggatgagcaagaaaagagtgaagaagaagagagcgaagaagaagagaaagaagaagggaatgacgacggagaagagtcctccaatgatagtagtagatccttgggcggaggagattatgtctcatgactacccttttcccaaactctaaccccatatctccttgaaaaaacagaatttagtttggatttaattttattacaaaaagtggggatttaccaatatactccaaccgaaattcaacttttacagagaaaacctggatctattcgaaccacacctaacccatctctccccatcagatattccaagtttcgtgacttcaattttcgaggaattgttcgattcctctctttctcctttctcaaactcgcgctcagttctcaacaacgaagaaccctaatctattcttctccttcttttaagcgtaactgcaaccctaatcgcctcttcttactcttctcctccttctccttctctaaatctctcgatttcttgttttcgtgtttccgataatgcctctaaaaagaaaactgggttaaagaggaagagaggagtagcaactaagccaattgatagatgaataaaagcaacaacggaggagccatcctcgacggaggagccatcatcatcagagcaaaataaggcaattgagggaggaggaactgaagaaccaatcctggccttaactccggttttagaggcagtggaagaagagaagtcttacaagaatgaggaagaaaagtctgagaaggatgaggaagaaaagagtgaagaagaagagagcgaagaagaagagaaagaagaagaagagaaagaagaagaaaaagaagaagggaatgattgttggggtcggatttccccaaaaagaccgagccgagcaagagagactagatacgccccgggatctcagcttactacttcaacggtaggaaaactattcacgagatgctacctactcgggtattcattatccggctcatgtgccactccaagaaacacacctcgagccaggaaaggaaatacctcgggattccggtatagaactatcgcgcggctcggttgttactccagtaaacacgcccaagccgagattgggcgtctcgtggatcgtccagggccagcgcggaagacattaggttgcatagaatgtacaccgagccgatgcctagcgtttcatagttgcccgaggcaaagacttgcaaattttaccaaaaggagcccaaagaccatttccgaagaatccggagatgataataaagaatcttcgaggatatggccaaatctagaagttttcctgaagatagaacgagatataagggaaatctccttattgcaaagatcctcggtcgccgacttaaagataaggggaaatctttcaaaaatattggaagaggcggtcgttaggcctatataaagcgcctcaaggatttcacaaaaaggggacggaaaaaaggctatcaacttgaggctatcaaaacgctctgactttgaaggctaaaacacttatctttcacttttctaaacacttgtacgatcaaaacatcatcttttcaataataatatcaagaataccgtccgcggtaattgaacaattctgttgttctttgagagtctcgcaaagatccattttttgaagaaaccctaatacaattttgattgtgcgagtttcgactctcacaatttggccctagtaggagggtaaaatagatttctcttactccaagaacacagaaccaaccgatcaagcaacaatgaccaacaaccagatcccgctaccatcgttgacgcagagggaaacccggttcctccagtctaggcaaacgcccctgaagtcgccgctcccgcagtcctagtagagctgaggagcatgatggtacaactccagaagaaggtgaacgattaggagcaagcaaaccagttcctggcccagcagatcgaggcggttacttctcaagggcaggtaaggaccactcgcttcggcgcacgacactttcatgatcggcgagcagcagcagatctcaatccaacgagactcatgttcaacacacccggtaactcaacgaggccattttggctgcgccagcactcggcataacctgaacagaaccaacagcctcgggagaacagaacatgacgaccagagtggaggaagcctacccacgggtcccaattccccgagccgaaattgacgagactgaccagatcgaaatctctgatggcgaagattcggaagaaaacattagatgcgctgaggaataagctatggagcaggaaataaatgccatcaagctctccctagccaaagcggaaaacgagatgtagctcgtacgatcacagatgcataacgcagtctcctcggccctaacaatcgattgcattctagaagaatcccacaacacgcctttcactcgcaagatctctagcgcgataatttcagatccggggaaactaagaatcgactacttcaacggatcatcctaccctaagggtcatttgaaatctttcataatttatgcggcccgagacaagttcaagccggaggagagagacgctggtctctgtcatctgttcgtagagcacttgaaaggaccagtcctagttttattcttaagacttgaaggaaattttgtcgatagtttcgaggagctttcgacgcttttcctcaagcaattctcagtgcttattgatccgggcacattggattccgacctttggtcgctatctcaacagccgaatgagccgctcatggacttcctcacaaagttccggtctaccctagctagtgtggagggaattattgacgtcgcggctctctctgctctgaaggaggcgctttggtacaagtctgagtttcgaaaggaattaaatctgtccaagccccaaacaatctgcgacgctctgcaccgagcctcggattatgtttcccatgaggaagaaatggagctgctgtcgaaaaggcacgagccgtcaaaacaagcatcccacggcaaaaaaattccaccctagcgctccgagccataaaaagcgcgcccaaggcgggacgttcgtacatcacgaggggcgaaacttctccagagcccacaattatcaagccgacatgccccgagatcgagggcgaggccacggccgaggtagtggacgagaatccttaactttgacgaaggaccaccctgcaggaaacgagcaggaatactgcaaattgcacaaaagctagggtcatcatacctctaggtgtcgtagtctcggggcgaaattggcggccaagttcttagctggtgaaatcggtggaggcttgaccatcaaagatttagaagcggagaaagccaaaaccgagcaggtaaatattgtggtgaaccccgagcagacagcccctacggcaaaccccgaaggacccaagagaggtagaggcaaccgcgaggcatatgacgatgaatcggaagctgctcggggaagaatcttcacaattctaggagattcggtcttttgtcatgacacaacgacatcaatcaaagcttatcactcaaatcgtaacttgacacgaccattcaacggaccagatgacaaagtcactttccatgagagcaacattaactgcttggatcagccgcacaacgaccccttggtcattacattgactatcggggctttcaacgtcgagcgagttttagttgatacaggaagtgatatatccctatttttactgtttttaactatgttttaggtataggttttagagtctaattgttatttctagagtcttttctaatccttttcaggtctatacatgtttgagatgcatttggagattatggagcattctggagattaacagacaacttaagctgcagaagcaacccggagacgaaaatgcacgtaggtgtcaaacgacaccacacctggtgtcgagcgacaccaatacctgacggcaatttcgagacgcaacttattgatgttttgaagatttccaaattcggcccaaaactttctcctctatttaattaaggcccaacacgtttttaatacatatatatatatatatagttttaggtcattgttttagatcctaaccttggagaggctattctctatctcttttgtactttgagagcacaaccctgtggagactccctttagagaagatctttcttactctttctcttgttatattgattattgatttcttattcagactatgatttgtgtttctttgatcatgtcttaatagttttcttgttaggtttagggtttctcattagggatttagatgatttagtagattgcccccttgctaggttatctgtaggatttttcatcttgattgttcttaatgctagttctagagtagctaactagaacttgatattagataataggtattcccaccataggtacttgctatttgatccatcatagatgagcctaggcatttaagaaagaactggtaggctcatagaagggctctggtttagatactaggtgaactaatcaaacatgataataatgcatgatttagcaaaggatttctcggcttctccggttatcttagctctaagtatagagggtttcgcggaacgccacctgttactctaaaatcatagtttgagtttgagaacggttcgataacaacttagctatttatagatttactatcatctatttcctgagaataccctaagcctgacgtttttattatctattttcacaaccatacaattcgctattgcttacttttgtttctcttattttcattactgttttacttcgcttaattcaaaaccttagtttattgcgtgatccgagaactttgtgaattcgatccctaagtgctgcaattgacctctttatttgagagagtggtcttaggattaatttgacatatatcaaatttggcgcctttgtcgaagttctctttgattcaccattagactaggtgtagaatttaaactaagcttttatttttctttcttttgtttctcacgcgttttctttcttctcttttctgtgacaagggagctaaaagatggaacgcaacaaactgctggcagatttcgacgatagtgttgaccgacaccaactgggcagcttggattagattcaaatcctattagagagaatgtccccaacatggtttccaacagagccaactcatcaatatcttctacagacggatagccacgccataccagactcaacttgatggagcgagctagtgtaacttcatgacaaaaactactagtgaagcattactcctcattaccaatgctttaactagtctttcgacacaggaatttgacactgaacgaagaatttcagctgagatagctaccgcaagcaaagaaactcatgtttcagcaatttttgaccctatccacgccccccccctccaccctcatcggagaccagaatggaatctatgcttgcgcaacttcttgcaggcctaacaaagctcgaaagcaaacatgattctctctatagcaagattgacaatctacgctctcatacatccgagctctcacctccacctctatcaatatagtcacactacctagtggaaagcaactaaacccaatccttcatcgcgaatgttcagcttagacttcatttcgtccagttgcaggaaacgtctcagtgtcgatcgatacatcagggtgtcgatcaacgctaattaatcttgacgacactgttttgactttgtcgagaggaaccaataatttcacagaggaggaggcgcttattcccgatggtgtcgaacgacaaccacctcatgtcgatcgacaccagcaccaaacagacaggccagtgttgacgtttgatagagcaggattgagtctagacagtggtgtcgaccaacactcacctagtgtcgctcgacactagactcagactccacctatctgccttgaatctccgcctattgcttacacacaaaacgtttattgtctactgcctcgacagtccaagcagaaattcgtgatatgcattgcatgggtatcatcgatgagactctacttcagttgcctccggttgatatagagaagttgtcaccccctcttcagagtgatatgctacgagatgatgctccagagaagcaagttgacaagacaacgataagggttgtctcagaacaggtactcagcaacagcaagcgcccacatgaagcaagctccagattcgctgctgagaattgatctatagagatggtgtcgatcgacaccattacctatgtcgaccccaaacgggctgaaccagaactatctactaaagctgctttgcaagttcagaccactgctgctgttccaggacctgttgtcacaccaaccaatgcacctctataactgcatccacatccgaagaggcaaaggtactcatctcttcctccagatataatcaatttgactttaaaattttcaaagactgtttcacggtttagcaagccacgagtttctcatcgagcgcttgtttattcttttgatgattgtgcagttaaaagaagtataccacccatacttgagtctcaccctgctgatgttccacacttctttggtctacctcacacaccgagtgcctataagccaccttggatgatgagacgtctttcaaaaaagcatttactgccaccttcagatccacttgatccccatactccatcaaagtcaagctattgactctaaacaagcgcttagtgggaggcaacccactggtatggttatcttcttctttttcttttattttactcgcttactctggatttgaatgccactagggacactgtcgtttaagtcagggggaggttcttactaatattggttttatttttgatttttatgatttttcgtttttgagtttattgaattccaaaaagaaaaaaaacgtattcattagtttatttaggaatcatgatctatatttctttagattattgccttgttaatgaatgctacaggttcgactcaatccgactattcgaaaattcagatagcaaaccaacagacttgaggatatcctagtttccaactcaaccactaaggctggagctaatctcactgctcttccttttacctcttaaaacggttagtattcatagatcttgactccttgttcatacctgatattgagaccaaagtgataaacagaatatgttcctctccccttaaaaaatataatgagagattgagacgattttcagatagtgtataggggtatgaatgtttcctatgaccccattattatgcattatttggaatgatcaattacaaaggttggaaaaatgccgagggtgtcaatctagtatgcgagttcccctttgtttactctctaaaaagaataagtctggggagagaaagaacaccaaagaaaaaaataataaaagaatggtcgatttatcatggtatagtacaggaatgagtctagaaagatcttgaatgttagcttgtttgatgagatccatcgatgaaagcctggtggatattgttgtggaccttaggtatggaatctagaatgttgtttaagcttgtgaagaagtacacgttggttaggatttgattagaactgctaggcatatggatttggttagaatggtcatggcaatagactagagaatgttgggagttcctgtgttttcaaaccccttccacgggttcggcttttgtgttttgcttgagggcaagcaaaagctaagtctgggggagttgatatatcccttttttactgtttttaactatgttttaggtataggttttagagtctaattgttatttctatagtcttttctagtccttttcaggtctttacatgtttgagatgcatttggagattatggagcattctggagatcaacagacaacttaagctgcagaagcaatccggagacgaaaatgcacgtaggtgtcgagtaacaccaatacctgacggcaatttcgagacgcaacttattgatgttttgaagatttccaaattcggcccagaactttctcctatgtttaattaaggcccagcacgttttaaagacgaaatcatgatgaatcaacctctaggaacaaattgctatctttcatggacgcttttgccagatacaacgaaatcatgatgaaccccgaggaccaagagaaaactgcgttctacacatagcaaggtattttttgtcaccgagtgatgccattcagacttaaaaacgctggggcgacttatctgcgtttcgtcaacaagatcttcgcattacagatcgggaaaatgatgaaagtgtacatcgatgatatgttggtaaaatctatggaaaaggaagaacacatagcccatttacgcgagtgttttcggcagcttaacctctataaggtaaagcttaatccggccaaatgccgctttggagtaagattcgatgagttcctgggatatctagtcacgcaacgcggcatcaaggcaaatctgaagcagatcgaggcgttattgggaatggcatcgcctcaaaacaaacacaaagtgtagcgtctaactggaagatcacagcccttaactgatacatcactcgatctactaacaagtgcttggctttttacgacatgcttcggggaaacgaaaagttcgaatggacaacctgaagcgaggaggctttccaggtacccaagaagtacctggcaaccccaccaatcctcgcgaaacctgtaatcggagaaccactctatttgtatttcgccgtatcagatactgcggtcagcggagtttaagtccgggaatatagaggcgaacaaaagccgatcttttacgtctcacaaacatttaccggcgcagaatctcgctacccgcaaatggagaagctcgccttagcagtcgtaatgtcacctcggaaactgcagccctatttctaatcccactccatcgtggtaatgggatccatgccgctccgcgctatcctgcatagtccaagccaatcaggtcgtctggctaagtgggtaatcgtatgatatcgaatatcgaaacaagatgtgcgcgaagtcccaagtcctagccgactttatcgtcgaactacctacaaaagaaactcgagagaatccgctcgatacaacttggctcctgcacgtggacggatcgtcatcgaaacaaggttcgggcgtaggtatccgtctaacttcacctacatgcaaggttctcgagcaatctttcagactaaattttgaggcgaccaacaacgcggccgaatacgaagcgcccgtggatgggcttaatctagctcgggggctgaagatcgtgaaaatcagcctttttgcgattctcagctcgtcgcgaatcagttcaacgaagaatacacggcccgggacgaaagaatggaagcttatctagctcatgtacaaggtcaggcgaagtagttcgacgaatttgagttgaccaggattccctgaggagaaaactcgtcggtcgacgccctaactgctttggcctcaacatccaacacgaatcttcggagactcattccagtcgagtttatcgaaaagcctagtgtcaagctcgacaaagaggaacatgcctttcctatacagaatgccgcagattgcgaagatgcttcggattcaaatgacagctcgaacttgggttgtgattcagaatggatagaacccatcaaaagctatatatccgaggggaaagtgccttcggataagtgggaagctcggaaggtgaaagctcagtctgcacgcttcgttctggtcgaggagaaactcttcaagtggcgattatccggacctttaatgacctgcgtagaaaaagaagcagctcacaaagttatggaagaaatccacgaaggctcgtgtggaaatctctacggaggaagagccctagccatcaagattaaacgccacagatttttttggccgacaatgatcgaagactgcaaaaagttctcaaaacgatgcgaaaatgccaaaggcacgcacccacaatccatcaaccagccaagcttctttcatcaatcgcctcgccatatccattcatgctttggtcgatggacatcatcgttcatatgcacccctcgaagtagaagaagaagtggatagaggccgaatcgtatgcaactatcaaggacgctcaggtcgagagcttcgtgtggaagcacattctatgtcgccccgggatcctttacgagatcgtcacagacaacggctcgcaattcattttgacttgtttcaacaggtaactgacaagattttccatagagaaggttgaaaggagttgtgccgataggggtcttgaaagctgttctataagcccatagcgcgtcattgagcttcgcagatcaatctttagaattccacctgctcgcttgtctgtggatgataaggagcggctaccttgtgctttactccgtgtttcttcagaaggttctcaaaaaccttgttgataaaatgtttccctctgtcactgattacaaccctcgggacccaaaatctcgggaagataatcttgaacacaacttttgcatcattggtgggactagatatggcttcgacccattttgatacatagttcactgcgatcagtatgtacttatttctgtaagaagaaggaattagacccataaaatctattcccaaacatcaaagatctcaacttccaagatcggattttgaggcatctcattccttctgctgatgttccctcttctcttacatgaatcacatttcgagacaaattcctaagtatccttgatagtaggtttttagtcaattaattcctaaaccactaatcatgtcgttgtagtattttaggttgtcaatccaatccggtgtgaagcaaacagatgggatatgattagaaagctctaagtcaggctaagtagagagttggttggttctaacagtcctaatacgcaataagaaaaaataaaatgaaactaaaagcaaaaatggcaataacagacagatgagtaacaaagaagaaatgataacagacattcaaatggataaacgattcctaaggatgaggtaattgaatagcgtggtctccttaatctattcaggcggttgacaaaatttcacagaagccatccctagacaacaagttcaacaacagattacttcactaccatgacaggaatcctctagaagagctagacactaacctaatcaccattagcgatctctaactaagcaggcaacatcgaatcaacttgttaaagccaataccctctctacaccgccaataccttgggatagaggcgaatatctctggaattaatagatccaacattccatcgaacaccttttaacgcaagaatgtttggattcgtattctaaatgatcagaaaggaacaagcaataagcgcaactaatccaacagggattctagtattctaatctcaaccacctaacacgaccaagtaaaccacaactactctatcacatcctcagaaatacggttcactactcagacataatcaaagacaatagcaaagcaacgattgtaaagttgataacataattgaaaagggattaaaacgaatactgaatataaaattcttgaaagtgaatacaaagtcgtaggagaaacattgtggctgcaaaaacgagtctaaggtaaaagatagattaaagttggatggatgggtgccctagggaaaacccttagaggcattttatataagcaaaaatatgaatcaaataaggaaactagatagatagtaatcttcacgtaagaaccctgcgatcgagtatgtcattgacatctatgtcattggcatctgatgggatgaaatgggcctccctgtgatcgagtatgccattgatcaaactgggcttcagggactccgccttgcgatcgagtggtctgaagtgaaaacaagatagaatggtccagcgaccaaacgatcgagtggatgaggtggtgatcgagtggttgtttcggcttctcttctcttctttattcttagcttgtctggttgagtgcacaatgagcagataggcctcctggtggtcgagtggtgatcgagtggtgtaagattggtgattcctccggcttcgcaattgagtaaaactgagctgctagcttctccgggctgatttgccctggtagggcgccgaggttgcgatcgagtactttggctgaaggcgtcatttgtttctcctctgtttgatctctgaaagcatccaaagtacctgaaaacaaccaaatatgcaatgcacatgcaatgctaatgcaaaatcgtcctaagtatgcaaaacacactaaaacggctgctaatgagatgaaatgtggattaaacaacgacaatgtggtgaagaatgtatgcctaaatcatgcaaaattatagacatatcaatccttaaacattgtcggccacggaaaacctacttgcaggatttttgacattgtatttgaaacaacccaacccattttttttttaaacataattaaatattcctataaatacttaattaaaccaaccaataaagcaacatttaaacctcaagtcaaaaatactattttatgaataagtaaataattcaaccaacaaaactaagaatgactaacaatcctaacacaaccctaaccggtttcaataaccaaaacacaaaaataaaccaaacgagttcctaaatcatcctctcttcgttgccatgattccacgatcacactttatctttacctgcaccaaaaaagaaagagatgcgtaagtattatcacaaatacttagtgaggcgatcctaccatctaggagttatacacacaagtaattaaaagggtataatcacaaatacatcataaacgaaccagtcattgaacaattcacccaaaaacacattcatcacacctacataccatcacacaaaacaaaacatacaacccaatcgctcaaataagctcatggtcacgcactcacctaaacaaattgattctaacatcaattaaacccagaagagactctccttgcgtctgaaacagtccagaaacatcttacaacaagtcacaaccaaaagcaatcttgaagcaaactcgagatgaaaaacagaaacaaacagcctcaaagacgaaaccctaaaatacaaaccaacagcctcaaagacgaaaccctattaaatccctccggtgaaacgctacccgtagacgtcacagagctgcccacaaaatatcgtgccgatcggaaaccagatgagaccacgatctcagttgcaatccccactggtcctaattcgcgtctgagaaaacgtgtctcacgaaactgcaaataactaaacaaatttaaatccaaatccacttctataaactggagaatgacgataaaagacgtgagaacaactctatcaaatttatttacctttgacaacgatttgataagttgaaactgtttcctcccaaaccctaacgattctgctctttctccttctctctctttttctcctttataaaacagaaagtggctaactaaagccctaattttgagtttccttttttataagcacactctagggtttctattaacccaaccgagtaaactgagcgatttaaaaacaaatcctaaccgattttccggttcacgggcgttacagtcttaaatgttgcgaagttgccaccataggtagagccatggcaatgcggcaggatgccttcagtttgacattatgatacgcttcgcgtgtagatcttatctttgctaagtgtgtagagataaggctcatcctagtagaaatggtgtatgtctttgaagaacttttttctcatagcttgacagatttggaggctcttcaccactcaccaagtagttgacgtgatcagcataccaagaaagcttatctcctattgcacatgccagattgagtgattttagaatttgagcgctctcgttcagctgcttaattgccattagctgttcttctagcatagagtcgtcaatagggacctcgtcttcgattctcattctagatagattgttagctaccctcgtggagcaataagatccatctcaacagcctaggcttggtatccttcttcgcataaatatgcctcagagcggcatgatcagtgtagattgtcaccttagaacctaccaggtagctcctaaatttcttgaatgcgaataccacagccacaatttccttctcagtagtggcataccttacttgtgcatcaaccatcgttctggtcgtgtagtagatcacatgaagttttttatgaatccactgacccaaaactgctcctactgcaaaatctgaagcatcacacatgatctcaaacgggtagtcccagtttggagcttggattattggagaagtgaccaaagcttcgtagatcaacttaaaggctgtcaaacattcttcatcaaatgtaaacttggtttccttgtagaacactctcgtgagggtctgggcaacttggaaaaatctttgatgaatcttctgtaaaaccctgcatgcccaagaaaattcccgttgtccttgacagtctttggcgactgtaactacatcatcacatcaaccttagccttatcaacctctatcccctcctccaaaatcttgtatcccaaaacgatgccttctataaccatgaaatggcatttctccgagttcagcaccaggtttgtctcctcacatcttttgagtaccctgcacatgttcaacaaataggaggagacggaagagccatacatggaaaaaatcatccatgaacacctctactgatattgataataggttcttaagatcaattaatcctaaagcactatcatgtcgttgtagtactgaaggttgtcaatccaaatgggtgtgatgctaacaatcaagacgtgatcagaagtcactaagtcaagccaagcaataacaagttttggtgtgttctagcagtcctaagtgaacatgcagaaaacagaaacagtaaaacactcgaccaacacaactcgttgtagagcactggatgtggtcgagtgacttggtcgagtaacaggcagtaaacaaaacagagacactcgactgcacagtctgttgccagacaactgggtggtcgagtatcaggtcgagtaacaggagagaaatacaaaaactaaacaacatgtaacaagatggagtaaacaacagtagaggaaacaataaaatcaattagataaagaattccggaggatgggttaattgagtagtttcgtttcctcagtttacaggtgattgacatgctcaataaactatccctagacaacaagttcattaaccaaatctaagtgccaccgcaacagagaccctcaagttaacctagtcccagactcaatcaccattgacgagagctaacctaacaggcattacgaatcaacaagttaaagccaaaacgctccctgcaaccaataccttggtacagggccacgaatctctggaattagtagttcagatatttcatcgaacaccttttgagcgcggaaatgtctgggctcaaattccagttgatcagaaagcaataggcattaagaacaactaattcagaagggatctatcaatcaatactcaaccacctagcatactgagaattctacactactctaacccatcctcagaaacctattcactactcggacatcattgcagagaacattaaacgtttaacaggatgaaaacatgataacaacagtgtaatagcaaaatgataagaggatgaacaacattaactgaaatcaagaacaaatactgaatactgaatactgaatatatatagagaaatccggattacaaaaggtctagaacacagtgtctccggaataaaactagataaaaacttgttctcgaaaatgtaaagtacatgctagttatagcaaaatattccgaaaccctaatacttaaaacgacgcagtattgggatggattaagaacagtactcgacccaggtggtcgagtgagaggtcgagtgataagctagtctttttttcttctttgtgctcgagtgtctggttgagtgcggaatggagaagactctgaagctcgccatcaagtatgtagtcgagtggtgatgatggtgatactcgacttccaggtagatggtgtgatcgagtgatgatcagttagtggaggtgaagacactcgacctcggggtcgagtgatgtgatcgagtgatggtcaggttgtggaggtgaagacactcggcctcgtggtcgagtgatgtgatcgagtgtttctcgtggtggtactcggatagggagtcgagtgatgaggtgaaatggtgaaggacactactcgaacaggggatcgagtgttctgttgaggtcgtgaagcgtctactcgacctgggggtcgagtggtttgacatgatcaggtccgcttcttccaattagctcgtcaacagctccaaatcaccagaaatcaacagaaatatgcaatatgtatgcaaacctatcctaaacatgcaaagtgatgacgaatgatgagaaatgatataaaacagtgatgatatgatgctaaagtgatgacaaatggatgctcaaaacatgcaaaatacacacttatcaactcccctaaacttagtctttgcttgccctcaagcaaacaattaagaacacgctggaagtgcagtttgaaagcggggactcagcgtcaaaacactagataaaatagatgaaatcaatgtccaagttgataatcctaagctgcgatatgatcgaagtctactcaaaaacgttagtcatgccttattatcaatcaatccgactcatatgctcggcctacacatgttttcaaatctaccaatccctttaacattcattagttctggaacgtgaatcaagcaatgcatcatcaatgaactcatttggctaaggtaaaaggtcaagagacaaagatggtcccttacagaataggcttcagtaataggggatctctcaaaaaataattaagctttagtagaatgataaaggtaagtcccaagctatgcatacagagataagatcccatctacccagagtatatcaaatgaagctctcatggtaatcccatctccaatcccaatataagaacttaactctactctttgcattcatgaatctttttttttgtgaaatcattttatgaaaattttccaattgttttggtttttctatgccttagatgaatgcagactcaaaaatatacacaatgcaacacacacttcctgagccctcccccaaacttaaatcacacagtacattgtgtgataaacttggaagagagtactcaggacaaatccattcacagaaacaaaagaaagaacaaatcacaacagatgatataatacaatggtgaagtgaggcgcttacctcagtcgaagaatgaacgaagttggtcgtcaatggctgcctgtgattgctcccaggccatagacgaaccgccctgttccgtatcagctccagcaggtgggtactcgacctcatcagctctgtggcggccaacaccgctctgaggatactcgacctctcttcttctactgcggccagcaccgcggtcgagtgatctcctcgagtgaattatgcgtgatctgctgctagatcgagtgagtgtagccttcctccttctcttgtgctcctgggactcgaatgacgaatgcctagccgggacatgtgagactctctgctcactaagctcaggcatgtgctcaggctcatcaaatctcctcgatggcatctctagaggaggctgtccctgtggaatagttgtagtggaggaggaacagctctcttgtggttattgctgacagcccagctcttgtatccactcagatggatcaaaagaagtacagagagaggtgtgtcattgatttaaccttggacagacatgttgttcttagtttggcggagagtgcccttgagagccatagcgatcatctccatatcagaattagtaacagtccctatgatctctcgggagtagagtacattggttatagaacgctggaaatacctgatgacagggctacgtatctgattgctctttgacctggaagaattcagcggtacagaggtgccaatggtgatccacaagtctttcaactcttctctgtcatacttgggcttagttcccgtcccactggggaaaccaaacaatccttccaagcgcttgattgataacctatactcatgaccatacacagagaatctcaagaatcccaatccttcacaatccaattcatcagaggtcataccttggtagagctccacttgcagcggagaggaattgaattgtctattcttcatatgctacatacgaataagccatcagagtgtccagatgacaactctggtacaggtgctgaacatcctccaacaatccaaattgtgcaagcgtggtcgagcatggataccttgtgctacaaaactcattcaatttgaagagcctaatatattcctcagcaggcaatacatcaggtttgtgcagaagtttggtagctctacgagtatgctcaggcatgtactcgtcttcctgatcctcatctataagctcatacctctctgtcattgctctcttcccacgggctatctcagcttttcttctgaatattctctctgttctctttctggccttgaagacgacgactctgtctcatccatgttgtagtcaggatcaacagaagaactgccactgtaattactcatgattctcctacagaaatctagatctcaaagctcaaatctcaataggttagtctcaaagataacaatgaaaccaaaattgttatcaacaagcaatgaaatagacccaattggtcgagtacaatctgatactcgagtaacctaagctgttctcgagttacactaactcgaattggatctattagagtagaaccgttggtcgagtaaactctctgaagttggatggctctgttggttgcaagaacaagaggtcgaatggtttgttgtagaggtcgagtgaaagcttgtggtcgagttctgtggttgtaatcgagttgtccatgagacttcgacggtgaacgaggcagagtactcgattgcggcggcgcagagatggtcgagtgttgcgagaacaaagtgatggcgaacggcgaagtgaaaaggtcgagtgacggaggaaatgaactcggtgtcggcggtgcggaggtcgagtgctttttggaggtcgagtaaacagatgggtcgagtgaatcttggtgagagatagcgatacatggccttctgtagagtaaaagttttggatttttactctatctccacgttgttcctttgtccttgagaaccacaaacacaactaagaaaaattaaaaataacaagaaaagaaaaatttatttacagagatagtcatgggacttcctcccaagtgagcttgtttaaagtcattagcttgactcctttactcctttaatcatcaagaagttcttggagatgaaccaatgtcacctctggaaggatttgatccgctaagtatttcttgagcctttgaccatttactgtgaaatctccactcttaccagctagagtaactgctccataaggacggacctcagtgatacagaaggggccagaccatctggatttaagctttcttggaaagagtttcaagcgagagttgaatagcagcacctgatcaccaacttggaaatccttggtgatgatcttttgtcatggaaaagcttagttctctccttctagattttagagctctcataacatcaattaaacccaggagagactctccttgcgtctgaaacagtccagaaacatcttacaacaagtcacaaccaaaagcaatcttgaagcaaactggagatgaaaaacagaaacaaacagcctcaaagacgaaaccctaaaatacaaaccaacagcctcaaagacgaaaccctattaaatccctccggtgaaacgctagctgtagacgtcacagagctgcccacaaaatatcgtgtcgatcggaaaccagatgagaccacgatctcagttgcaatccccgctggtcctaattcgcgtctgagaaaacgtgtctcacaaaactgcaaataactaaacaaatttaaatccaaatccacttctgtaaactggagaatgacgataaaagacgtgagaacaactctatcaaatttatttacctttgacaacgatttgatatgttgaaactgtttcctcccaaaccctaacgattctgctctttctccttctctctctttttctcctttataaaacaaaaagtggctaactaaagccctaattttgagtttccttttttataagcacactctagggtttctattaacccaatcgagtaaactgagcgatttaaaaacaaatcctaaccgattttccggttcacgggcgttacagtcttaaatgttgcgaagttgccaccataggtagggccatggcaatgcggcaggatgccttcagtttgacattatgatacgcttcgcgtgtagatcttatctttgctaagtgtgtagagataaggctcatcctagtagaaatggtgtatgtctttgaagaacttttttctcatagcttgacagatttggaggctcttcaccactcaccaagtagttgacgtgatcagcataccaagaaagcttatctcctattgcacatgccagattgagtgattttagaatttgagcgctctcgttcagctgcttaattgccattagctgttcttctagcatagagtcgtcaatagggacctcgtcttcgattctcattctagatagattgttagctaccctcgtggagcaataagatccatctcaacagcctaggcttggtatccttcttcgcataaatatgccttagagcggcatgatcagtgtagattgtcaccttagaacctaccaggtagctcctaaatttctcgaatgcgaataccacagccacaatttccttctcagtagtggcataccttacttgtgcatcaaccatcgttctggtcgtgtagtagatcacatgaagttttttatgaatccactgacccaaaactgctcctactgcaaaatctgaagcatcacacatgatctcaaacgggtagtcccagtttggagcttggattattggagaagtgaccaaagcttcgtagatcaacttaaaggctgtcaaacattcttcatcaaatgtaaacttggtttccttgtagaacactctcgtgagggtctgggcaacttggaaaaatctttgatgaatcttctgtaaaaccctgcatgcccaagaaaattcccgttgtccttgacagtctttggcgactgtaactacatcatcacatcaaccttagccttatcaacctctatcccctcctccaaaatcttgtatcccaaaacgatgccttctataaccatgaaatggcatttctccgagttcagcaccaggtttgtctcctcacatcttttgagtaccctgcacatgttcaacaaataggaggagacggaagagccatacatggaaaaaatcatccatgaacacctctactgatattgataataggttcttaagatcaattaatcctaaagcactatcatgtcgttgtagtactgaaggttgtcaatccaaatgggtgtgatgctaacaatcaagacgtgatcagaagtcactaagtcaagccaagcaataacaagttttggtgtgttctagcagtcctaagtgaacatgcagaaaacagaaacagtaaaacactcgaccaacacaactcgttgtagagcactggatgtggtcgagtgacttggtcgagtaacaggcagtaaacaaaacagagacactcgactgcatagtctgttgccagacaactgggtggtcgagtatcaggtcgagtaacaggagagaaatacaaaaactaaacaacatgtaacaagatggagtaaacaacagtagaggaaacaataaaatcaattagataaagaattccggaggatgggttaactgagtagtttcgtttcctcagtttacaggtgattgacatgctcaataaactatccctagacaacaagttcattaaccaaatctaagtgccaccgcaacagagaccctcaagttaacctagtcccagactcaatcaccattgacgagagctaacctaacaggcattacgaatcaacaagttaaagccaaaacgctccctgcaaccaataccttggtacagggccacgaatctctggaattagtagttcagatatttcatcgaacaccttttgagcgcggaaatgtctgggctcaaattctagttgatcagaaagcaataggcattaagaacaactaattcagaagggatctatcaatcaatactcaaccacctagcatactgagaattctacactactctaacccatcctcagaaacctattcactactcggacatcattgcagagaacattaaacgtttaacaggatgaaaacatgataacaacagtgtaatagcaaaatgataagaggatgaacaacattaactgaaatcaagaacaaatactgaatactgaatactgaatatatatagagaaatccggattacaaaaggtctagaacacagtgtctccggaataaaactagataaaaacttgttctcgaaaatgtaaagtacatgctagttatagcaaaatattccgaaaccctaatacttaaaacgacgcagtattgggatggattaagaacagtactcgacccaggtggtcgagtgagaggtcgagtgataagctagtctttttttcttctttgtgctcgagtgtctggttgagtgcggaatggagaagactctgaagctcgccatcaagtatgtagtcgagtggtgatgatggtgatactcgacttccaggtagatggtgtgatcgagtgatgatcagttagtggaggtgaagacactcgacctcggggtcgagtgatgtgatcgagtgatggtcaggttgtggaggtgaagacactcggcctcgtggtcgagtgatgtgatcgagtgtttctcgtggtggtactcggatagggagtcgagtgatgaggtgaaatggtgaaggacactactcgaacaggggatcgagtgttctgttgaggtcgtgaagcgtctactcgacctgggggtcgagtggtttgacatgatcaggtccgcttcttccaattagctcgtcaacagctccaaatcaccagaaatcaacagaaatatgcaatatgtatgcaaacctatcctaaacatgcaaagtgatgacgaatgatgagaaatgatataaaacagtgatgatatgatgctaaagtgatgacaaatggatgctcaaaacatgcaaaatacacacttatcaactcccctaaacttagtctttgcttgccctcaagcaaacaattaagaacacgctggaagtgcagtttgaaagcggggactcagcgtcaaaacactagataaaatagatgaaatcaatgtccaagttgataatcctaagctgcgatatgatcgaagtctactcaaaaacgttagtcatgccttattatcaatcaatccgactcatatgctcggtctacacatgttttcaaatctaccaatccctttaacattcattagttctggaacgtgaatcaagcaatgcatcatcaatgaactcatttggctaaggtaaaaggtcaagagacaaagatggtcccttaaagaataggcttcagtaataggggatctctcaaaaaataattaagctttagtagaatgataaaggtaagtcccaagctatgcatacagagataagatcccatctacccagagtatatcaaatgaagctctcatggtaatcccatctccaatcccaatataagaacttaactctactctttgcattcatgaatctttttttttgtgaaatcattttatgaaaattttccaattgttttggtttttctatgccttagatgaatgcagactcaaaaatatacacaatgcaacacacacttcctgagccctcccccaaacttaaatcacacagtacattgtgtgataaacttggaagagagtactcaggacaaatccattcacagaaacaaaagaaagaacaaatcacaacagatgatataatacaatggtgaagtgaggcgcttacctcagtcgaagaatgaacgaagttggtcgtcaatggctgcctgtgattgctcccaggccatagacgaaccgccctgttccgtatcagctccagcaggtgggtactcgacctcatcagctctgtggcggccaacaccgctctgaggatactcgacctctcttcttctactgcggccagcaccgcggtcgagtgatctcctcgagtgaattatgcgtgatctgctgctagatcgagtgagtgtagccttcctccttctcttgtgctcctgggactcgaatgacgaatgcctagccgggacatgtgagactctctgctcactaagctcaggcatgtgctcaggctcatcaaatctcctcgatggcatctctagaggaggttgtccctgtggaatagttgtagtggaggaggaacagctctcttgtggttattgctgacagcccagctcttgtatccactcagatggatcaaaagaagtacagagagaggtgtgtcattgatttaaccttggacagacatgttgttcttagtttggcggagagtgcccttgagagccatagcgatcatctccatatcagaattagtaacagtccctatgatctctcgggagtagagtacattggttatagaacgctggaaatacctgatgacagggctacgtatctgattgctctttgacctggaagaattcagcggtacagaggtgccaatggtgatccacaagtctttcaactcttctctgtcatacttgggcttagttcccgtcccactggggaaaccaaacaatccttccaagcgcttgattgataacctatactcatgaccatacacagagaatctcaagaatcccaatccttcacgatccaattcatcagaggtcataccttggtagagctccacttgcagcgtggagaggaattgaattgtctattcttcatatgctacatacgaataagccatcagagtgtccagatgacaactctggtacaggtgctgaacatcctccaacaatccaaattgtgcaagcgtggtcgagcatggataccttgtgctacaaaactcattcaatttgaagagcctaatatattcctcagcaggcaatacatcaggtttgtgcagaagtttggtagctctacgagtatgctcaggcatgtactcgtcttcctgatcctcatctataagctcatacctctctgtcattgctctcttcccacgggctatctcagcttttcttctgaatattctctctgttctctttctggccttgaagacgacgactctgtctcatccatgttgtagtcaggatcaacagaagaactgccactgtaattactcatgattctcctccagaaatctagatctcaaagctcaaatgtcaataggttagtctcaaagataacaatgaaaccaaaattgttatcaacaagcaatgaaatagacccaattggtcgagtacaatctgatactcgagtaacctaagctgttctcgagttacactaactcgaattggatctattagagtagaaccgttggtcgagtaaactctctgaagttggatggctctgttggttgcaagaacaagaggtcaaatggtttgttgtagaggtcgagtgaaagcttgtggtcgagttctgtggttgtaatcgagttgtccatgagacttcgacggtgaacgaggcagagtactcgattgcggcggcgcagagatggtcgagtgttgcgagaacaaagtgatggcgaacggcgaagtgaaaaggtcgagtgacggaggaaatgaactcggtgtcggcggtgcggaggtcgagtgctttttggaggtcgagtaaacagatgggtcgagtgaatcttggtgagagatagcgatacatggccttctgtagagtaaaagttttggatttttactctatctccacgttgttcctttgtccctgagaaccacaaacacaactaagacaaattaaaaataacaagaaaagaaaaatttatttacagagatagtcatgggacttcctcccaagtgagcttgtttaaagtcattagcttgactcctttactcctttaatcatcaagaagttcttggagatgaaccaatgtcacctctggaaggatttgatccgctaagtatttcttgagcctttgaccatttactgtgaaatctccactcttaccagctagagtaactgctccataaggacggacctcagtgatacagaaggggccagaccatctggatttaagctttcttggaaagagtttcaagcgagagttgaatagcagcacctgatcaccaacttggaaatccttggtgatgatcttttgtcatggaaaagcttagttctctccttctagattttagagctctcataacatcaattaaacccaggagagactctccttgcgtctgaaacagtccagaaacatcttacaacaagtcacaaccaaaagcaatcttgaagcaaactggagatgaaaaacagaaacaaacagcctcaaagacgaaaccctaaaatacaaaccaacagcctcaaagacgaaaccctattaaatccctccggtgaaacgctagccgtagacgtcacagagctgcccataaaatatcgtgccgatcggaaaccagatgagaccacgatctcagttgcaatccccgctggtcctaattcgcgtctgagaaaacgtgtctcacgaaactgcaaataactaaacaaatttaaatacaaatccacttctgtaaactggagaatgacgataaaagacgtgagaacaactctatcaaatttatttacctttgacaacgatttgatatgttgaaactgtttcctcccaaaccctaacgattctgctctttctccttctctctctttttctcctttataaaacaaaaagtggctaactaaagccctaattttgagtttccttttttataagcacactctagggtttctattaacccaaccgagtaaactgagcgatttaaaaacaaatcctaaccgattttccggttcacgggcgttacagtcttaaatgttgcgaagttgccaccataggtagagccatggcaatgcggcaggatgccttcagtttgacattatgatacgctttgcgtgtagatcttatctttgctaagtgtgtagagataaggctcatcctagtagaaatggtgtatgtctttgaagaacttttttctcatagcttgacagatttggaggctcttcaccactcaccaagtagttgacgtgatcagcataccaagaaagcttatctcctattgcacatgccagattgagtgattttagaatttgagcgctctcgttcagctgcttaattgccattagctgttcttctagcatagagtcgtcaatagggacctcgtcttcgattctcattctagatagattgttagctaccccattttcaattcccttcttatcaactatctccatgtcaaactcgtggagcaataagatccatctcaacagcctaggcttggtatccttcttcgcataaatatgccttagagcggcatgatcagtgtagattgtcaccttagaacctaccaggtagctcctaaatttctcgaatgcgaataccacagccacaatttccttctcagtagtggcataccttacttgtgcatcaaccatcgttctggtcgtgtagtagatcacatgaagttttttatgaatccactgacccaaaactgctcctactgcaaaatctgaagcatcacacatgatctcaaacgggtagtcccagtttggagcttggattattggagaagtgaccaaagcttcgtagatcaacttaaaggctgtcaaacattcttcatcaaatgtaaacttggtttccttgtagaacactctcgtgagggtctgggcaacttggaaaaatctttgatgaatcttctgtaaaaccctgcatgcccaagaaaattcccgttgtccttgacagtctttggcgactgtaactacatcatcacatcaaccttagccttatcaacctctatcccctcctccaaaatcttgtatcccaaaacgatgccttctataaccatgaaatggcatttctccgagttcagcaccaggtttgtctcctcacatcttttgagtaccctgcacatgttcaacaaataggaggagacggaagagccatacatggaaaaaatcatccatgaacacctctattgatattgataataggttcttaagatcaattaatcctaaagcactatcatgtcgttgtagtactgaaggttgtcaatccaaatgggtgtgatgctaacaatcaagacgtgatcaaaagtcactaagtcaagccaagcaataacaagttttggtgtgttctagcagtcctaagtgaacatgcagaaaacagaaacagtaaaacactcgaccaacacaactcgttgtagagcactggatgtggtcgagtgacttggtcgagtaacaggcagtaaacaaaacagagacactcgactgcacagtctgttgccagacaactgggtggtcgagtatcaggtcgagtaacaggagagaaatacaaaaactaaacaacatgtaacaagatggagtaaacaacagtagagaaaacaataaaatcaattagataaagaattccggaggatgggttaactgagtagtttcgtttcctcagtttacaggtgattgacatgctcaataaactatccctagacaacaagttcattaaccaaatctaagtgccaccgcaacagagaccctcaagttaacctagtcccagactcaatcaccattgacgagagctaacctaacaggcattacgaatcaacaagttaaagccaaaacgctccctgcaaccaataccttggtacagggccacgaatctctggaattagtagttcagacatttcatcgaacaccttttgggcgcggaaatgtctgggctcaaattccagttgatcagaaagcaataggcattaagaacaactaattcagaagggatctatcaatcaatactcaaccacctagcatactgagaattctacactactctaacccatcctcagaaacctattcactactcggacatcattagcagagaacataaacgtttaacaggatgaaaacatgataacaacagtgtaatagcaaaatgataagaggatgaacaacattaactgaaatcaagaacaaatactgaatactgaatactgaatatatatagagaaattcggattacaaaaggtctagaacacagtgtctccggaataaaactagataaaaacttgttctcgaaaatgtatagtacatgctagttatagcaaaatattccgaaaccctaatacttaaaacgacgcagtattgggacggattaagaacagtactcgacccaggtggtcgagtgagaggtcgagtgataagctagagtctttttttcttccttgtgctcgagtgtctggttgagtgcggaatggagaagactctgaagctcgccatcaagtatgtagtcgagtggtgatgatggtgatactcgacttccaggtagatggtgtgatcgagtgatgatcagttagtggaggtgaagacactcgacctcggggtcgagtgatgtgatcgagtgatggtcatgttgtggaggtgaagacactcggcctcggggtcgagtgatgtgatcgagtgtttctcgtggtggtactcggctagggagtcgagtgatgaggtgaaatggtgaaggacactactcgaacaggggatcgagtgttctgttgaggtcgtgaagcgtctactcgacctgggggtcgagtggtttgacatgatcaggtccgcttcttccaattagctcgtcaacagctccaaatcaccagaaatcaacagaaatatgcaatatgtatgcaaacctatcctaaacatgcaaagtgatgacgaatgatgagaaatgatataaaacagtgatgatatgatgctaaagtgatgacaaatggatgctcaaaacatgcaaaatacacacttatcaactcccctaaacttagtctttgcttgccctcaagcaaacaattaagaacaagctggaagtgcagtttgaaagcggggactcagagtcaaaacactagataaactagatgaaatcaatgtccaagttgataatcctaagctgcgatatgatcgaagtctactcaaaaacgttagtcatgccttattatcaatcaatccgactcatatgctcggcctacacatgttttcaaatctaccaatccctttaacattcattagttctggaacgtgaatcaagcaatgcatcatcaatgaactcatttggctaaggtaaaatgtcaagagacaaagatggtcccttacagaataggcttcagtaataggggatctctcaaaaaataattaagctttagtagaatgataaaggtaagtcccaagctatgcatacagagataagatcccatctacccagagtatatcaaatgaagctctcatggtaatcccatctccaatcccaatataagaacttaactctactctttgcattcatgaatctttttttttgtgaaatcattttatgaaaattttccaattgttttggtttttctatgccttagatgaatgcagactcaaaaatatacacaatgcaacacacacttcctgagccctcccccaaacttaaatcacacagtacattgtgtgataaacttggaagagagtactcaggacaaatccattcacagaaacaaaagaaagaacaaatcacaacagatgatataatacaatggtgaagtgaggcgcttacctcagtcgaagaatgaatgaagttggtcgtcaatggctgcctgtgattgctcccaggccatagacgaaccgccctgttccgtatcagctccagcaggtgggtactcgacctcatcagctctgtggcggccaacaccgctctgaggatactcgacctctcttcttctactgcggccagcaccgcggtcgagtgatctcctcgagtgaattatgcgtgatctgctgctagatcgagtgagtgtagccttcctccttctcttgtgctcctgggactcgaatgacgaatgcctagccgggacatgtgagactctctgctcactaagctcaggcatgtgctcaggctcatcaaatctcctcgatggcatctctagaggaggttgtccctgtggaatagttgtagtggaggaggaacagctctcttgtggttattgctgacagcccagctcttgtatccactcagatggatcaaaagaagtacagagagaggtgtgtcattgatttaaccttggacagacatgttgttcttagtttggcggagagtgcccttgagagccatagcgatcatctccatatcagaattagtaacagtccctatgatctctcgggagtagagtacattggttatagaacgctggaaatacctgatgacagggctacgtatctgattgctctttgacctggaagaattcagcggtacagaggtgccaatggtgatccacaagtctttcaactcttctctgtcatacttgggcttagttcccgtcccactggggaaaccaaacaatccttccaagcgcttgattgataacctatactcatgaccatacacagagaatctcaagaatcccaatccttcacaatccaattcatcagaggtcataccttggtagagctccacttgcagcgtggagaggaattgaattgtctattcttcatatgctacatacgaataagccatcagagtgtccagatgacaactctggtacaggtgctgaacatcctccaacaatccaaattgtgcaagcgtggtcgagcatggataccttgtgctacaaaactcattcaatttgaagagcctaatatattcctcagcaggcaatacatcaggtttgtgcagaagtttggtagctctacgagtatgctcaggcatgtactcgtcttcctgatcctcatctataagctcatacctctctgtcattgctctcttcccacgggctatctcagcttttcttctgaatattctctctgttctctttctggccttgaagacgacgactctgtctcatccatgttgtagtcaggatcaacagaagaactgccactgtaattactcatgattctcctccagaaatctagatctcaaagctcaaatgtcaataggttagtctcaaagataacaatgaaaccaaaattgttatcaacaagcaatgaaatagacccaattggtcgagtacaatctgatactcgagtaacctaagctgttctcgagttacactaactcgaattggatctattagagtagaaccgttggtcgagtaaactctctgaagttggatggctctgttggttgcaagaacaagaggtcgaatggtttgttgtagaggtcgagtgaaagcttgtggtcgagttctgtggttgtaatcgagttgtccatgagacttcgacggtgaacgaggcagagtactcgattgcggcggcgcagagatggtcgagtgttgcgagaacaaagtgatggcgaacggcgaagtgaaaaggtcgagtgacggaggaaatgaactcggtgtcggcggtgcggaggtcgagtgctttttggaggtcgagtaaacagatgggtcgagtgaatcttggtgagagatagcgatacatggccttctgtagagtaaaagttttggatttttactctatctccacgttgttcctttgtccctgagaaccacaaacacaactaagacaaattaaaaataacaagaaaagaaaaatttatttacagagatagtcatgggacttcctcccaagtgagcttgtttaaagtcatttgcttgactcctttactcttttaatcatcaagaagttcttggagatgaaccaatgtcacctctggaaggatttgatccgctaagtatttcttgagcctttgaccatttactgtgaaatctccactcttaccagctagagtaactgctccataaggacggacctcagtgatacagaaggggccagaccatctggatttaagctttcttggaaagagtttcaagcgagagttgaatagcagcacctgatcaccaacttggaaatccttggtgatgatcttttgtcatggaaaagcttagttctctccttctagattttagagctctcataagcttctaaacggatctcatcgaggtcactgagttggataaatagcttctccttaacagtttttatgtcaaagttcagaagttttacagcccacattgctttgtactcgagctcaacaggtaggtgacatgattttccatagagaagattgaaaggtgttgtaccaattggggtcttaaaggctgtcctataagcccataatgtgtcatcgagctttgcagaccagtcttttcttgtaatcccaacagtcttttctagaattgtttttatctccctattggagatctcaacctgctcgctcgtctgtggatgatagggactagcgaccttgtgctttactccatgcttcttcaggagggtctcaaaaaccttgttgatgaaatgcttcccaccatcactgattactaccctgggcactccgaatctcgggaagattatggtcttgaacagcttcagcacaacttttgcatcgttggtaggactagcaatagcttcgacgcactttgatacgtaatctacggcgaccaatatatatttgttaccgtatgaagatgggaatggacccataaaatcaatcccccatacatcaaagatctcaacttccaagattggattctgaggcatctcatttcttctgctgatgttgtcttttctctggcatgaatcacactttgaaacaaactcatgagcgtctttaaacattattggccaccaaaagcctgcttgaaggatctttaacactgtcttgaacgtcgcgaagtgaccaccatatgcagagccatatcttgtaaatcttatctttatagagagtgtaaatataaggctcatccctctagtaatggtggatgtctctgaaaaacttcttcctttcataactggtcaggttgggaggctctactctgcgtgccaagtaattgacgtgatcaacataccatggagatcctcattcaacagtgttcagttggtggaactctttcccactgtagctcctttcgaagaactctacaaccatgagttgctcttctagcattgaatcgtctatcggaaggggttcttcaattctcatccttgacagatggtcacctgcaccattttcaatgcctttcttatctactatctccatgtcaaactcttgcaatagaagtatccatctcaatagtcttggtttagtatccttcttggcatatagatgcctcaaagctgcagtgacctttgatccaaccagatagcttctgaaattctcaaatgcgaatacaacagctagaagctcattttcagttgttgcatatcttctttgagcttcatccaacgttcgactggcgtaatatatgacatgaagcttcttgtctattttctggcctaaaacagctcctactgcgtaatctgatgcatcacacataatctcaaatggatagtcccaattaggcgctcgaacaacaggagcagataccaaagcatccttaatggtgtgaaaggatttgaggcagtcctcatcgaattcaaattcggtttccttgcacaatagtctggttaacggcctggctatcttggagaagtctttaataaatcttctgtacaacccagcatgaccaaggaaacttctgatgtctttcaccgtttttggtggctgcaactgcatcatcacttcaatttttcctttgtcaacctctatacctttttctgatatcttgtgacccaacattatgccttccttcaccatgaaatgacacttttccaaattgagaacaaaattcgtctcttctcacctggtcaataccctgccaagatttaataaacatgaggagaaagaggggccatagaccgaaaaatcatacatgaaaacctccaccatctcctcgattaaatatgaaaatatagaggtcatacacctctgaaacgttgcaggagcattgcataaaccaaatggcattctcttataagcaaaagttccataaggacatgtgaaagtgtttttttcttgatcattagggtgaattggtatttgaaagaaaccactatatccatcaagaaagcaatagtatggatgattagctaaacgttcaagcatttggtcaatgaatggtaaaggaaaatgatctttcctagatgcagcatttaactttctataatcgatacacattctatgactagttatagttctagtaaggatcaattcatccttttcatttttaacaacagtcattccgccctttttagggacgcaatgaactggagaaacccaagtactatcagatatagggtagatgacaccagcatcaagcagtttcaaaatttcttttttcactacttctttcaagttgggatttaacctcctctgtggttcaatgctagagtaggattcgttttcaaggtggatcctatggttgcataaactaggtgaaattcccttaatgtcggataatgaataaccaattgctctcctagactttttaagctcagataatagcaggttcacttcatcatcatttaactcagcattactgatcacagggtaagtagagtttggaccaaggaatgcgtaccttaggcctttgggaagtggtttgagatcaaccttcggtgccttgagttcagaccagtcatctgaagttgggatgatcggctccgcagattcgttggcagtcaaggtcgagtggttggtcgagtatgtcctcgagtgtgcaggttgaactcgtgttaacccttcttcgctcattaccattacctctatcgctgatccattcaattcctcaaagggttctgattcttccatcgctttatgggagtctaacagcttctggtatcccaatgtttccaaatgcagaaacccatcttcaccacttttggttaaagcactgttaagatgatcttcttctacaagctcttctagtaactcatcagctaactgatccatttctttgatccaaaagagttgcccttctatggtaggcttcttcatcgcgtctttgacatcatatgtcatcctaaagtctttgccaaggtttagatcaatcttccctttcttgacatcaatcatagctcctgtagttgctaagaaaggtctccctagaatcaaagggtccttgggttcttcatccatctctaggactacaaagtcagttggtatctccacaactcaaatcctgattggtaggttttcgagcaaaccattagggatccttactgacttgtcagctaggatgagggatatattgcaggatttgtattgagtgaaccccaattttttggcgacagagtgcggcatgagactgactgatgctcctaaatcacatagacatctgttgaaagccaatggacctaaagagcatggtagagtgaatgaagcaggataactaagcttcttaggaatgatcttcttctatatgatagcactgcattcatgactcaataccaccatcccttgcacttcttgaattctctccacgatcaagtcttttagaaacttgtgagagtctaggattagcgctagagcgtcaacaagaggtatccgcaactcaacctccttaatgttcttggcaaacatagctctatacttatctgccaatgctttcttgtgacgaccaggaaatggaagttgtggtttgtaagtggagggacaaagaccttttctttgttcttgacatcaactggttttggagcagttggtgatgttgctgggaaggttggtcgagtagttggtcgagtaacatggtggagtggcagctcgagtggttgctcgagtggttgctcgagtgtctggtcgagtagctgctcgagtggttgctcgagtggtttgtcagcttgatctttactgagacttaaatcctccccatcttgatctgcactgtcctcagtgactgtctttggttcctccctagttggaagtgcttttccactacgcagagtgatagcgtgagcatattcttttggattctgaattgcttttcatggaagttggcttatctgttttggagcagaggaagatgcagaatgtccttctaagtatctgacttcggtattcaatgtttccaccttgacattcagatcattgtagctacagtccagcttgttatgtaacttagatatcttctttgccatctccatggagccagaggcttgcccgtgaagcagttgttatagcatttgtttcatgtcagcatcaagagcagcaggaccttggttttgctgaggtgcacaaccaagtggtggttgtggctggtagttcccctgaaattgctgcttgggaacaaaacctttattgtaaggaacaaaaggtttgttctgaccttgttgttgctgtggaggatacacttgatcttgtggattagcaacgttggtgctgcggtaggagaggttggggttgttggttttgaagttgttatatcctttgtagccaccctggttattgttgatgtagctgacttcttctaactagttaccctccccatcttggacttgatactgctcgtcatcaacaaggaagtgcacatgcttctgctggctaagaagaatcatgtccagattgtcattcaaagctatgatctccttcctatgtttgtcatcagagtcagttgtgtttctaacggtcctatcgcagtcctcgttgtaattaccatctgattgagcaaggttctcaaccaattcccagccttcttcaacatccttgtttttgaaattcccattgctggcggtgtccagaagcattctgatgcgtggtagaactcctctcctctgtaaagagtgctgagcagagaggctttagtgaagccatgatgagggcattggttggtataacccttgaaacgctcacatgcttcacagaagctttcaccagccttctgtaaaaagccagagatctcatttctgagtcttgcagttctggcgttccagaagaactttgataaaaaagccttcttgcaatcatcccaggtggtgattgagtcatgtggcagattcttctcccagatgtgtgctttgtcgcccaaggagaatggaaacaaacggagcttgaatccgtcttcactgacaccattgatctttgttaggttgcagagcctatcgaattcatcaaggtggtcgattggatcctccataggcagaccatggaatttgttcccctgaatcatcgagatgagaccactcttaatctcgaagttgttgttctggatagcaggaggtgcaattcctattcgctgacggtgatcacgtggtgcatctccagcaccaatgttggcaggccattttgttgatactgttcgtcacccatttcgagtggttgctgtggttcaaggttgactgtttttctcctttctctgagttcgcgagctatgcggtcgatgttggcattgaaaaggaggttctgattgcctgttgatcgagtttgcatacaactgaggtgtacctggatcaagaatacaacaagaaaaacacacagttagcaaccgaattgaaaattgaaaaagaacttgatctaagcaagtctgaaatctcaaatgtaacaaacaaacacctcacatcttttgagtatcctgcacaagttcaacaaacaggaggagacggaagagccatacatggaaaaatcatccatgaacacctctactgatattgataataggtttttaagatcaattactcctaaagcactatcatgtcgttgtagtactgaaggttgtcaatccaaatgggtgtaatgctaacaatcaagatgtgatcagaagacactaagtcaagccaagaaataacaggttttggtgtgttctagcagtcctaagtgaacatgcagaaaacagaaaatcaaacagaaacagtaaaacactcgaccaacacagctcgttgtagagcactggatgtggtcgagtgacttggtcgagtaaaaggcagtaaacaaaatagagacactcgactgcacagtctattgccagacaactaggtggtcgagtatcaggtcgagtaacaggagagaagtgcaaaaactaaacaacaggtaacaagatggagtaaacaacagtagagtaaacaataaaatcaatcagataaagaattcccgaggatggggtaattgagtagtttcgtttcctcagtttacaggtgattgacatgctcaataaattatccccagacaacaagttcattaaccaaatctaagtgccaccgcaacagagaccctcaagttaacctagtcccagactcaatcaccattgacgagagctaacctaacaggcattacgaatcaacaagttaaagccaaaacgctcactgcaaccaataccttggtacagggccacgaatctctggaattagtagttcagacatttcatcgaacaccttttgggcgcggaaatgtctgggctcaaattccagttgatcagaaagcaataggcattaagaacaactaatccagaagggatctatcaatcaatactcaaccacctagcatactgagaattctacactactctaacccatcctcataaacctattcactacttagacatcattgtagagaacataaacgttgaacatgatgaaaacatgattacaacaatgtaatagcaaaatgataacaggatgaataacagtaaatgaaatcaagaacaaatactgaatactgaatatataaagagaaatccggattacaaaaggtctagaacacaatgtctgcggaataaaactagataaaaacttgttctcgaaaatgtaaagtacatgctacttatagcaaaattttccgaaaccctaatacttaaaacgacgcagtattgggacggattaagaacagtactcgacccagatggtcgagtgagaggtcgagtgataagctggagtctttttttcttccttgtgctcgagtgtctggttgagtgcggaatggagaagactctgaagctcgccatcgagtatgtagtcgagtggtggtgatggtgaatactcgacttccaggtagatggtgtgatcgagtgatgatcagttagtggaggtgaagacactagacctcggggtcgagtgatgtgatcgagtgatggtcaggttgtggaggtgaagacactcggcctcggggtcaagtgatgtgatcgagtgtttctcgtggtggtactcggccagggagtcgagtaatgaggtgaaatggtgaaggacactactcgaacaggggatcgagtgttctgttgaggtcgtgaagtgtctactcgacctgggggtcgagtggtttgacatgatcaggtccgcttcttccaattagctcgtcaacagctccaaatcacctgaaatcaacacaaatatgcaatatgtatgcaaatctatccgaaacacgcaaagtgatgacgaatgatgagaaatggtataaaacagtgatgatatgatgctaaagtgatgacaaatggatgctcaaaatatgcaaaatacacacttatcagatataacccgaatttcattgattttatctatgttttaggtagaggattttgagtctttatgttatttctcgagtctttttagtgtcttttcaggtactctatgcaatgggacaacaatggagataaggagacattttggagcaagagctaaggaaaaggaagctaaggatgattttggattcaggaatcagcgaggagtgtcgatcgacacactcttggtgtcataccctgctagcttaatctcgacatttaactcactgtttgaacaaaagaactccgtgaattcgatcctaaaatactgcaattgatctcttattggagagagtagttctaggtaatttgaaccatatcatctaccatctcctctatcaaattcgagaaaatggaagtcatacaccgttgaaaggtagcagggtgcattacagagcccgaaaggcatacgcctgtaagcaaaggttccataaagacaacaaaaagtagttttttcttggtcatttgggtgaatggggatttaaaactatatataagacctaaaaatcgtgcatggacttctctgggccgcaactggtgtctatcgacatcaagagtgtgtcgatcaatactctcgagaggatctgaaagagaattcgtcctttagcttctttttctcagcttttgttccaaaatgtcttctcatctccattgttgtctcactccatagaatacatgaaaagactctaaaaagaatctaaacataacaaaaagactcaaaaacctatatatataaaacatagttaaaaacagtaaaaataaggttatatcagaaagcaccaatgataagcagtgagcttattagagagttgattcaacataagaaatagagagagagaaatattgcgcagatgttggtggagaagaagataagagaaggtaagaaatatttgataacttctatgtttattgctaatgaagcctacattgggaactttccttaaatacaaaaacacccaaaacacttacgttattaaaatgacaacacttcatcatagacgaaacttcttaaatagaagtgaagcctctctttccatcagagtatctctcattaggatcttccttagaatcttctccattgcgtttgccttccttccccatgttctcatccgtctccatgagaagagaatccatcatccatcatcggtctgccccaagacggggttatgagtttatcagctcacatgaagatgtccacgagagattagctattagacttctaactttcgtagttattgatgattagaagaggagaagagaatccatcatccatcatcggtgtgccccaatacggtaggagagaagccgtctttggcagcgtacgtgttgagaacgcaagaaaatattaattgatttctatattgcctgctgatatgagtcaaattaccctaatgattactctctcaaataaagtggttgttataacacttacagattgaattccacaaagttctctgatcacacaatagactaatagtttcgaatgaagcaaaaaagaaaatattataaaaataaaagacaagaaaacaatgaaaattggttgtagattcagatgattaaaacgtcgggtttaggaaaattttcaggaaatatcagaatagtagatttaacagaaaattagagttattatcgaaccattctagaactctaatcactattacagtaacccaacgttggctcttgcattactctctatccttaatagtattcatccaaactgacttgtaaatccctagaactaagcaagcattataatatggtttgataattccacataagtatttaaatcgacgctagtctgcatttaaatactaggctcatataagatagttttggcaatagatgcctttttgggtactacttattaacgtaaaatcaagttctaattaattactctagaactagcattaagaacaatcaaagatgaagaattcaacatatattatcctaacagagtttttgatctactaattcatttaaattcctaatgagaatccctaaacccaacaagagaactactcatatatgataataaaagaacaaaatcaagtttaaagtagaaatcaatgtaagaaacaagaagagaatagagtttagaaagatctatctctagaatgagctccacaggttttgtctcccaagcacaaagtagaataaagggtaaagaaaagttatcaaaagttattaagagttaggtctaaacaatgaccttaaaaatatatatataagtttctataaacgtgcatggatttcttttgaaaattaggaaaagttctgggccgaatttagaaatctttaaaacttcaataagttgtgaaattatttttccgtcagatattggtgtcaagcttatgtagcatatgttctctattttgctccagaatgctttataatctccaaatgcattccaaacatgtaaagacttgaaaaagactataaaaaattgtagaaattacaaaaagactctaaaaactagacctaaatcattggtaaaagcagtgaaaatcgaaatatatcacctgccacattagctatatctatgaactaccgttaggtattaatcctaatatatgttgataaaaaaaaaagaataactataagtaagtttaggttaagccacactatgtgtggataaatggtaattaaataactttttctttatagttttatttagaaaataaaataatgatttacttatattagatcctcttaattaaaaatgttaaaagaggctgaaaattgatttcgagaagattttgttctcattaaaaaaatgtaaattaagttgtgtattatatctaactgtgaaaatatctatgaaattaatttagttataacttataatgttaaaaacaaaattagagaatttttaaaaagtattcttagtgaacttaattttttttaataacaatgccaaataatgtaataatacatttgggaagccatttttaaaaatgtacttccccaactatattagtaggatttgcatgaccataaatatttcttgttagtaaaatttcttaagcaaataaatatattagaagcattagactttgaacaagactagtaactttacatgtaaagaagataaagattcttaaagggcacatagcgagtaataaagtaattaggacccggaagacaaacaatcgtaaaaatcaaggaataatagaattatccctttaacttgttcaagttaaccaaataattctcgctatcactttaactagctagtttgttacgtaattactgaggcctgaaaaaaaaaactactactgaggccacctctttaccgttatggttaccttccacaagttccacaagttctactaggaactaaaacattcttaaccaatgaaaacacaatggctttctctcaaccattaaaactcttgcataatcacttagttttaagataaatacttattttattccttaactatttgcaattgacaaaattatatatcaaaatttagtcaacaaatacgagttaatcgagaaatatgaaatgatttgactaaaatttaataaactcagaaaatatccaaatttctctccaaattaaaagctacgaacttagtttcttagttatccctttgaattgaaagtttcttcgttcatctaatgccattcttgtcaaaatatatgaaattcgactttaatctctatatgtctctcaatagatcatgagaaggaaacatttagagctcctaacttttaatttcaaaaataagtttaaaattttagaatatattaagtttgaatcgagttacttaacatttctttaataactaaaaaaggttgaccaaattttattaaatcaataacaaattaaggattaaatttgaacacgtgatagttaaaaaaattgtgataattacaaaatggtgagaaataaaataagcttttttcctttagctttacatgttcactttcttaacataaacaagaaaaataaaattataaaataaaaaatgataatcagttatagctcacaggaaaaaagctcacaggcactagtttcgagataactattttgaactaaaagtttttgaaaagtagatctaaacacttttttatttccttttacatcaattttcacccacctttctttacacaaaatagaagttctgagtcttctcctacctcagaaggcttttccggtgatctcaccacagatgagaccggcgtaagagacgtctcttatagtgtggtagctggggtagttttggtaacaacctctacaacccccatgtctcaagctttgacgtcttgacctgaaaggtgccttcaaacaataagttcatcatactatactcccaatcaacgctgaaagacttcatttatgataccaaccaccacaaacacaactgctctcccaaatctggtaatgtccttttacccacaactgcttgcattgagtgtttccaaggatctctaggaaactttaacagtgttacctcagtcctggttttcaaccttttaagcattttaaacctgtcaagccttattactcgttgttgtgttactacatgtacttcatcttccctaactacctctgaagtaccctaacgtaccccatctatcaaacatggataaaagaataccattttaccggaaaggtaaaggtattgcaagaggtttttcacccccaccaagaaagaggatcaaagcaccagatctggatacctctgacctcattgcagccaactcccttactttaatgggaagactcacaaaccctcaagatcaacgcctttggtctttatttcctttcctcgcaaaccgttggactctcaaaggaaaagcagtaggatctgacctggggagaggttgtttcccagttctgctttgatgaggacttgcaaaaagttttggataataggccatatcatttcaaccaatggatgataattctgcagaaatgggaaccagttatctctgacaccttcccctctatgatccgcttcttgatagaactccaaggtatacctatacattactggcaaccaaaaatgatgaaatcaattggagaagagctagaggaaattctagatctggaaatcacctctttcccagtaaaaatcagaatactcataaatggactcgaacctcttataaaggaaacggtggttgatttccatgatggaagtgaaacaattgttttactagagtataaaaatctcaaaaatcactaccaccactgcttccaactctcacatgaaaagaaaaactgtcttgggctaaaagaggagaaagaggttcctgttgttacaacaagcttccatcagaactccacagagctttcaagaaattactacactccaaaagataactttacaccccctaaaagccagcaaggagtctcctttaattccgattcttcacagacaaaacattctccattgaaaaggaagttccctgatagagagagaagatcacactctcactctgaggctagatctttcagccgcaaccacctcccctcaagagctcctccagatagatcaaatggctatcaagagagaagacctagtaaggaaccctcctaccattctacctccagaggtcactacaggtcttctcagcagaatactctccaatggaaggagaaatcccctcaaatacaagcttcccacctggaaatttcagattcctctcgcactagaaggccccctcttgcgagaaatctatctagtatggcttccctctctcctcccttacacagactgaactctcttgaagttatctcccctccaattctaatacctacaaaagaataaattatgggtgagataagagaagtcactgtccaatatactacttgtgatgatcccactgaaagtgcagcaaggaaacaaagagtattacaaggtgaggccagaaatatgatgaacaatactgctgaccaaattattgaagctgcagtagcatcttctagagaacctgtttgattatcatatgctcccatgctcagcccaatccaaaacgaggacttaccaatcctacttcaagaagtagataaactagttaaaagaggtagagggagacctccgcttgccaaatcaactggtaaaaacactctgaaacttactggagttacaagtcaaaagcgcaatcttgttcacagctctccaaaaaagactactaatccaaaatcaacccaaacacaaggaaagtctacagctggcccgagtagaccaaccccaacttccggggtatcctcttagttatctggaggtcttgcgggaaaagctctaaagtctatccctcccagtggtgtaggaccaaaagctagaattatccctgcgataaagaaaaaaacgttggattttcagaatccatcaacccaactttcttaagggctatgagcaggaactgttgtgggttggggaaccccatgacagtacaacgaataaaggagatccggaaaaagatctctccagacttactttttcttattgagacgaaaaaccccacagccacaatgcttagttcagtacaagggattgattacccctcccatctccccgtggatcctctcacaccaagtgttggtggccttgccctattttggaaaaataacttagcagtggagattattagctcatgttcccactttattgacactaaaatcaaggttaaaggatagactgtctttgctacctttctttatggtgaacctgataggtcaaaaagagttcatgtgtggctgcaactccaaggtattgctcttctcagaagatggagcatggctgatcactggtgacttcaatgacattattggcagtaatgaaaaagttgggggccttgataggccagaaagttctttctcaaacattagaccttagatcgttcatgtcttcctgcgacctctatgatcttaaacactatggaaattttctatcatggagagggaaaaggtacactcacactattatgtgtagactagacaaagcaatgacaaataacgattggatcatggcttacccctcaggccgcagtgaatatctccgcttcgagggttctgatcaacggcccttagttacttcttttgaccttgttaaaaagaaaaggaaaggcctcttcagatatgatagaagtctgaaaactaatgaggaagtctcggtgctcataaaggaagcgtggaattcagactcttatgctatgatcgaaaagcgtattcaactttgtagagtagctattattaaatggtgtaaacttcaacattctaatagcaaacaagagcttacttcccttcgtgctcaactggatgaactcatgagtaataattttgctactcaaaccgctatagattgtataaaccagaaacttcttgaggaatataagaaggaagaggaattctggaagcagcgtagtcaacaactgtggctggctcttggagataaaaacacagaatatttctatgaagctacaaaaggtagaagagcaatcaataatattgttgttattgagaatacagagggggtccctgtttttgaggaagcagacatagcaaaatccattcctgactattatcaacaaatttttacctctcaagaaggtgactgtagctctattatctctaaagctctatccccttgtataacagatgagatgaatgcaaccctcatcacaatgcctactccccaagaaatcaaacaagtattctttgctatccaccccgacaaggctccgggtcttgatggcttctctgcaagtttcttctagtcaaactgggaaacagtaagtgacaagatcatctcagaagtgcaatctttctttatattcagcttactaccacaaaaaaatcaatcacactcatattaggctcataccaaagatccctagtccacagaaagtttcagaatacatgccaatagctctttgtttggtctactacaaaatcattgctaaattgctagctaagagactccaaccaatcttacacacctgtacttttgaaaaccaatctgcctttgtgtctcagcgagccatatttgataatgttcttatcacacacgaaacccttcattatctaaagacctcaggggcgattaaatggtgcttcatggctgtcaaaacagacatgagcaaggcatatgacagattagagtgggactttataaaagcagcttttgaacgattgggttttcaccaaagctggatcagttagatcatgcaatgtgtctccacagtttcctactcttttcttcttaatggtcaagctaaggaaatggttattccacagagagacatcagacaaggagaccctctatcaccttatttgtttatcatatgtagtgaaatactctttggattatgcaacaaagctcaggctaatggcagcttacctggaataagggtctctaaaggcagtcctcgagttaatcacctcctctttgtagatgacactatgttcttctgcctctctgacccgaaaagctgtaggaagttacagcagattctacaaaagtatgaacaagcttctggtcagaaaataaaccaagagaagtcctccattactttctcctcaaaaactaaaactaaagttaaagtgcaagcaaagaatatcctatcttttcaaaaggaaggaggacaagacaaatatttgggtttacctaagctttttggaaagaagaagatggatcttttcagccaaatagttgataaagcaaaaagccctgagttggtcttcaagattcctctcaactgcgggtaaacacacaatgctgaaatcagttttatttgctatgcctacatatattatgactttcttccatcttcatagctccctctataaacgcatacagtcagcccttacccgtttttggttggatggaaatacagaaaaaaaagaaaatgagttggatttcttggaagaaaatgacaaaatcttttaggactgttggtcttggtttcagagatatcagtaccttcaataaggccctcctagcaaagatcagctggcgtctactcactaaaccctctagcctcatagcaaaggtattggtagggaaatactgcaagttttctactctacttaattgctctgtaccaaacactccttcacatgtttggctaagtatttgcttaggacgtgacctgctgaaagctcagttgggcaaattaattggttcgggagaaaccacccatatttggagaaccccatggctatctttagtttcaccactctccccaatgccaccccccccccacggaggctactcaacatatgcgagttgctgatctcttgctctcggattcctgtgattagaacaaaaaccttattagacgtatccttctatcttatgaaatagaaattttaactcttagaccaagctagttgggagcagcagatttattggcttggttaccaacaaaagatggcatatacacagcaaaatcagggtattatgaggcttattcggatacttaccccatcgttgagatcacgcctgcccccacagatgatgaatttgattgaaagactcatatttggtccctcaaaagctcaccaaaaactaaacttcttctttggaaagctggccaaaattctcttccagttggtttaaacctcctccatcgacaggttaatgactctatcaagtatcctcattgtggactagaggaatcagtggtccacatgttcttttcctgtccttttgcgtcaagactgtggaatttggctcttttcaaatcacaactcaacataaccaacagtagatctatgcaagaggaaataaagagcttcaagaaactcatatgtctccctcccacgggtattggagatggaactctcgcaccatggctattctagaccatctggacctctaggaatcacctaattttcagcaaaaaaacagatcactgtcgaagaagctcttcaaattgcaatctcacgagctaaaagagtggcaagcagctcaattgcaaaaaccacaagtgcataagcttcgactacctgttgttttaccctctgctcccacattagctgtgacttgcttctcagacgcatcatggaaagacgatggtaacgctggatttggttggtttctaaggatccacacgatattaccctcttggaaggatcagcctcaacctcctccgtcggatcacctttgatagccgaagtcatggcaactctcgccgacgttagagttgcggtcgaatcggcccaacaaaacctcttcttcgcttcagactcgatgattctagtcaaagctctcaatctgaagatccatcagaaggaacttcatggaattctacacgatatcctgcatctatcctctaattttattgtctgcacctttaattacattcttagggcacttaatcgacaagcggatctcttggcaaagaacgctctgttttctattatgtaatatctttctaattaataataattagatattttgatcaaaaaaaaaaactctttcaagcgagtctgaaattaagcaagcatatttcacctataaaattttctaaagttttaaaaaacgtaaaatagacaataaataaaattaaaaacaactaacgacagacataaatttttatagacttccaatttggaaaaatggatccaagatgaacatgtgtaaattctcacagtttacttggaaatattattatcaaaagagtgctaaaacgtttcaaatgatatttacaatatacatacatatatgtccaatggcaaatctagattttttttttgccaggggcaaaatattatatcgacttttaaagataaaaataatttattatgtactttttaatattgttactttattattgttatttatatttctaaataggttagagatgatattatatgtcgtaagttattaaaataaattaattctgggaaaatatattagttagagaatatgtataacttttcgaataacaaaaaacaaaaattttagaaataaaccaataaaatgcaacaataaaaagattttgagagaaaactaaataaataaataaagaaaaaacaaatctaaacaaattggaaattatataaaatctggaaatgagacgtttatattagaggaaaaataaacaataaaagctaaaatttagggaagttaataaaaaaaaaggaaagaaaagaataaatgaaaaaaattaaaagggcattatgggatttgattttgagtttatagggggaaagttggttcaaatttccatttaagctaacaaatctttattaaaatcaatgaaaatctagaaatttgataatttacccggggcagctgctcctcttttccctacatggatccgcccctgtatatgtctatgttactatgattataaaatttaatacaaataaggctaaattatgatagagtaagaaaacatgtaatttcgttgataggctttgttttttttaataagggttttctgcaaaaaaaaacctcgaagtcgatctcgtttgcgaatctaccatccatgtcccaactatgcaagtcaaccacatcaattttaaagtcacccgctaaataatcttccgtcatatcaatgacatggcatcgctaaaaacggtatgatttcattagttttgtgccgtttaatataacaaaaacgacatggcattgaaaaaatagatttggagataaaatagatttgggggaaaaatcgatttggggaagaacattagggtttatagagtggttcatttggaggaattcaatatggggaatgagggtttcgtgatcgatttcgattagtgtaacgcccgtgaaccggaaaattggttagagtttgtatttaaatcgtctgatttaattggtttagttaattggaaaccttagagtgtgcctataaaagaaggaaactctaaattagggctttaattagccactttcgttttataaaagagaaaaagagagagaaggagaaggagcagaatcgttagggtataggagaaatcagtttcgtcatatcaaatcgtggtcaaaggtaacgaaatttggtagagttattcccaagtcctttatcgttattctccagtttacagaattggatttggattaaaattgaatgagttatttgcagtttcgtgataaaaagaggacgagtcctcgagggtaccggcgagagtgatggccacagtgccacggttgagcagagtgtgggtttgcaggctgagtttgtggagcccggggttggggacggttttggtgccgatctagctggtgcagccggagtgggggctggtggagcaggtgtcggtgtcggtgtgcatgccgttggtgctgagagcccaagagtgatgggtaccgcaaccggaggagcccaggttccagacgttggtttggcgggcatgctgaggcaattgtttgagcggttaccatacgtggtaccagtggaggctccagttgcgccatgagtggcagaggtgcagtagagggctgcggttgctgatgaggttccatcttatttgaggatgatggagcagttgcagaggattggcagcgagtatttttttggtagtactagtcctgaggaggccgacagttggaggtcgcgggttgagtggaacttcggttcgaggagatgccctgcggactatcgggtggatctggtagtgcattttctagagggggatgtacatttatggtggcggagtatgactaccaggaggaggcaggcggatatatcttggacagatttcgtggctgagtttaatgccaagtactttccgcaggaggcgctcgaccgtataaaggagcgttttcttgagctgacacatggtgagcggtcggttcgggagtatgactgggagtttaaccaacacttggtgtatgcgggtcggggcatggaggataaccaggcccagatgaggaggttcttgaggggacttcgaccggatttaagggtgcggtgtagagtgttgtagtacgccacgaaggtggcactggtggagacggctgctgaggtagaggaggaccttcagaggcaggtggtggcagtgagtccagcggtacagccaaagaagactcagcagcaggtggcacctagcaagggcggtaagcctgagcaggggcagaagaggaagtgggatcatccttccagagctggacagggtggtcgtgcaagatgtttttcttgtgggagccttgaccacaaggtagcggattgcacgcagcgagctgagacaagagagtgctaccactgcaaggagaggggacatctcaggccgaattgtcctaaattgcagccgatggcagtggcagtagtacagccggcggtgcagcagggagtgcagcagttagcacagattgtagcggcaccacaaggctacactacgcgtgagataagcagtatcagcaacagagcgatcactggtatgatttcttagactcagacattgtgaattatttctgttgttttggaaatcattgttttgtgatgaatgttaggattcttagcacataaggtttttgtagggaccttattagtgggcggtgtagaggcccatgtgttgtttgactctggagcatcgcattgcttcattacaccggaaaaagtgcctcgcgcggcaacaaccgtggggatcctggtgagcagtttggagccgtcaaggttgcaggagggcagtttctagcggttatggggagagcgaagggtgtggatatttagattgcaggggagtcgatgccagcagatttgattatcagccctgtagagttgtatgatgttattctggaaatggattggttggatcattacagagtacatcttgactcccaccgtgggagagtttcttttgagcggctagaggggaggttggtttatcagggagtgagacgtacctcaaggagtctcgtcatctcagtagtgcaggaagagaaaatgatcgagaagggctgcgaggcttacctggtgatgatatctatgccggagtctgtggggcaggtagctgtgagcgatattcgggttgttcaggagttcgaggatgtgtttcgatcgttgcagggattaccaccatgacggtctgatcctttcacgattgagttggaaccagggacatcgccgttgtctaaggcaccctacaggatggctccagcagagatggcagagttgaagaagcagctagaggatttgttgggtaaggaattcattcgtcctagtacttcaccttggggaacgccggtgttatttgtgaagaagaaagacgggagtttctgcttatgtattgactaccgggggttgaaccgggttactgtgaaaaaacaggtaccctttgccaaggatcgatgagttgttggatcagttgaggggtgctacttgtttctctaaaatcgatttgatgtcgggttatcaccagatcccgatagcagagacagatgtttgcaagactgctttcaggacgagatatggatattttgagttcatggtcatgcctttcggtttgactaatgcacctgcagcgttcatgaggttgatgaacagcgtgttccaggagtttctggatgagtttgtgatcatctttattgatgacatcctggtgtattctaagagtcttgaggagcatgaggtttatctaaggagagtgatggagaaactgcgggagctgaagctgttcgctaagttgagcaagtgcagtttctggcagagagagatgggttttctgggtcacattgtttctgtagagggagtttcagtagatctagagaagattgaggctatcagagattggcctagaccgacgaatgccactgagatcaggaattttcttgggttggcagggtattacaggaggttcatcaaggggtttgcgagtatggcacagccgatgactaagctgaaagggaaggatgttccttttgtgtggtcaccggagtgcgagaaaagtttcgtgagtctgaaggagatgttgacgagtacaccagtgttagaattgccagagcatggaaggttattgcctatgcatcgcggtagttgaggaagcatgagggcaactatcctactcacgatttggagatggctgcggtaatctttgccttgaagatttggaggtcttatctttatggcaggaaagtgcaggtgttcacggattataagagtttgaagtacatcttcactcagccagagctgaacctgaggcagaggcgatggatggagctggtgggtgattatgatctggagatagcctaccatcatgggaaggctaatgtggttgcagacgcgttgagccgtaagcgcgtgggtgcggctacagggcagagtgttgaggccttggtgagtgagattgatgctttgcggttgtgtgctgtggcacgagagccattgggaatggaagctgtggatcgagcagatcttcagactagagttcggttggctcaggagaaggatgagggattgattgcggcttctaaggcagagggctctgagtatcagtttgcagctaatgggactattcttgtgcatgggcgagtttgtgtgcctaaggatgaggagttgcgacgagagatcttgagtgaggctcatgcgagcatgtttttcattcatccaggagcgactaagatgtaccgagacctcaagcggtactatcagtgggtcgggatgatgagggatgtagctaattgggtcgcagaatgcgatgtttgccagttagttaaggctgagcatcaggtgccgggtggcctgttggagagtttacccattcctgtgtggaagtgggattttatcacgatgaatttcgtggttgggttgcctgtgtcgcggaccaaagatgctatctgggtgatcgtggatcgtatgactaagtcagcacattttctggccattacaaaaaccgatggagcagcggtgtttgctaagaaatatgtgagcgagatcgtgaagttgcatggagtacatgtgagtattgtgtcagacagggattccaagtttacttctgcattttggagagcttttcaggcagagatgggcactaaggtgcagatgatcacggcttatcatccacagacaaatgggcaatctgagaggactattcagatgcttgaggatatgttgcggatgtgtgtcttggattggggaggtcattgggcggatcacttgagtctggtagagtttgcttataacaacagctatcaggcgagtattgggatggctccttttgaggcgttgtacgggaggccatgcaggacaccgttatgctggacccaagtggggagaggagcatatatggtgaagattatgttcaggagaccacagagaggatccaggttcctaagctgaacatgaaggaagctcaggatcgacaacggagttatgctgacaagaggaggagagagcttgagtttgaggttggggacaaagtgtatctcaagatggccatgttgcgaggtccgaacaggtctatatcagagactaagttgagtccgaggtacatgggtccgttcaggattgttgagagggtgggactagtggcatacaagttagagttgcctgatgttatgcgtgcgtttcacagggtctttcatgtgtcgatgctgaggaagtgtcttcacaaggatgatgaggtgttggctaagactacagaggatcttcagaccaacatgactttggaggcgagaccagtgagggttctcgagagcatgatcaaggaacttcggtgaaagaagattcctttgatcaaaatcttgtgggactgcgatggtgtgacagaggagacttgggagccagaggcgaggatgaaggcaaggttaaaaaagtggttcgagaagcaggttgctgcatgagtttgcctatccttggtttccagtttcagtgatgttgagtttttgagcttttgagttgttgttcttatttctctttcatttgtatttttgtttagagttgtaacgatcatgacatttgatgattaataagatgagtattttttttcttggatttgacttcaattgtcttatttaagaatgtgttgtgcggtttccaaaaatggaaagtttcccagaaaggacttgtctatttttggaaagtttgagtaaacaacctaagagagaggtgtgtttacgagatggccgggagttggtcctaaggatatcctcgaggggatatgatggatggtgaggcaaaaaggtgtcttactcgaatccatgagagagtctggagatatggtcggaagcgtttaatattgtttgctcgagggacatgagggtcccaacgactcgtgaggagcggagtatgctcctgaggtaccgctaactcgagggacttggtgtcttcagagtgcgaggggtacggtggcttcgggtgacgatccgagagcaccctttagggtgacgacccgagagcgagttttgaggtattattttttccaagtgtcgtaacttgataactttatggctgagagtgagccgacacaactcagggtttgacatttgagtggggaagataatacgtgtgatacccgagagtgacggtttatgctcgaagattgcggtctgagaatggagagtgagttgtgagcaacaatgactagtaaatcgttagtatatcgactggatagagagacctagtgggtgtgtgattggagggagtgcggaccgtagtgatggttgcacggagttcctcggagtggaagggtgaagctagattcgaagacgaatctatgttagtggaggagaattgtaacgcccgtgaaccagaaaattggttagagtttgtatttaaatcgtccggtttaattggtttggttaattggaaactctacagtgtgcctataaaagaaagaaactcgaaattagtgttttagttagccacttttcgttttataaaagataaaaagagagagaaagagcagaatcgttagggtttgggagaattcagtttcgtcatatcaaatcgtggtcaaaggtaacgaaattgggtaaagttattcccaagtcctttatcgttattctccagtttttagaattggatttggattaaaattggataagttattcgctgtttcgtgagacacattttctcagacgcgaattaggaccagcggggtttgaaactgagatcgtggtctcgtctgtttcccgatcggcacgagtttttgtgggcagcgttgtgacgtctacggctagcggttcactggagcaatttataagttaatggttagtttgtattttagggtttcgtctttgacattgttagtttctgatttttcctgtccaattgcttcaaggttgcttttggttgtggacttgttgtaggacgtttctggattgtttcagacgcaaggagagtctctcctgggttaaattgttgttagaatcaatttgttaaggtgagtgcgtgaccatgagcttatctgagcgattgggttgtatgatttgttttgtgtgatggtatgtaggtgtggtgattgtgtttttgggtgaattgttcaatgactggtttgtttatgatgtatttgtgattatacccttttaattggttgtgtgtatagctcgtagatgggaggatcgcctcactaagtatttgtgataatacttacccatctcattgtattgttgatgcaggtaaagataaagtgtgatcgtagaatcatggcaaggaagagaggatgatctaggaactcatttggtttatttttatgttttggttattagaaccggttagggttgtgttaggatttttagtcattcttggttttgttggttgaattatttatttattcataaaataacatttttgacttgcggtttaattgttactttattggttggtttaattagatatttatgggaatatttaattatgttttaaaaaacaaaaatgggtcgggttgtttcaatttggtattagagcgatcacggttataggatgtgtagaataattaattgatgaattatttttcaatgattgatgtgggatgagctagggtgttagcatactgaggattgattacggagtgtttagtcaattgtgtgttgttggagtcctagcatcatcttctctgagccttaaatgagatttcacggtaagtagtttgtgatatattcgtttattttagtttcttagccatttgttcttgagtagcgcagatggttaaaggaactggagttcgtggtcgtggtcgtggtcgtggtcgtggtcgtggtcgtggtcgtggtcgcggtagaggacgagtcctcgagggtaccggcgagagtgatggccacaatgccactattgagaagagtgtgggtttgcagcctgagtttgtggagcccggggttggagacggtcttggtgccgatatagctggtgcagccggagtgggggctggtggagcaggtgtcagtatcggtgtgcatgtcgttggtgctgagggcccaagagtgatgggtgccgcagccggaggagcccaggctctagaggttggtttggcgggcatgctgagacagttgttggagcggttaccaggcgtggtaccagtggaggctccagttgcgccacgagtggcggaggtgcagcagaggactgcggttgctgaggaggttccatcttatttgaggatgatggagcagttgcagaggattggcagcgggtatttttctggtggtactagtccagaggaggcctacagttggaggtcgcgggttgagcgtaacttcggttcgagcagatgcccggcagaaaatcgggtggatctggcagtgcattttttagagggggatgcacatttgtggtggcggagtgtgactgccaggacgaggtaggcggatatgtcttggacagattttgtggctgagtttaatgccaagtactttccgcaggaggcgctcgaccgtatggaggcgcgttttcttaagctgacacagggtgagcggtcggtttgggagtatgaccgggagtttaaccaactcttggtgtatgcgggtcggggcatggaggatgaccaggcccagatgaggaggttcttgaggggactacgactggatttgagggtgcggtgtagagtgtcgtagtacgtcacgaaggcggcactgatggagacgactgctgaggtagaggaggaccttcagaggcaggtggtggcagtgagtccagcggtacagccaaagaagacccagcagcaggtggcacctagcaagggcggcaagcctgagcaggggcagaagaggaagtgggatcatccttccggagctggacagggtggtcgtgcaagatgtttttcttgtgggagccttgaccacaaggtagtggattgcacgcagcgacctgagacgagagagtgctaccagtacaaggagaggggacatttcaggccgaattgtcctaagttgcagccgatggcagtggcagtagtacagccggcgctgcagcagggagtgcagcagttagcacagattgtagcggcaccacaaggctacactacgcgtgagataagcagtatcagcaacagagcgatcactggtatgatttcttagactcagactttgtgaattatttctgttgttttggaaatcattgttttatgatgaatgttaggattcttaacacataaggtttttgtagggactttattagtgggcggtgtagaggcccatgtgttgtttgactctggagcatcgcattgcttcattaccccggaaaaagtgcctcgcgcagcaacatccgtggggatcctggtgagcagtttggagccgtcaaggttgctggagggcagtttttagcggttatggggagagcgaaaggtgtggatatttagattgcaggggagtcgatgcctgtagatttgattatcagccctgtagagttgtatgatgttattctgggaatggattggttggatcattacagagtacatcttgactgccaccgtgggagagtttcttttgagcggccagaggggaggttggtttatcagggagtgagacctacctcaaggaattcattcgtcctagtacttcaccttgtggagcgccggtgttatttgtgaagaagaaagacggcagtttctgcttatgtattgactaccgggggttaaaccgggtcactgtgaaaaaacaggtaccctttgccaaagatcgatgagttgttggatcagttgaggggtgctacttgtttatctaaaatcgatttgacgtcgggttatcaccagatcccgatagcggaggcagatgttcgcaagactgctttcaggacgagatatggacattttgagttagggtgatgcttttcggtttgactaatgcacctgcagcgttcatgaggttgatgaacagcgtgttccaggagtttttggatgagtttgtgatcatctttattgatgacatcctggtgtattctaagagtcttgaggagcatgaggtacatctgaggagagtgatggagaaactgcgggagctgaagctgttcgctaagttgagcaagtgcagtttctggcagagagagatgggttttctgggtcacattgtttctgtagagggagtttcagtagatccaaagaagattgaggctatcagagattggcctagaccgacgaatgccactgagatcaggagttttcttgggttggcagggtattacaggagatttgtcaaagggtttgcgagtatggcacagccgatgactaagctgacagggaaggatgttccgtttgacgagtacaccattgttagcattgccagagcatggagagtcttacatagtgtatactgatgccttgagagttggtttgggttgtgttctaatgaagcgtgggaaggttattgcctatgcatcgcggcagttgaggaagcatgagggcaactatcctactcacgatttggagatggctgcggtcatctttgccttgaagatttggaggtcttatctttatcgcgggaggaggatcaaggaacttcggcgaaagaagattcctttgatcaaaatcatgtgggactgcgatggtgtgacagaggagacttgggagccagaggcgaggatgaaggcaaggttcaagaagtggttcgagaagcaggttgctgcatgagtttgcctatccttggtttccagtttcagtgatgttgagtttttgagcttttgagttgttgttcttatttgtctttcatttgtattttcgtttggagttgtaacgatcatgacatttgatgattaataagatgagtatttttttttttttggatttgacttgagttgtcttatttaagaatgtattgtgcggtttccaaaaatggaaagtttcccaaaaaggacttgtctatttttggaaagtttgagtaaacaacctaagagagaggtgtgtttacgagatggccgggagttggtcctaaggatatcctcgaggggatatgatggatggtgaggcaaaaaggtgtcttactcgaatccatgagagagtctggagatatggtcggaagcgtttaatattgtttgctcgagggacatgagggtcccaacgactcgtgaggagcggagtatgctcctgaggtaccgctaactcgagggacttggtgtcttcagagtgcgaggggtacggtggcttcgggtgacgatccgagagcaccctttagggtgacgacccgggagcgagttttgaggtattattttttccaagtgtcgtaacttgataactttgtggctgagagtgagccgacacaactcagggtttgacatttgagtggggaagataatacgtgtgatacccgagagtgacggtttatgctcgaagattgcggtctgagaatggagagtgagttgtgagcaacaatgactagtaaatcgttagtatatcgactggatagagagacctagtgggtgtgtgattggagggagtgcggaccgtagtgatggttgcacggagttcctcggagtggaagggtgaagctagattcgaagacgaatctatgttagtggaggagaattgtaacgcccgtgaaccagaaaattggttagagtttgtatttaaatcgtccggtttaattggtttggttaattggaaactctacagtgtgcctataaaagaaagaaactcgaaattagtgttttagttagccacttttcgttttataaaagataaaaagagagagaaagagcagaatcgttagggtttgggagaattcagtttcgtcatatcaaatcgtggtcaaaggtaacgaaattgggtaaagttattcccaagtcctttatcgttattctccagtttttagaattggatttggattaaaattggataagttattcgctgtttcgtgagacacattttctcagacgcgaattaggaccagcggggtttgaaactgagatcgtggtctcgtctgtttcccgatcggcacgagtttttgtgggcagcgttgtgacgtctacggctagcggttcactggagcaatttataagttaatggttagtttgtattttagggtttcgtctttgacattgttagtttctgatttttcctgtccaattgcttcaaggttgcttttggttgtggacttgttgtaggacgtttctggattgtttcagacgcaaggagagtctctcctgggttaaattgttgttagaatcaatttgttaaggtgagtgcgtgaccatgagcttatctgagcgattgggttgtatgatttgttttgtgtgatggtatgtaggtgtggtgattgtgtttttgggtgaattgttcaatgactggtttgtttatgatgtatttgtgattatacccttttaattggttgtgtgtatagctcgtagatgggaggatcgcctcactaagtatttgtgataatacttacccatctcattgtattgttgatgcaggtaaagataaagtgtgatcgtagaatcatggcaaggaagagaggatgatctaggaactcatttggtttatttttatgttttggttattagaaccggttagggttgtgttaggatttttagtcattcttggttttgttggttgaattatttatttattcataaaataacatttttgacttgcggtttaattgttattttattggttggtttaattagatatttatgggaatatttaattatgttttaaaaaacaaaaatgggtcgggttgtttcaatttggtattagagcgatcacggttataggatgtgtagaataattaattgatgaattatttttcaatgattgatgtgggatgagctagggtgttagcatactgaggattgattacggagtgtttagtcaattgtgtgttgttggagtcctagcatcatcttctctgagccttaaatgagatttcacggtaagtagtttgtgatatattcgtttattttagtttcttagccatttgttcttgagtagcgcagatggttaaaggaactggagttcgtggtcgtggtcgtggtcgtggtcgtggtcgtggtcgtggtcgtggtcgtggtcgtggtcgcggtagaggacgagtcctcgagggtaccggcgagagtgatggccacaatgccactattgagaagagtgtgggtttgcagcctgagtttgtggagcccggggttggagacggtcttggtgccgatatagctggtgcagccggagtgggggctggtggagcaggtgtcagtatcggtgtgcatgtcgttggtgctgagggcccaagagtgatgggtgccgcagccggaggagcccaggctctagaggttggtttggcgggcatgctgagacagttgttggagcggttaccaggcgtggtaccagtggaggctccagttgcgccacgagtggcggaggtgcagcagaggactgcggttgctgaggaggttccatcttatttgaggatgatggagcagttgcagaggattggcagcgggtatttttctggtggtactagtccagaggaggcctacagttggaggtcgcgggttgagcgtaacttcggttcgagcagatgcccggcagaaaatcgggtggatctggcagtgcattttttagagggggatgcacatttgtggtggcggagtgtgactgccaggacgaggtaggcggatatgtcttggacagattttgtggctgagtttaatgccaagtactttccgcaggaggcgctcgaccgtatggaggcgcgttttcttaagctgacacagggtgagcggtcggtttgggagtatgaccgggagtttaaccaactcttggtgtatgcgggtcggggcatggaggatgaccaggcccagatgaggaggttcttgaggggactacgaccggatttgagggtgcggtgtagagtgtcgtagtacgtcacgaaggcggcactgatggagacgactgctgaggtagaggaggaccttcagaggcaggtggtggcagtgagtccagcggtacagccaaagaagacccagcagcaggtggcacctagcaagggcggcaagcctgagcaggggcagaagaggaagtgggatcatccttccggagctggacagggtggtcgtgcaagatgtttttcttgtgggagccttgaccacaaggtagtggattgcacgcagcgacctgagacgagagagtgctaccagtacaaggagaggggacatttcaggccgaattgtcctaagttgcagccgatggcagtggcagtagtacagccggcgctgcagcagggagtgcagcagttagcacagattgtagcggcaccacaaggctacactacgcgtgagataagcagtatcagcaacagagcgatcactggtatgatttcttagactcagactttgtgaattatttctgttgttttggaaatcattgttttgtgatgaatgttaggattcttaacacataaggtttttgtagggactttattagtgggcggtgtagaggcccatgtgttgtttgactctggagcatcgcattgcttcattaccccggaaaaagtgcctcgcgcagcaacatccgtggagatcctggtgagcagtttggagccgtcaaggttgctggagggcagtttttagcggttatggggagagcgaaaggtgtggatatttagattgcaggggagtcgatgcctgtagatttgattatcagccctgtagagttgtatgatgttattctgggaatggattggttggatcattacagagtacatcttgactgccaccgtgggagagtttcttttgagcggccagaggggaggttggtttatcagggagtgagacctacctcaaggaattcattcgtcctagtacttcaccttgtggagcgccggtgttatttgtgaagaagaaagacggcagtttctgcttatgtattgactaccgggggttaaaccgggtcactgtgaaaaaacaggtaccctttgccaaggatcgatgagttgttggatcagttgaggggtgctacttgtttatctaaaatcgatttgacgtcgggttatcaccagatcccgatagcggaggcagatgttcgcaagactgctttcaggacgagatatggacattttgagttagggtgatgcttttcggtttgactaatgcacctgcagcgttcatgaggttgatgaacagcgtgttccaggagtttttggatgagtttgtgatcatctttattgatgacatcctggtgtattctaagagtcttgaggagcatgaggtacatctgaggagagtgatggagaaactgcgggagctgaagctgttcgctaagttgagcaagtgcagtttctggcagagagagatgggttttctgggtcacattgtttctgtagagggagtttcagtagatccaaagaagattgaggctatcagagattggcctagaccgacgaatgccactgagatcaggagttttcttgggttggcagggtattacaggagattcgtcaaagggtttgcgagtatggcacagccgatgactaagctgacagggaaggatgttccgtttgacgagtacaccattgttagcattgccagagcatggagagtcttacatagtgtatactgatgccttgagagttggtttgggttgtgttctgatgaagcgtgggaaggttattgcctatgcatcgcggcagttgaggaagcatgagggcaactatcctactcacgatttggagatggctgcggtcatctttgccttgaagatttggaggtcttatctttatcgcgggaagaggatcaaggaacttcggcgaaagaagattcctttgatcaaaatcatgtgggactgcgatggtgtgacagaggagacttgggagccagaggcgaggatgaaggcaaggttcaagaagtggttcgagaagcaggttgctgcatgagtttgcctatccttggtttccagtttcagtgatgttgagtttttgagcttttgagttgttgttcttatttgtctttcatttgtattttcgtttggagttgtaacgatcatgacatttgatgattaataagatgagtatttttttttttttggatttgacttgagttgtcttatttaagaatgtattgtgcggtttccgaaaatggaaagtttcccaaaaaggacttgtctatttttggaaaatttgagtaaacaacctaagagagaggcgtgtttacgagatggccgggagttggtcctaaggatatcctcgaggggatatgatggatggtgaggcaaaaaggtgtcttactcgaatccatgagagagtctggagatatggtcggaagcgtttagtattgtttgctcgagggacatgagggtcccaacgactcgtgaggagcggagtatgctcctgaggtaccgctaactcgagggacttggtgtcttcagagtgcgaggggtacggtggcttcgggtgacgatccgagagcatgctttagggtgacgactcgagagcgagttttgaggtattatttattccaagtgtcgtagctcgatgactttgtggctgagagtgagccgacacaactcagggtttgacatttgagtggggaagataatacgtgtgatacccgagataccgtaggcctaggcctgagagtgacgatttatgctcgaagattgcagtcttagagtggagagtgagttgtgagcaacaatgactagtaaatcgtgagtatatcgactggatagagagacctagagggggtctgattggagggagtgcggaccgtagtgatggttgcacggagttcctcggagtggaagggtgaacctagattcgaagacgaatctatgttagtggaggagaattgtaacgcccgtgaaccggaaaattggttaaagtttgtatttaaatcgtccggtttaattggtttggttaattggaaactctagagtatgcctataaaagacggaaactcgaaattagggctttagttagccacttttcgttttataaaagagaaaaagagagcgaaggagaaggagcagaatcgttagggtttgggagaattcagtttcgtcatatcaaatcgtggtcaaaggtaacgaaatttggtaaagttattctcaagtcatttatcgttattctccagtttaaagaattggatttggattaaaattggatgagttattcgcagtttcgtgagacgcgaattaggaccagcggggtttgaaactgagatcgtggtctcgtctgtttcccgatcggcacgagtttttgtgggcagcgttgtgacgtctacggctagcggttcactggagcgatttataagttaacggttagtttgtagtttagggtttcgtctttgagactgctagtttctgatttttcctgtccaattgcttcaaggttgcttttggttgtgtacttgttataggacgtttctggactatttcagacgcaaggagagtctctcatgggttaaattgttgttagaatcaatttgttaaggtgagtgcgtgaccatgagcttatctgaacgattgggttgtatgatttgttttgtgtgatggtatgtaggtgtggtgattgtgtttttgggtgaattgttcaatgactggtttgtttatgatgtatttgtgattatacccttttaattgcttgtgtatatagctcgtagatgggaggatcgcctcactaagtgtttgtgataatacttacccatctcattgtactgttgatgcaggtaaagataaagtgtgatcgtggaatcatggcaaggaagagaggatgatctaggaactcgtttggtttatttttatgtgttggttattggaaccggttagggttgtgttaggatttttagtcattcttggttttgttggttgaattatttatttattcataaaataacatttttgacttgcggtttaattgttactttattggttggtttaattagatatttatgggaatatttaattatgtttaaaaaaaaatgggtcgggttgtttcaattagaaagtggttcgagtggggttggagagtggttcgattgggattgatgagtggatcgatcaggattcactttgattgggattcatttcgcttgggatttctttcactcacttcgatagcgaggaagtgttaaaggagcctgttcatttcggtgttggagtaggcgccttaaccttgtatgttatccgagaagatgatccgtacttaggtcgacttgtagatagtaatctcggttacttagcagattaagattatgatggtgagttagtcattgctaatgaaggtgatgaaggtgctaatccaaaagatgaaaataaaaaataaagagcaaaatggtgacatcagcaaagagagtgatggtgacgatggtggcaatcaagttgttgatgagagcaagtatccgaaatttagtattggtgatgagtacaacacaattgagtcttttaaggatgctattaacaagtattcagtaaagaagaggagggacattaaatatgataagtcggatagcaagcgtgttgtagctatttgttcagcgaagaactgtccttggaggatttctgcatctataaataccagcagtagtatagtggttattagagctttgaatgatgaatatgattgcacttggcaaggtaaagtgtcacttctctctaatgctcgcattgctgatctttatcttgaagagttcagacttaatccggatttctcatcaactcagttgcagaataagctt

SEQ ID NO: 211 - DNA, 76713 bp, Arabidopsis thaliana
aagcttcatgcaatctactatgcaagtagaactcttgatgatgctcaaaggaattatgcaactatagagaaggagttgttagctgtggtgtttgctttcggaaaattcagatcttatctcgttggatccaaggttattgttcacacagatcatgctgccttgaagtatttaatgcaaaagaaggatgctaagccaagacttttgatatggattttgcttcttcaagaatttgacatagaagttagagataagaaaggagttgagaatggtgtagctgatcatttgtcacgcattaggatcgatgatgatgtccctataaatgatttcttgcctgaagagaacatatacatgattgatacagttgaagacgatgtctacaaacatgacaggttgcaggatcgtgcgtaagtgtcgatcgacactcccattatgtcgatcgacactcacatttcagaggaagttgatattcgtagttgcgcgatggtgtcgatcgacacccttgcacctgtcgatcgacacccttctgaatcgacaagaaaatggtcatcaactgagaattgcgccgtcacagcggtcgaaaaagattatccatggtatgctgacattgttaattacctagctgcagatgtggagcctgataatttcacagattataacaagaagagattcctaagagagattaggcgatatcaatgggatgagccttatctctataagcatagttatgatggaatttacaggagatgcattgctgcaacagaggttccttctatactatcacattgtcacagctctagctatggtggtcattttgcaactttcaaaacagtatccaaagttcttcaagcagacttttggtggcctacaatgtttcgggatactcagaagttcatatcacaatgtgacccttgtcagagaaggggaaagatcagcaagcgtaatgagatgcctccaaattttagactcgaagtcgaagtcttcgatcgctggggtatagatttcatgggaccattcccaccttccaacaagaatctctacatcctagtagatgtggattatgtctccaaatgggtagaagctatagctagtctaaagaacgattcagcggttgtcatgaaactcttcaaatctatcatcttccctcgttttggagtgccacgcatagtcattagtgatggagataagcatttcattaacaagattcttgagaaattgcttttacaatatggagtccagcatcgggttgctaccccctaccatccacaaacaagcggccaagttgaagtttctaacagacaaatcaaagagattcttgagaaaacagtgggtaaagcgaaaaaggagtggtcctacaagttatatgatgcactgtgggcctacaagacagctttcaaaactccgcttggtaccacaccttttcatcttttatatggtaaagcttgtcatcttccggtggaattagagcacaaagcagcttgggcagtcaagatgatgaatttcgacatcaaatcagctggagaaaggtgacttattcagttgagtgagcttgatgaaatacgaattcacgcttatgacaactcgaagctctacaaggaacgaacaaaagcctaccacgacaagaagatccttactcggacctttgagcctaatgaccaggtacttctttatgattctagattgacattatttcctggcaaattgtcttctcgttggacaggtccctacatagtccactcggttaggccatatggaacaatcattctcaaaaacaacaatgacaaatcatttgctgtgaatggacagagagtcaaacactactgggctgaagctgagattccagtagaaaagcctttggatcttcaggatccacctgttgattaagcaactacaaagtcaagctattgactataaataagcgcttagtgggaggcaacccactggtaagtatttctcctttttattcatttcattcatttgatttctaaccaaaaacgcgatggtctcattttccaggtaagtcgttttaacctaaaacttcatcttcttcatttcatttttctcaaaaccgccgaattcactaaaacctccatagatccttcgattcttcaccatttctcgtgatttcaggctcttaactcaatacaatctcaccctctatcttctccaagtgtcaattccattgatctgcaagatgacatgccagaaaaagaaggctaggaagagcgtcggactttcctcctcctccgccgtccctccacaccgccggtcacagcccttcccaaccggaatccaaaactgcagcccctcaacctcctattcatcgatttccatggccaaagcatgcaaaagagagaattccttctcaaagggtttgggagaaagatatcaacaaggaattcactaaaggtgactatatcaatcgcccttttctccagattgggatgattatgatactttgttctataatacctggatgaatgtagaaattttgcctactcgatttgcggatttcggtttgatgcagtgtttgtagatagagaaatcagttttaggactgctagatgacataggtttgggaaccatctgttgtaggcagtatgatttgtatcctgagctgattaaacaattcatggcctctgttagggtttcttatttgcatgacaggaaacgcaacgctcaggaaggaactcttatcttcttcattcgcggtgttagatacagtttaccactacgagatttgtgtgacatatatgggtttgacgatgatctcactggagtttccctgcctggtcagtttaaggattctcagattttctggagcaggtttggtaatggaatctatgattccaaggacgcagttcactcagagatccgccaccctattctgcgatatttggttaggcttattagtagcacactgttgtgcaagatggagcctggcaagatgagactatctgagttattattgctctatcacgctcttcatgacttatttcctgacagccttggatttgagcaggttgaccgtaatgtcaactttggtgttgtgttcgctcatcacttggtttcttttaagatcaagccctttacaggtagaggacacaaatctgagagagttggcagtcttctcactcccatattcgagcatttttgcatcagctttgagggcgtagaagtcaacaccacgcgtttcactatggatgagacttacctaaagaactctcattggcttaaaggcaacctactatggtgcttcagagatgatacaggtcagcacatgattcagttacctcagcctgcacttacagagattacaggagagcatgaggagataggctttcaccctgatccctcccttctgcatgtcgcaccacgcaccaggcgacagagaggttcaacttcaggatctgcacctacacagaccaaggacgagttcattgaccctgctgggggtccgagagttggatcttcctcatccgctcttccatatcaactgccttctcttccacccatcccgatggagccatagatctttcagcagtacatcgtcgacagtttcaggagcgtctggaacgccatagctacactttctcgttcggttgtgttgccctcagtcgtcgtcgtcgtcgctctcccgcacccaccttcggcttagagcataaggactagccatcctccttatcgtgttttattttctgactttgtttctgctttatttcagactattggttatttgttttgaaacttgtagcacttatttttttatgctttgttggaactattgatgtgtgttttagtgatttaacagtctaactggaggatccatgtgaaaacactaaccaaggctctacaacaatgagcataattcacaaagcaatgcgaaacgaccagagtgtcgatcgacaccatcatggtatcgatcgacaccactctcaggtggcaactcacattttctaactttttaacttttgactatttctctttcgattcctctagcttaataactctggggacagtgttatctaagtctgggggagtcagttactaacttcatcttttcttttcttatgagtcagttgtgtcattttaacttagatagtcattttagtgagtcaaaactttcgtctgaaattatgatctatctctcgagtttattgcctgaattgtttaagtactgcagattcaaatcaatccgactaataaaaaatccagaaggccaatcaacaaacttaaggacatccattcctaacataatccacaaaggctggagctaatctcagtgctcttccttttacctcatcaaaatggttagtgctcataggacttgactccttattcatacctgataaatcgactaatgtgtcaaaaagaaagtgtttctctcccaaaaaaaaaaatatataataataataaataacgagagattgagaagactttcagatagtgtataggggtaggaatatttcctatgaccccattattatacattatttggaacgatcaattacaaaggttggaaaaatgccgagggtgtcgatccaatatgcgagttccctttgtttacactctaaaaagaataagtatggggagagaaagaacaccaaagaaaaaatatatataaaagaatggtcgatttatcatggtctagtacatgaatgagtctagaaggttcgtaagcattcacttgattgatgagacccggcgatgatagcatagtggatatagttgagtgctttggtatggaatctaggatgttgtgtgggctagcggagaattacatggtggtcaagatttgattagaactgtttagtgcatggatttggtttgtatgatcaaggtaataaaccagaaagattgggagtttctatgtttttgaaacctctttcacagattcaaccttttgttttgcttgagggccagcaaaagctaagtcagggggagttgatatgttccggtttttactgatttctaacacagtttcagaatcgtttttagagtctttctagtctttttcgtacgttttgagttatttcaggtacactcacacatctgggaactatggagcacaataaggaattttggaagcttttcagcaataagatcttgaaggacgtttttcagaaactaatgtcgatcgacactctttttcgctgccaagagaatattcgttttccaaccaagtctttgagaagccctgaagtcttacttatttgcaaaataatccctgcacgtttttagggttatatacctaattgtttggtcattgttagacccagtttttgttcttgagctttttttacactttagagaaaagaatccaatccctaaagagaggattctgaactcctttgctattattcttaattcatcaatgaaaattattcagattatgatttgtgtttatattgtcatgtctgagtaatcaccttgttgggtctagggagtttcaatagggatttagatggattagtagatcgaaaaccccttaggattattcttagagttcttcatcttgattattcttaatagtagttttagattgatcacctagaacttgatattaaataataggtattcccgccataggtatttgttatttgaaccatcatagatgagcctaagcatttaagaaagaacaggtaggctcatagaagggctctggtttagatactaggtgaactaatcaagcttattaacaatgcatgctttagcataggatttctcggcttctccggttatcttagttgtaagtatagagagtttcgcggaacgccaccggttactctagaattatagtttgagtttgagaacggtgcgataacaatcttgatattagctagatctacaatttatctatctcccgagacaattccttagacctgacgcttaatcacttgaatctacaactcatttacttgcttatttgttttaaatattcaattacttcatttagcttattaaacaacatcataagtctattgtgtgaacatcgagagcttagtggaattcgacccttaagtgctaacggcgatctcttatttgagggagtaagcttaaggcaatttgagctatatcatataccaacagcagaatccaccacaagggttcactcaacaaccacaacaagtcccagcagctcaagatcctgaaattaagcaactcattcaaaagatcatccaaggacaagctactggagccatggcttttgacaagaagatagctgaattacacaacaagatcgattgttcttacaacgatctaaatgtcaaattcgaatctttgaattccaaaatcaagtatgtggagagtcaatttgcatcaacctctactctgaagcatcctcaactacttccagggaaagcagtccagaatcctaaggactatgctactgcaaatgctatcaccatccaccaagaagatgagtctccaccaagtcatcagactcccaatattgaggacagtatgattcaagaaggggggggggattcaactcaaattgctgcacctgccacccaacaattcatctggactacaaagcacacacctttgctgaatactcactattcttgaaaaagttcaaaattgaaaaaatcaagaaggatcagaatcaagagatgattagcagtgcttccacccaagaaacatacaagaagaaggtcatccaagaaaagcttgatgatcctggttcattcactctgccatgctctctaggaccattgacattcaataggtgcctttgtgatttgggagcatctgttagccttatgcctctctctacagctaaaaggctagggatcatggaattcaagttctgcaacttagctttacttttagttgatggttctgttgcacatcctcatggtttaatagaaaatctgcctgtcaagattggaaatgttgagatacctacagattttgtggtatctgcctgtcaagattgaaaatgttgagatacctaatcgagcacctgctgagttacagaggatgagctaagggacttaagaaaccaggaagaatggttgtgggaggagttgtgaccccaattctgagagcatgcaatgtacctctacattcaaagctgattcctccaagatggattgatatgcaacaccttatcaattccaagagtttttggtcgcagaagacgaatggcatatatatgtataggttcgatcaccccacagaaggacaatctatttttctcctcccaaaccccgcttccacttcaataagagatggtggcaacattgagttttgcccaccaatggagaacctctatacttcaggtgatgaagctataccgatggaaggagtgaatgatgatgaggctccaatccatcattcagataatgaggcagaacctatggacgtgtcttacgcaacacaacagttttacttcgaggagtactccgcaccgaggcaaagtaaagactcaaaggaaattcgcaagcgccttggtttcctccaaagctggtgtaagttccacgacaaaggctctcgcggcactcaacaagaagtttaacaatctccaagtcaagatcagctgttcttccttaactacggcaataccacaaaacatgccttttgggagaagaggatccactcgtcacgaacctatgcatttcgatccgccttcaccaccaagacagtcttcatatgagccgagggaacaccatgttgcaccttcaccaccaaggcaatcatcgttcgaacctagagaaaaggaaaataggagcaagttgaaaaagtgaataagaacaaggaaatcagatgctggagcaagccactctaccgcacgacttgaggagccactcgattaacaacccgagcaaagggtcgagcatccagctaatccaagttcagcacaacccgttccttggagttacacaaaggagagtatggataatttcatctcctcctagttcacctgatcactgaggtatcaccacctcaaccattgtatataccatagcatattttttatttttctttgtgtgttttgtgttttggtcttgaattctttctcagatttttattatacaagggactatgtaatttaagtttgggggagggttcaagacatgtttaacatagtgttctcttttcttatttcaaattttgcatcatctaaggcatagaaaaaccataaaaaaatcgaaattttttcagaaaatgatttcatcaaaaacagtgtgtcatgtagattgcattttattttaggattgtatatagtgtgcttgcatttaggattgctcatttgcataggggataatgatgattttaaaccgataagcatgttttgattcaatgaagtaagttcaatgcccagattgttagttctctgttgcataaccgattgtatctctgaagtaagactacaccctgctttgaatttgtaacttgactatactactttgattcgaaactcgtttatctgatgacattccctatctattagaacctaaattgaatttgcaattatcaagtctatgcattgtttgtgaactcgtggctaccatatacatacttagattatcttattcatttcaccaccctctggtaatccaagtagctgtgtctcatttttagagcagtttcccatacccttagcctagccttatttcaagccaaagatcatttatgggtgattgtgaggtctttttcgattgagcttggtataacgtgttaggtatgagccgacaagagcagtctttcatgtagaccttgcccacgctttttgggttagccaggactaggtggagacttgtatttgggaatgggatagtgtatggattgaatgggaatgagaatgagaatgaaaaaaaaagaaaaaaaaaagagagtaagagtttagagttcttaagggggatacaaaagtgttagtctagtaaagggtttgaaattcaaagaagttaggcattgtgattcaaagaaaagggtaaaacgccctatatgctaagattagaaaaaaagccttaagtttgtcaaagtataaaaccaaacccgctagactcttaaatcgtttcaaagagaaccccttagaatttgaaccaaaaagggagaaagaatgagaaaaaggatagagttaggacatctataggaatgggatcatcttctgagctatcatactatatcattgggtaaatgggagtctgttcttatatgtgtccattggcttttacctttagcattctactgaagctcaatcttttctttgagagtctcctgttactcgatcaaaccattagaggaaccatttttgtctcttagcctaagcctgaaaccaagtgagttcataaccattgcattgcttgatccactgtttgtgcttaatgaatgttaaagggaattggttgatgtgaatgcttgaatagattaaggcaagttgttaggttgcattgtgacgagtatggctaaagtttttaagtaagagtctatcaccttgcaacctaaaattagctacctggacattgagcttacccattttatattcatgcttcggtttttgaatccccactttcaaacctctccttcaacttaagattttttgtttgcttgagggcaagcaagagataagtttggaggagttgataacactgtattttactcattttaggtgtatgtttatcatcatttagttgtgcatttgctcattgtatcatatcattttgcaccattttagcttattttgcatacttaggcatctaggatcatcttgcatacgtatcgcatgttttggtgtgttttcaagtgcagaaggagctaaaaaggactctacttgatccattcactcgatccaggcagctacagaagaggcatcaattcactcgacccctttactcgatcaaggtagcctcagatgaagcagctgattgatctactcgcccctcctactcgatcctctacttgacccatttactcgatcaagggtgacaaactctacaagacttgttgagctatcaaagcgtcttcggatcctcctcattctccactcaactagacatctgagcatacggataggagaggaagaagcatctactcaaccaattgatcactcggagcatagacacaaaggcgcaaactttgaagcaccctccttactcgatccccaagatcgagcattcgaccaaaccgcctgaagtctcttgtcttctagtgaatctagggtttcaacattttactataaatatatcatttggggtttgtgcaaaggatccagcttttatcctttagtttttctttgtgtttatgaatcttcaaaacttaattactcttaatctatttcgtttttgcatttacttgtttaagtaaagttgtttagcttgtttagatttacattttggtatgatttcagtaatttctgggtttgtgttcttgagaatgttgcttgagtagtgattagggttcttgaggatggattagattagggtattctctagtttagttaggtggttaagattaagttagaacccttctggattcgcttggcccctatgcggttttcgctggctaatgtggaaattcgatcatagacgtctagagtccaaaagacgttcaaatggatgtcttatctacgagttccagagatttgtagatccgaccaagacattggcttgtatgcttattggctttggtagattgtttcttaatccctgctctgctatgtttcatcaacgacagttgagattaggaagtggtagagttatgggaatctctatcacgacagtggattgacccggtttttgaatctatcgtcaagggtatctacctctcacctattagccatctgatgaaccctagagttgcccttatcaatgaatccatccttaggacttctattagatttagttgtatcccctgttgattgcacttttatttacctgttatttgtatcccctatttgtatcccctgttgattgcattttgattatgcctgttggttctactcgacccaatgatcgagtagggcttttaagttctcatttttacttgtttgaatcctgacctaggattgttactagaaacccaccatcattataatctggcttgacttagttgtttctgtacacgtcttgattgctagcattaacagtgaactggattgaaaccccctatagctgcattgacatgttagtatttgtaggggaattgaactgaaccacacccttcagcatataagtaggcctaaaaaacctgattattaggaactcgcatactggatcaacatcctcggcttatttacaacctttgtaattgatcattcctaataatgtataataatggggtcatagtaaacatttctacccctataccctaccgaaatcatatcaatctcttgctttctttctttttttaataaggggagagaaatacttttttttttttttctcattgctctcaatatcatgtatgaacaaggaaacaaattctattaacactaaccgtttgatgaggtaaaaggaagatcagtgagattagctccggccttaatggattgtgttggaaaccaggatatcctcaagtttgttggtttgccatctggattttccaatagtcgaattgagtcgcacctgtagcattaatcaaccaggcaataatctaaagaatagagatcataattcctaacaaattttaactcaataaaacgactcaaaaataagaaaaactaggatttcacctgtggtacaccacggggcaaatgttttatttatatacatatataataatattaaattttattatttttaatttattaaaattatataattttatattaatgttgtaactaaaaaaattggtgatgataaaataagaaataatattttaacatgtgttatatcaatctaaaccgtcttgctatatttcagatcaatccaaactcgtcccgctatttaaaaataataattgtttttgactttaatgtgatgacattttttgtaaattcatactttataactcaaaagtactttaaaaaggtacttcaatttttttaatatatataatgctatttttttgaaaattattatatataaatacttagtttaatcataatttgggattgatatacttgtgttttttgactaacttttattattattttaatagcctaaatttgggcattttgttaacattatttgagtcaccaatatcagtttaatacatgtccaatttatttttaccaaaaaagaacaaaatttcataaaaatatggaaagaaatttttagggagtgataattatattgtacaattgcaaatttaaaacgaaaaaatgtggattgggaaaaaattattgtttcaaattttaaaatgttatgtaattaattttttttacagaaaatattgacgcatatattgtaatataaggtttaattaatttattaactgaaaataaatgatttaaaaggaacaattattgttattaatgctaattgatccttaaaaggaatgttagtgtgtagtatattgtagtttagatttagaaagatttaaattatttttgtgattttttcttgtagtttcctaaattttagtaacaaaatcgattttatatttagatttaaaaataaatttgttaaaacattcaatgtcagtggcatgacattgtaaataagtttcaacttgaggaattatttggtaaaatagttgcaaaaatgtatatgtagataagagtaagaataagactcaaaaaagaaaaacgtagttagtaactgcctcccctagacttaaacgtcactgtccctagtggcattcaaatccggagtaagcgagaaaaataaaaaaataataaaaaaataaaaggaaatgaaaaacaaaatcataccagtgagttgtcacccactaagcgcttgtttatagtcaataacttgactttgatggagtattgggatcaggtggatcagaaggtggcagtaaatattacggagaaagacctctcatcatccatgctggcgtataagcagttaacgcatgaagtctatctagaaagagaggagcatcagaagggtgggactcaggtatgggtggaatactcctttttcctgcacaatcatcaaaagaatgaacaagcgctcgacgagaaactcgtggcttgcttaaccgtaaaacagtttttggaaatttgaaactcttattgatgacatctagtggtttaggagaaggagatgactacctttgctgtttcggaggtggatcaaggagtagggatgcaatgggtgacgtgactatagtgcctggaatatcagcagtgatttgaactcgcaaagcatcttcagtagacagctctagttcagcccgtttggggtgtcgatcgatacatgtgatggtgtcgatcgacaccatctctgtagatcgattctcagcaacgaatctgaaactggcttcatgtggacgcttgttgttgttgagtaccttgtcaggatcaataactgtatctataaaggtttctacagagaatgcttgaccaacgatagtgggtagcttctacggaatcctacttgcgactatcactacaagaaaacaggtgatttgcgaggaaaatttgcggtggaacaaatcactcacaatttgctacggatttgcgagacgtttgcaacggaagaaggcaacctcgctactccctcgcaaaatttgcgacgaactcttccctcgcaaatttgcgagacgattgcgaggaatctgcgtggaaagcatcattcctcacaaaaacgtcgcaaatttgcgagagatttacgggtaacatgtctccctcgcaaattgcgacgaatttgcaacgtctgtttattctgtcataacttttgcgacgaagtagcgagtcttgtccagttaggtgagcacgttttaaattatcttaaaggtctggttggtaggtgggcttccctcgcaaatttctcgcaaaatcctagcaaatccctcgcaaatgccttgcaattctctcgcatatttttttgggacatctataaatagccaatgtaatgtctaagaaatcataactcaaaccaaaacatttacttacaaacaaaaaaaaaattcaaaaaaaaaaacttattacaaaaataagaatgtcttgggcggagagcatgagatttacacattacgaagttggatgtataatcatagaaatcaagcgaccggggaggtgacgatagagtattacgacgaactgcgcggtttcatgtatcaaacgacaaacgaaccatttgctcgtgagaacggtacaatactctgtccatgtcgtaagtgtctcaatgagaaatatttggaatttaatgtagtgaagaagcatctttataatagaggatttatgccaaactactatgtatggttacgtcatggagatgttgtagagatagcgcacgaactagtaatacaaattatggtgtcgagcaatctagtaattttgataatgatgcgaattatggtcagcaagtacctgatcaatttggttatgggtataaccaggaaaatagatttcatgatatggttacgaatgcatttcatgaaactattgcttcatttcctgaaaatattagtgaagaaccaaacgtagatgctcaacacttttacgatatgttagatgctgcaaatcaaccaatttacgagggatgtagagaaggaaattctaagttatctttggcatctaggatgatgactattaaagctgataataacttaagtgaaaagtgtatggattcatgggcagaattaattaaggaatatttgccaccggataatatatcggctgagagttattatgaaatacagaagttggtttcgagtcatggattaccatcagaaatgattgatgtatgcattgactattgcatgattttctggggagatgatgtaaatctgcaggaatgtcggttttgcgggaagccgagataccagactactggcggaaggacgcgagtgccatataaacggatgtggtacttgccaataactgatagattgaaacgcttatatcaatcggaaagaactgcggcaaaaatgagatggcatgctcaacatacaactgcagacggagaaataacgcacccatcagatgcaaaggcgtggaaacactttcaaacggtatatcctgactttgctaacgagtgtaggaatgtgtatcttggcttatgcacagatggatttagtccattcggtttgtgtgggcgacaatattctctttggcctgttatcttgaccccatacaaacttcctccagatatgtgcatgcaaagcgaatttatgttcttaagtattttagtgcctgggccaaagcatccgaaacgagcgcttgatgtcttcttgcaaccgctgattcatgaactcaagaagttgtggtatgaaggtgttcatacatttgattactcgagcaaacaaaatttcaatatgcgggcaatgctaatgtggacgattagtgacttcccggcatatagaatgttatcggggtggacaatgcatggaagattatatgtccctactgtatgggtcgtacaaatgcgtttcaactaaagaaagacagaaaaccgtgttggtttaattgtcaccgtcggtttcttcccctgcatcatccgtatcggaggaacaaaaaactttttaggaagaataaaatagttcgtcttcttccgccatcttatgtttctggaactgatttgtttgaacagatcgattattatggtgctcaggaaacctgcaaacgtgggggtaattggcacaccacggcgaatatgcctgacgaatatggaagcactcacaattggtacaaacaaagtatcttttggcaactcccatattggaaggatctcctcttgcggcataacctttacgtgatgcacatcgagaaaaactttttcgataatatcatgaatacgcttttgaatttgcagggcaaaacaaaagatactttgaaatcaaggttggacttggcggaaatatgcagcaaacctgagttgcatgttacacgagatgggaaattaccggtttcaaaattccgcttgtctaatgaagcaaagaaggcgttgttcgagtgggttgttgctgaagtgaagttcccagatggatacgtgtcaaaattttcaagatgcgtagagcaaggccaaaagttttctggtatgaaaagtcatgattgccacgtattcatgcaacgattactgccatttgtattagtagagttgctaccgacaaatattcatgaggcaattgcaggtaatatatatatatatatatatatatctatatttattatatatatacatactatatgttttttttactcaattattacttggtcattattaacttacattaattaaatacatgataggtatcggagtatttttcaaggacctatgtacaagaacactgacaacagataccatagaacaattagacaagaatatcccagtgttgctctgtaacttggaaaaattattttcccctgccttttttgacgtgatggaacatttgccaattcatcttccacatgaagttgctcttggtgggccagtacaattcagatggatgtatccttttgagcgattcatgaaatctcttaaaggaaaggcaaaaaatcttgctagagttgaggggtcgatagtcgcaggaagtttaaccgaggaaacgtctcacttcacgtcgtattactttagtccaagcgttagaaccaaaaagactcgtcctcgatgctatgacgatggaggtgttgcacctacatataacgttcctgatgttccagatacctttgcccaaataggtagactcgcagggaagttgaaagaagtttggtgggacgaccatacgctttctcgagcagctcacaattacatactccgaaatgttgattacattcaaaaatttgaaaggtataaagcaacctagttttattcataatatttatatttaataattagtgtgaaattaattaaggaagctaattaagcagctacgttgtaatttgtaggttatttgattcacaaatctgtgaagcatgtcctgaattagaagaaaaagagtatgaaacttacaaagatcgtgattttgctagatagttaaaatactatgttagtataataatatttcaaaaattcgattacttatttactttaaaaaaatgataaatttaatattttctatgtgtaggttacaaacggatgtggaaacgaaccattaccactttggttgcatgagctcgttcaagaaccaagatctaagatcacaacagctccgatgtacttcactcgcggctatacttttcagacgtatccatatggaagtcgaaggacaactgcaaattatggaatccatgtcgaaggtgaaactgagttttatgggattgtatagcaaattctagaagtcgaatatccaggacttttgaatttgaaatgcgtccttttcaagtgtgattggtttgatctggtgatcgatcgtggggtacggaaaaataacttaggtgtggtcgatgtcaatgcaaacaagacttatgccaagttcgaaccatttatcctagcatcacaagcagggcaagtaagctttctatcttacccgcgtgtaaggtcacagcgtgaagtgtggttatccgttattaaagtgaatcccaggggccgtatagtcggcttagttgatgatgttgtgatgcaacaagaaagcattagagaagtttccattccagacataacaacagaagatgttatccacattgacctacaaaacagagagttagaagacatcaccacagacggttccgaagaagaagaacaagaagatgaattcggcaaatctgatgaaaacgttgagtcagaaaatgattataatgattcagaaaaatgaatcagaataattgttgtgttttatattgtctactttcattatttttaccaagtataataaataaattcagaatttttttttaataatattgaaagttataattatataattttaaagtttattattataatttagcattgtgttgttcttataattttaaagtttattataattttataatttttgttttattttttaccctgtccctcgcaaacccctagcaatttgcgaaggatttccaacgacgactcgcaacttcctcgcaaacttgtaacctacagctttgcgagggatttactacggatccacgcaagtccctcgcaaattttctagggatttactggggacctcgcaacctcctcgcaactttgtctgaaaaccctaatcgaatctctgtgttatcctacaactttgcgagggatttactacaaagactcgcaagttcctcgcaaaattgaagcgatttcattggttgtttagtcggttcctcgcaaagccctagcaaagttgcgagggatttacgaggcgatttaagtttatatatacaacgcgaacgagtttgagcgaagctcaaacccaaccgtctctcatccaaaccctaatttctttcttcttcgcctattctctctcgatccgacgactaccgaagctggtcgccgccggctcgaacttcttcagcatttccttgccgtcgtgtcttcatcttcttcgccgccgtctggagcttctcatccacgcctgttcttcgtcgccgtgtatctggagcttcttcagcgacgcctgttcatcctctccgccgtgtctacctcttcttcgccgccgtctggaacccaaaggtaatgtttcaaaccctagagttgttcttcattctatagttagggttttcgttttgttttttgtgttgatctttcaaaccctagagttgaatcggttttaatctgtcttattcgagtttatatttgtagatctaattagggtttcttgttttcagttgattttcattgtagatctaattagggtttcttgttttcgtttgattttcattgtagatctgcttagggttttctatttcgttgattttcgttgtattttaaattagcccggtttcagtctcagcaacaaaatcatcgtcgttctcctagtgaaggaaacggttcagccactcagggtaatctccaaaccccaatcaattccaacaatcaagcagatggtgcttctcctccgcctgtcaatcaatctcctcgtggttctgccaatcagtctcctcgcggttctgccaatcacactactcctctagctgctcggttcaatgacctaactatagaagagttgcttgctagccctggtcgtgcagggttgcctagattagaccctaatcgacctcctggtactctctggtaagccactaggctctgttctcttcacaattacttgattgtttagttttgtctgtctatggagtcttgatttgtaggtttgacgatgacaccttagttgcagccactgtctggagcatttttgaaaaagatttcaaagagcctcatgcaaattggtcacagacatcagttgcagtggtcgatagatggtttgaaacctttgctgtaagtgaaataatgttgtgttttgtttggtacagcttttggtcttgtctatttctaatgtgtgttgtctttgttttgtagcaagtatataactgggactctgcaataaaccaaagagttagattggagtttaaggcaaagctgaaggataggatgtctgatcaagttggtcgttggaagggaaagtggaaggagaagggagatgaggtaaaactgcggtggataaatccagaagtttggaaaggtctggttagcttttggagggatccgaagtcggaaagaaagagtatcaacagtaggaatgcaaggtatcatgatccggacggccttgggatacataaacaccggtctgggcagacctcatacaaagccagagcccgcagacgtgtaagttaatcaaattttttcctttaaaaaacttgtatttcaaacaactgacctatatgtttatgtgtttcactgtgagatgacaggagaaagtactccagactttctcctcctcttagatgaaacacacaggaaacctgatgggagtttcatcgacagaaagtcggaggaaatctataaggaaatatcatcgaagattcaggaggaatagtcacttctgtgttcaggcgacactacagagagcacgggttcaggcgggttatctgttcaggcaaagaacaagatatatgcacaggtaatttatctttttcaacccaatatagaagacagcatttttttgttgctttggattggtctgttgtggcttgcattatgtctttgatggaatagttgcaggttcaaactgaattgaatatgttgtgtctttgtgtttttggcctgattcagttgttgttggtttgaatgaaatcattgtattgtcggcctaatatgactatgtttgaagctaaaagttgtctaatgggatagtttcagttttgtatgttgctttgtgtttgtctgttgtggcttgcattgtgtcattgtgtttcaaactgaattgaatatgttgtgtttttggtttgcaaaatgtcagtgtgtgtaaactgatatgattatgttgtgaaactgaattgaagatgttgtgtctttgtgtttttggcctgattcagttgtgttgttggtctgaataatatcattgtattttcggcctaagatcattatgtctgaagctaaaagttttccattatgtctaagtgtttctactttgctttgattatgtttgcttggtttggttgtgagtttgtgacaggttgctcctaagaagaaagggaggatttatggggctggttcatttcaacatgaggcgtcttcagctcataccggtccggtgcttcctcgagatgatccggttgtgctttcccagaagttggctgctgctgaagccctcattgcaaaccaggctgagaagatcacctgttttgacgcatactttgattaccttgccgagaaggatccggagttcgatgccttgtttcgagccagaccatctacaagaactgaaccagtcagctccaaaccacctgatgcgcctaatgccacaactgctgggatcggacctgaggctgtcgaacctgaggctgtcgaacctgaggctgttgtagctaacccaaacactgggtcatctccatctgaggccttctaaatttttgtattcagtttcttttttcactcatcaaaacttgaatcttttttttgttagttatgtaaaattatttgttggcttgttttctgtacttgaaatatgagtttaaggtttcttaattagtattcaaattaaaagtttagtataaagatccaattaagaaaatcatttaatattgttaagtagaacagtaatccctaaattcaacagtaatcacgcttaaaacaaaacatgaaagagtcgctcattcaccgcaaatccatcgtaaattttgctagggatttacgactacagagaaaaaccacgcaaatccatcgtaaaatttgcgaggcattagcgggacaacaaaattgcgactactttgctactgacggattccctcgcaacttgcgaggaaagagcgaggcttatgttgcagctaatttgctaccgagtacgtccctcgcgaggcagatggtccgtcgaaattagcgagtaacttgcgagaccggaaatttgccgtgaatttgctacggattacgtccctcgtaaattgcgtgtgctttgcgaggtaatttgttcgtcgcaaattttgcgagtaacttgctatggatttgattttgcgacgcgcgtttagcgaggaattgaaattcgtcgcaattccctcgttaactgctctttgcgagggactagcgacggtttcttccctcgcaactggcgtgttttcttgtagtgtatgtcattgactaactctgagatatgtaggcactatcagcctcttgtcatcctgtgtctttgaagcatcatctcgtatcatagcacttggaagaaggggtgacaacttctctatatcaaccggaggcaactgaagtagaatcacatccatgatacccatgtaacgcatctgaggaatctcttggactgtcgaggcagtagacaagaaacttgttgaaatattcccataaatacttaattaaacataatcaaatattcccataaatacttaattaaaccaaccaataaagcaacatttaaaccgcacgtcaaaaatactattttatgaataaataaataatttaaccaacaaaaccaaaaatgactaacaatcctaacacaacccttaccagttccaataaccaaaacacaaaaataaatcaaacgagttcctagatcatcctctcttccttgccatgattctacgatcacactttatctttacctggaccaaaaaaagagatgcttaagtattatcacatatacttagtgaggcgatcctctcatctacgagctatacacacaagcaaataaaagggatataatcacaaatataacataaacaaaccagtcattgaacaattcacccaaaaacacattcaccacacctacatatcatcccacaaaacaaatcatacaacccaatcgctcagataagctcatggtcacgcactcaccttaacaaattgattctaacaacaattaaacccactgagagactctccttgcgtctaaagcagtccagaaacgtcaaaaaacaagttacaaccaaaaaccatcttgaagcaaactggacatgaaatacagaaacaaacagtctcaaagacgaaaccctaaaatgaagaccaaccgttaactatcaaatccctccgttgaaacgctagccttagacgtcaagaagcgtcccacaaagtctcgtgttgatcggaaaccagatgagaccacgatcacaatacaatccccgctagtcctaattcgcttatgagaaaacgtgtctcatgaaactgcaaataactcaacgaatttaaatccaaatcaacttctgtaaaatggagaatgacaataaaatacttgggaataacgctaccaattctcgttacctttgacaacgatttgatatgtcaaaactgtttcctcccaaaccctaacgattctggtccttctccttctctttttctcctttataaaaagaaaagtggctaactaaagccctaatttcgagtttccttcttttataagcacactctagggttttcattaacccaaccgattaaaccgggcgatttaaatacaaaccctaaccgattttccggtttacgggcgttacaattctcccctactaacatagattcatcgtcgaatctagcttcaccctaccactcggaggaactccgtgcaaccgtcactatggtccgcactcccttcaacccgacccctctaggtctctttatccagtcgatatatctatgatttactagtcattgttgctcacaactctctctccactctcagacagcagtcttcgagcataaactgtcactcttaggcctcggcctacggtatctcgggtatcacacgtattatcttccccactcaaagtcaaaccctgagttgtgtcggctcactctcagccacaaagtcatcaagttacgacacttggagaaaataataccttaaaactcgctctcgggtcgtcacccttagcgtgctctcggatcgtcacccaaagccaccgtactcttcgcactctaaagacaccaagtccctcgagttaccggtgcctcaggagcataccccgctcctcacgagtcgttgggaccctcatgtccctcgagcaaacaatactaaatgcttctgagcatatctccagactctctcattgattcgcgtaagacacctttatgcctcaccatccatcctatattatatcccctcgggaatatccttatgaccaactctcggccatctcgtaaacacacctatctcttaggttgtttactcaaactttcgaaaaatagacaagccctttctgggaaactttccatttttggaaaccgcataacacattcttaaataagacaactcaagtcaaatccaagaaaaaatactcatcatataactcatcaaatgtcatgatcgttacaactccaaacaaaaatacaaatgaaagagaaataagaacagcaactcaaaagctcagcaactcaacaagactgaaactggaaaccaaggataggcaagtcatgcaacaacctgcttctcgaaccacttcttgaaccttgccttcatcctcgcctctggctaccaagtctcctctgtcacaccatctcagtcccacaggacattgatcaaaggaatctttttccgccgaagttccttgatcctcctcttgagaaccctcgctggtctcgcctccaaagtcatgttgggctgaagatcctctggaatcttagccaacacctcatcatccttgtgaagacacttcctcatcatcgacacatgaaagaccttgtgaaacgcacgcataacatctggcaattctaacctgtatgccactggttccactctctcaacaatcctgagcggacccatgtacctcggactcaacttagtctctgagatagacatgttcggacctcgcaacatggccatcttgagatacactttgtctccaacctcaaactcaagctctctcctcctcttgtcagcataactcccctatcgatcctgagattccttcatgttcagcttaagaacctggatcctctccgtagtctcctgaacataatctgcaccatatatgctcctctccccacttgggtccagcataatggtgtcctgcattgcctcccgtacaacgcctcgaaaggagacatcccaatacacgcatgatagctgttgttataagcaaactctaccagacttaagtgatccatccaatgacctctccaatccaagacacacatccgcaacatatcctgaagcgtctgaatagtcctctcagattgcccatctgtctgaggatgataagtcgtgctcatcagcaccttagtacccatctctgcctgaaaggttcccaaaacgcagaagtaaacttggaatccctgtctgatacaatactcacaggtactccatgcaacttcatgatctcgatcacatattttttagccaacaccgtcgctccattggtttttctgatggcaagaaaatgtgctgacttagtcagacggtccacaaacacccaaatagcatctttggtccgcgacacaggcaacccagccacgaaatccatcgtgataaaatcccacttccactcaagaatgggtaaactctgcaacagaccacgcggcacctgatgctcagtcttaactaactcgcaaacatagcactctacgacctagttagctacatccctcttcatcctgacccactgatagtactgcttgaggtctcggtacatcttagtcgctcctggatgaatggaaaacatgctcgcatgagcctcactcaagatctcccgccgcaactcctcatccttaggcacacaaactcgcccatgcacaaggatagtcccattagctgcgaactgatacttagagccctctgtcttagaagccgcaatctacccctcatccttctcttgagccaaccgaactctactcagaagatctgctcgatccacacccttcaatctcaaaggctcccgtgtcacaacacacaaccgcaaaacaccaatctcactcaccaaggcctcaacactctaccctggagccgcacccatgcgcttacggctcaacgcgtctacaaccacattagctttacctggatggtagactatctccagatcatattcagccaccagctccatccatcgcctctgcctcaggtttagctctagctgagtgaagatacttaagacctccaaatcttcaaggcaaagatcaccacagctaccaataaatcgtgagtaggatagttgccgtcatgtttcctcaactgccgtgatgcgtaaacaataaccttcccacggtgcatcagaacacaacccaaaccaactctcgagacatccgtatacaccatgtaaggctccccatgctctggtaatgctaacactggtgtagtcgtcaacatctccttcaggctcacgaaaccctcctcgcactccggtgaccacacaaaaggaacatccttccctgtcagcttagttatcggctgtgccatactcgcaaatcctttgacgaacctcctgtagtatcctgccaacctaagaaaactcctgatctcagtggcattcgtcagtctaggtcagtctctgatagcttcaatcttctctggatccattaaaactccttctgcagaaacaatgtgacccaaaaaactcatctctctctgccaaaaactgcacttgctcaacttagtgaacagcttctgctcccgcagcttctccatcactgtccttagatgtacctcatgctcctcaggactcttagaatacaccaggatgtcatcaataaagatgatcacaaactcatccaaaaactcctgaaacacgatgttcatcaacctcatgaacgctgcaggtgcattagtcaaaccgaaaggcatcaccacaaactcaaaatgtccatatcttgtcttcaaaccagtcttgcgaacatctgcctccgctatcgggatctggtgataacccgacgccaaatcgattttgagaaacaagtagcacccctcaactgatccaacaactcatcgatctttggcaaagggtacttgttcttcacagtgacccggttcaacccctagtcgtcaatacataagcgaaaactcccgtctttcttcttcacaaataacaccggcgctccccaaggtgaagtactatgaagaataaatcccttacccaacaaatcctctagttgcttcttcagctctgccatctctgctggagccatcctgtagggtgccttaaacaacggcgctgtccctggttccaactcaatcgtgaaaggatcagaccgtgatagtaataatccctgcaacgattgaactcctgaacaacccaaatgtcgctcacttctacctgccccacagactccggcatagatatcgtcaccaggtaagcctcgcagcccttctcgatcattttctctgcctacattgctgagatgatgagactccctgaggtaggtctcactccctgataaaccaacctcccctttggccgctcaaaagaaactcttccacggtggcaatcaagatgtactctataatgatccaaccaatccattcccaaaataacatcatacaactctacacggctgataatcagatctgctggcatcgactcccctgcaatttgaatatccacaccattagctctccccagaaccgccagaaactgccctctagcaaccttaactgctccaaactgaagaattgcgatgctcgagagtcaaacaacacatgggtctctacaccgcctcactaataaggtccctacacaaacctcatgtgctaggaaccctaacattcatcacaaaataatgatatccaaattaacagaaataattcacgaagtctgagtctcagaaatcataccaatgatcgctctgttgctggtacagcctttctcacgcgcagtgtagcactgcggtaccgctgcaatatgtgctaactgctgcactccctgctgcacctgcgctccctgctgcacctgcgctccctgctgcagcgccgactgtactactgccactgccatccactgcagcttaggacaattcggcctgagatgtcctctccctacagtggtagcactccctcgtcttagcttgctgcatgcgatccgctaccttgtggtcaaggctcccacaagaaaagcatctcgcacgaccaccatgtccagctttggaaggatgatcccacctcctcttctaccctgcgcaggcttgccgcccttgctaggtgcctcctgctgctgagtcttcttcggctgtactgctggactcactgcccccaccttcctctgaagatcctcctctacctcatcagccgtctccaccagtgttgccttcgtggcgtaaataaatatttccttaaatacttaattaaaaacaaccaataaagcaacatttaaaccgcaagttaaaaatactattttatgaataaataaataattcaaccaacaaaataaatgatgactaacaatcctaacacaacccttaccagttccaataaccaaaacacaaaaataaatcaaacgagttcctagatcatcctctcttccttgccatgattccacgatcacactttatctttaactgcaccaaaaagaaagatatgcgtaagtattatcacaaatacttagtgaggtgatccttccttctaccagctatacacacaagcaaagaaaaggggtataatcacaaatacaacataacgaaccagttattgaacaattcacccaaaaacacattcaccacacctacatatcatcccacaaaacaaatcatacaacccaatcgctcagataagctcatggtcacgcactcaacttaacaaattgattctaacaacaattaaactcaggagagacttgaaacgtcccatcccgggctgtccgtccggtgaggttgttcccatccgaggataactcaagtgtcctcgggtcctatccgaattcgctctaagtgtaattggcagcggaaattctgagattcataagtaaaaagagacaaattcacataaagaaacaagccaactttattcatataaggtttcgaacgacatgagtgtttgcactataggctattacaatcattcgatccaatactttgacttaaacaccacccacttgcccgaacaaccatccttgcagctaagccaaatccttcccacgaatttggtcaaatcctgaaattaacgaatcatgagtatgccgtagtttacacttagcgatcatgcatatgctatgatgctccccatgtttcaccccccacacataactcaatcgttagaacagaatattagaaggatagatcgcatcaaccgaattcccgagcccttttaagaccgttcggcctaaggtcggtacggttatgcctcaccttggtcgttcgaccattcgcttcctcggcctccgtcggcccaaggccgccgggagtgcccatggtctctaactcggccatcttgttccgttctctcgcacccttagaaagatcacgtttcttttctgagtttggtgagagtttcggtgtatggacttgtgttctttccttggccgaagggcgagttatttataaggaaggggcgagtaaccgttcttgcgaacgggcgcctctaggtccttctggatccttcagtgcgcttccttcccaaccacacacgtggcgcatccttatagcccggtaaccgccgggtaaccgctcaaggtaactgccgggggaaccgttcggcaaccgtccgggtaaccgccgagtaaccgcctcactccccatccagctaggtcgagctagtggagctagctagtagtctcccgagctggtcgagcttaccggtgagctggtcgagcttccctttgagttggccgagcttccccaaccttctctgagttttgctgagctgccctagcttcctacttagcttcccgagctattcactccatcttctttccctcgggctcttggccattcgtgtttttcccgattggccgcccttcttcaggacttgggacgagttttctcacccgactctctacaagtctcgtcccagcccttccccttgatcctagttcggatcggggatgttacaagactctccttgcatctaaaacagttcagaaatgtcatacaacaagtcacacaaccaaaagcaaagttgaagcaaactggactgaaaaacagaaacaaacagtctcaaagacgaatccctaaaataaagaccaaccgttaactatcaaatccctccgttgaaacactatccttagatgtcatgaagcttccccaaaatcttgtattgatcggaaaccagatgagaccacgatcacagttacaatccgcgctagtcctaattcgcgtctgagaaaacgtgtctcacgaaactgcaaataactcaacgaatttaaatccaaatccacttctgtaaaaaggagaatgacgataaaagacttgggaataactctaccaaatttcgttacctttaacaacgatttggtatgtcgaaactgtttcctcccaaaccctaacgattttggtccttctccttctctctctttttctcctttataaaacgaaaagtggctaacaaaatccctaatttcgagtttccttcttttaaaggcacactctagggttttcattaacccaaccgattgaaccgggcgatttaaatacaaaccctaaccgattttccggttcacggacgttacacttctggtgtgtagacttgtctagtaataggtggagattcaaggcatattggtgcagtctaagtccagtgtcgatcaccactaggtgagtgtgggtcacactagtgtttggcatcgatcctactctgtcaaacgtcaacactagcctatctgtgtggtacttgtgtcgatcgacacccaggtggtgtcggtcgacactgtcggggccgactttggtcgtgatagcgttgtcacaacgtgacttttcttgtagaaggtcggtgtgggtcgactctacctatgcactgtcaaaatcaactcgattctcatttctataagcagactcctggagtttcctggcttttgctttcagttcaaaaaacgattttgaaagtctgagtaattcctctagcatggcttcagttctactctgagcaacggttggtgggtgggcttggatgtaagaagggatatatggagaagcaatgtgtgtagatccttgttctgctctgcacttgtcggaaacctcagccgcttttctccgatcactttctatgtcctaagttgagagacttgtgatagcgttgtttataagtaccaatgcttcgcttggagtccttttcatgaaattgccatcacttgcaccatcaaaacaaaaccgatactgcttatcgattgcgcggaagaatatgttgatgagctggctttcctggaaaccatgttgagggcaatccctctgatatgatttgaatctgatcaaagctgccttcaaaccttctgttgaatcttgagaaaacgaagagatcttctccctcagtaattcgtccactgaataatcaaggaagtggatcatgaatgcgttcttcgtgtcagttcaattggttagtgaacctggttctagttgtcgcagccataatgtccctctgcccgcgagagagtgtgggaagagtttgcaaaaatgataatcagctggtagaccatctgctttgattgaggacactaagtcttcaaagacttctagatgatctactggtgattcattagaagcacctcgaaactttcctcgtgaaacaagattatagtaggcagggtgaatggcaaagtcttctcttataaaaggaggtagctggatcgttgatcgattggagtagaaaagatcagctctgttgaagtcgcctatggtagctggtctattctgcaaattgtgtcgatcgacaccctaatggtgtcgttcgacactgtcgtcgaaatttgccagcagtttgttacattccatcttgtagttcccttgtcacaagaaaaagaagaaagaaaacgcgtgagtaacaaaataaagaaaataaacacttaggctaaattctacacttagtctaatgttgaatcacagagaactttggcaacgacgatataagtcaaattaatcctaagaccactctctcaaataaagaggtcagttgcagcacttagggatcgaattcacaaagttctcagatcacgcagtaaactaatgactatcgaattaagctaagtaaaatagtaataaaaataaaaagaaacaaaaagtaagcaatagcagattttgaggttgtacgacaagatcataaaagcgttaggcttatggtattctcatgaaacaaatgattagtagatcgattaatagctaggtttttatcgcaccaatctcgaactcaaactatgatattagaaaaacaagtggtgttccgcgaaactctcggcctagagctaaaaattaccggagaagccgagaaatcctatacttaagcatgcattattatcaagtttgattagttcacctacgtatctaaaccagagctcttctatgagcctacctattctttcttaaatccttaagttcatctatgatagttctgataacatgtacctatggtgggtatacctattgtctaatatcaagttcgagttagttactctaaaactagcattaagaacatttaacatgaagaatcctacagataaccttgcaagggagaaatctactaaatcatctaaatccataatgagaaaccctaaccctaacaagaaaactactctaacatgatcaaagaaacacaaatcatagtctaaataagatttcaataatgaaaagaacaagagatagagtaagaaagatcttctctaaagggagtctccataaggttttgctcccaagtacaaaagagaaaaggagatcagcctttccaagcttaggtctaaacaatgacctttaaaactatatatatgacctaaaaacgtgatggactttctttagaaataagggaaagttctgggccgaatttgaaaatcttcaagacatcaataagttgcgtcttcgaattgccgtcaggtattggtgtcgctcgacaccaggggtgttgtcgctcgacacctacgcggtttttcgtctttgaatttcttgagaagcataaattctctattttccttcagaatgctccattatctccaaatgaatcccaaacatgtaaaaccagaaaaagactagaaaggactcaaatatcaaatgtatgtgtggaattagcgacaaggggatatctatggtacttgatttgctgaaagaagcatttacgcatgccaaattgccaggttcatttaaatacatgaaaacatttattcgcaaactaggattgacttatgagtcaattcatgcatgtccaaagaaacatgcaaagtttgtaaagcctctcgttggaaagaaacaacttaagtaaagagtacatgaacttgatcagagaacataacgagtaaagctcctgcaatttttgcgttattttcctctaaagccccgacctcaacgtttattcatgtcatcaaaaattgtatcccatagaaatggcacataacttctagtaataatgatgggaatcttcgacatccaagagatggaagtgcttggaaggcatttgatcaaaacatattctgaatttgcatatgacccaagaaattttaaactaggtttagcaactgacggttttaaccaatttgggaccatgagtactaattatagcatatggccagtgatattatttccttataattttccaccatggatggcaatgcagcaaacataaatgatcatctctatggttatccctggaaagcatatgcctagtaaagaaattgatgtctatttgcaactaattatcaaagatttgaaggaattgtggtctaatggaattaaaacactagatggttacacaaatcaaacatttgaaatgcgagcaaccattatgtggacagttagtgattttcccagtcttggaagtttgtcaggctgcaatacgtattcgaccttggcttgtccaagttgtaattttgatggcatcggagaacgtttacgccatgggaaaaaaacaattatgggtcacaaccgttttcttcctcaagatcattgttatcgtcaagataaaagtaattttggcagaacaatagaaaccacatttccaccgaccatattttcaggttctacagttatccatcaagtagaacaagttaatgttactctacgtaagaaccacgcttagttggaagaaaaagagatcgaagtggtgcttcagtaagtgttactacaagtggtactcagcaatggaagaaaaaaaatatttgttgagttgtcttattgagaatttattatgttgcagcacaatttggatgtcatgcgtatagagaggaatgggtttgacaatttagtttacacatttttagatgacaaaataaaataaaatcaaaagataatctgagtgctaaaaaagatctatgtgaactaggtatacgttctgacttgtggcctgatgataatgagaagtataaagctgcatgttttactctgaacaatgatgggaaagacatttccttaagtctcttaaagaatgtaaaactccgtgatggttatgcttcttatttctcaagttgtgttaatgttaaaagttaaaagttttcaggcttaaaaaccacgactgtcacgtgataatgagagatttgttttccgtcgcagttaagaatgcattgccaacagaagttgcatcagccattgtcgagctttgtcatttttctagggatatctctgcaaaggttctcgataacgatgagcttgatcaattacaagatcgtattgtttagactttatgtcgtatgaagatgctttttcctccatcatttttcactgtgttggtacatttagtagtacatctcacagtagtggcaaaactcggtgggccagttccatttcgttggatatatccgattgagttttttttttttttacattcttatgtttatatatttacacaactagaaacttacttaactcacttatctacaagactttgggatacttcaaatcatatgttcgaaatcgcgctaagcctaaaggttgtaaatgtgagcagtatagggtttgcccaatgggtttacctcaaaaaaaaattaacgagacaacatcaattcatcaaggaatcatttacaaaaaattgatttgaagatatcaaaagtacatatagctgatgtatttgttgacagaccgactaaactactcgttgaactacttgctgatctactcactgaactacttgttgaactacttgctaatctactcgctgaactaccttttgatgtaccacacagaatgaagcttcacaaggaaatcttctttattctacatttggatgagtatcaaagctttgtttcacggtctcgagagtttctagttcacttagaggcttcactatgtgctttaagatacaccacaccacacttgatcagacggatcaattatgagctatacttaccatatgtggacccgtttatcatcattgtgtcatggctctttccccttttgtttaagcgtctgcttaagacattccagagcataaggaatctcccaaggcgtcacaatttcctccccaagttgagaagatacaaggcacacctcacttgccttatttggacagattctacaataatgtccaagaccatatttcattaaatattgcgatttgtttcttgatttaaagtagtagactattgtatttagtctatataagctaattatttcgttcattgtaaaggatccttgatcatttaaaaggtgtagaaacgttttctagtcaaagttgtgtctttctcagttggtttgtagttctttgtgagtgaatcactaagtacttcagtaatatgcggattaagtttgttgagggattcaacatccttcatttgttcattgatcgagtgagtcgactaccccactgattgagcaattcaatcacccatctatccatcaattccccttaaatcgagcccacgcgagagaaatgatcgccattgtgtcagatcacccaccttcatcatcccaccttccgagtggcaagcttggaactcttgatcataaagtgttctaaagttggatttgctcaaattcttgcattgatcatcaagtgatctaaagttagatttgctccaattcttgcatcatcttggtatcataaattcaaaagctcatatccccaaggttgtatctcttcaaccaactgtatatcttttactatttccgttttgttgtttaatttttataaatttaaaaacgaaataaaactagtttcttcctttgctattgtttatttgcttcagtatctttattttttatataaaaataatcctttagtttattatttacttttgatttattaaaaacagaacataaacaaccataaaaatcatattttgttgaagtttgaaaaacttttatcttcataaaactagaaaagaaaaattaaaattcgttttctgttttgatactttagattttcgaattttatttttgcattgattttagaaaataaaaagtttccatattttgtcctctttaccttattttgttgatttacgtttgatacatctttgtcttgtttgttgaaggaattccacaaaaaaagagagcaacaatgacatcatacgatatggagaaggaagaaaccaaccaagagatgtgtttcaatgagaggtatgaaaaactatggcatgaagagtactctgaatcagattttgaggatgaacttggctgtgaaatacaagaacctgaaccgcctgactcatacataaccaataaaggctattgtaaaccatggattaaatttaatgatgattttgcagccatgattcgtaatctccattgactcgagatatttctttttcaggaaaagaaaattatgttaagcaaagagaagtcatggactataaaggggcaacaacgaaggaataccattgccaaagtcctcaaaggcgtgaagataagattgaccgtcacactttcttttattgactgcctacagcatcacgtcaagtaaaaccgagacacaagttctttcacacaaatccacgagtagtacataaaataactcaagaagtgactcagagaacatcaatgtgacgtaaactgtaacaccccggtttcaggaatatggtggtgcatgcggagaagtttgaagaattgatttggccacctatgtgaccaaattgcacttatcttttctatcaaacatcttgagagaactccacagttaagcgtacttgggatagagtagtttcaggatgggtgacccttccgggaagtgattatcggaacaatgtgaatgaggacaaagcatggggaaagatcatgtggtgatttgaagggtcggtaacaagtatttaaagcctctcgcacatggctcacccaccgtcggacagaggtgggcccatgggcccgagagaggacgtgaggcccattggtaggggcggttgaggcgttacataaaccatatgattacatagctgagagagactcaagaatcagtaatctaagagaagacgagctgaaatatggcactcgacgagacccactactatccaaccccaccggaacctaccaaacaaaactcaggttatttctagaaaatgattatgagtattttggacctgaatcttctgagtttgcaagacgtgagagagattatctataatgggaactcaacgtagataagtacttaagttttttatgagggagagatacgcaccacacagtcttccccaacctagtcaacacacttaccatccaaaggaaccaagctgagagaactctacaaatctacgtgttagttcaaatcaaaatgcgaatcaagatcccgctaagaagaatgagattggtacatgtgcaaaagaaaacccgagcctcataccggtaattgaattatatactcaaccgcatgctgaactaaagaaaggtcagtcctatgattctttgaaatcacatgaaccaacatgttatagatgtcataagaagggacattttgatgcaacttgctctaaaagacaagtagtagatgccacatcactagagcagaaagtgaatgcatctagctccaatgattgtctcgtaaattcaagtttagaaattctgaattctagattaatgcacatgtctttgccaacggttactaatacaggtatatgtcataacatggatgacacatctaaagaagtagtattcaattaaagatttagaagggttaggtggaatttaggaaattttggatttgaagagatttaagtgagtttttaggataattttggttgaattattatttttcgtttcaaaaaggtatagataatttataatttggtgagatttcaaagagataataatagatgatttggtgagacttttagcacaaaaaaaatagaaaaattgggattttctaaaaatttgcagatggtagaatcaatcagtgaattactcaaaggctaaaaagtacttggaatcactatcaacaagtaacaagtccaactagccatgaaaacatgccttgaattttggtttgtggtaacttctttaacatgtcgtttgaatttcaaaaacattattaataatggtggaattcatgattaagctcaaagcaaaaacttatgcctctccatcaacctaatttcaaaaatctagtgttataaacctcggatttacttacaatttttcaacaaatcaatccataaatttttatggctctttagtattagtatcagcaaggaaaattaaagtgatacacataagcataacgagattcaccaccatgcttgacgactaataaacccactcaaaattccatcttaattaatcaatttcacaaataaagctctattatgttattagcaaagaaacaaacatgagaactgaagatcaaaaccgacctagcaacaatttgacttttaatcgtcaaatggttttattcatctatttgtaaccgtttgtgctcctcgagaatccgattgaggttgctcgagacttctgaggatgggaagtgagtcatcaccagactcttttgactttagtccttgtacataattcgaggtaaatggggactttggttttaggatctcttatgttatttttttcaagggatcaagatcgagggagatgaagacgaggatgaagagaggagattgttcaatagtttaatttcgttaaccacatgttgttagttcttttttttataaatcaaataccacctctagaggtgtgattgtttagttcttattgttacactaaaaaggtatccataggctcaccaaatcagttttcaatattttttaaaacaaattttattgtatgaaataataaagaatttgttatggtttttagaaattcatgattgaataacatgagattataaatgatttggaatgattttacataacatgaaatttgagaagagattttaaaatcccaaattgcataacaggtgattttaacaaaaaaaaaaaaaggcaaaattttccaaaatcattgttaaaatacattcccctacaattctagcaatagcatatgatgaagtaattagtagaatgactagtccaaaatatttagagcatagagcagatcgtataatgcgtgtttcaaatattttagaaatttgatattcagacttctgaattattaagattaggaaactaatctaaaattggtaaaacgtgtacaaaaatgtagaatacacattcttactttcatagaactcttgaaaacgtgttctaacaaaagtagacgaaactttatctattaaaagataaactttttcaataaaaccaataaaatttcacttcaaaacatgtctatatttgtatatttacatgttattgtggttttctttttttgaaaacaaattaaagtatggacactttcaccaaaaaataaaatatggacaaaaaagtggtagatatcatttttcctaattttccctatttagcaatataaacaaagagaatagtacattaattttttataatttgttattggaatatactcatagtataccaatatgaatcaatttacatattagttgttgaaatctcattaactatcttagattaaattggctacttttctgttattgatagcggtacaaatatctcaaaattatgtggtccgaatagtactctccaaatagggaaagatttaggtttgctgtctttttctttttctattatgacgaaaatgctcgttctttattcttttttattactcttagatattttattatctatgacatttgatgtaatttttaacaactaaagggtcttttatatttaaattttgcattgcaacctaatatgaaaacttataaattagaagttaaaaaagaaacataaattaattagatgataaattatttaaaagtatattaatacaaaatatttaaaatattatagagaactaaaattaaagataatatttattttggattttgttgctttgtggatatatcatggaaaagaaaagataagttttgtggattagggtggttttccatctcatcaaatggagagtcggcaaacataggagttgccaatctgcgtagaagtctatctccacttcatagatgtcgaagctatactttgggcgatgaaatatatgattgatgccgacaatcaagaattaacatcttttaaatactgttctaacctagtgaagatggtctcttcttcaaacgaatggacagcgttttcaacatattttgaggatttacagagcgacaagaataattcacaactttctctttatacttaatatctcgtagtgcaaatataaaagcggacaatcccgcacgaaagatttgtactcaactgcgtcgtattacttatgtaaacaatattctttaggataggctcttctaagctctaaaaaaatatgataaaaaaaacttaaattagggacaaaaaaaacgacatgtacgagcgaataaaaaaaatagttttattgaaaaatggaagaactggataaaacaaaacataaaaaggtcatatcatcttagagaattctcacgattactattaatttttactcttaacatgaccatgaacataaattagatacactgaaagaacttaagaggactataacttcgatccttaatcccattgagttcctaaagtcacctcaacttcgttagattcatccattaaaaccagggtttggttgcgaccaattgatcatgtttgagtccattacttccatgtttgatttgtcgaattcatgacggttctgcaatacttcacaagttgccatccttagcttttggacttttccattcccattttcgttcgaaattaatgcagcttttagcctttcactttctccgtgcaaatgttcagtcaagactgcaacaataaaggaaatgaaaacaaatattcaacagttaaaaagcaagagatttttttaaaaggtgttgtggttaagattcacgtaaaaagtttcattcaaaatgcgttattttgtttatacgtcgcaataaaaaaaatacatcatcctacacattaagtttcaggtaaagcggaaaaaccgtattttacggttatggatctactaaaacttattcaaaaaactttcctttttatgcaatatatttagctccttttttactgatggaaattattgcacataaagaagatcttatcgtcgtaaatactatcatggtcaacccaaaataagggggaggtcaagaaagttcatgcaattaccagcgtaaaacttaaaccataaaatcaaactaaaagacttgctaaagtatcgatagataaagatgatgtaccatcccgaagttgtgcctgtatctccatcgattcaattcgaatcatgatttccttcttctcattcatcatcattgttttatcattctgcatgtacattaaaaccataaaacttaagtaaccttcttataaataccgtttagacatgacaagctaatggtggctaatgtgatatgtttcacctccaaaagcttgatcttttcaaatattgaagcattttcgttctcaacaaagtttattctgtgttccaagttaatcatatactgtaacttcttctgctttaaatgtgctgcggactctcgattcttcaagattctgaaagagcatacatatggataaattggaataataaaaaaggaataccaaaaaaaaaatttaataaaaaagaaataccaaccatgataataataaaagaataaaaaaggaataccaaaaaaaaaaaaaagcacaaataataattttgtcacacatgttcacttaccttctgacttccttaggatccaatgcaacctctttaagtttgttactctttgctatcttattcaattcatcatcagtataatcattggcatcaaactctagcctggaagcattctggtctccatcaaccaatcttgaagatggagtgttacccggagaaggagttagcttcagtaagtcactcaaacaactatccattgaaacactcctgtagtgtctctttaggggtccaatatctttgggtgctattttcttcacacccaaaggaggcaataaagagtttttcttaaacctcatggaagagtctctactctccatagaagttgacggattcatcaatggtaatgaattgcgacgggatgacgacggagaagggctcaatgggggcaaggaggagaaggcaagtgaaggctgagttatcgaccatggtcgggacggagtggtattgtcggatccattcattgttaaagattgaagaagaccaacaatggagtataaatctgcatcatataaaacaagtcatgtttctatgtataactcatttttcttacatgcagaaaaaatagaaaaatgggaaaaataacaattaaaatgatcaaagatatcttgtcttgaattgtgacaacaacgaggttgtcatcagtttatagagaaaggagaacaaaaacaaattgaaacgttgagtaagcaataaagagttgaaaaaacctctcagaaacagaaatatgatttatgttgtttggatggatatgtatagtttgcatgaatctctttttatattgtttaagaacaacaaatgagtcccatgtttttaccctcatttattagaattttatgattttccttattaaatccataagtttgaatcttatttttgtcaacaaaataacatacaaattttgaagtcaacacatttgatggaactctgtgcgttttaggtaatatatataatgaaaaattatctatctaaggtgattaagtttgttattgactcaatcttaatttaaatttaattaatggaatgttaattactttggctagtgaatgatgttggagtgttgtctacttttgctagtgagtagttaatttgatatgttgtttattttgctacttagctattttggtaaaaaaaaaaaaaatatttcttacagttattttggaatgttgtttatttttgctattgagatattttggcaagtgtgaaacccttagtctattggttgaccaatgcttcattgatgtttctacatcaagatatctacagtacgtatccaagatattgcgaattattagcagattttcagattaaaggaggtaagtgtgcaagagatctccaacgatgtataattatagacgatcgccaggattctatacagagaggatcattgaaggtgaccatcaagagcatgaagaaggagaaggaggtgtcgtctctcgtggatctaataatggagagcatgaagaagaagaatgaggtgtcatctctcgtggatctaataatggttgaaaagaattgtccgtggaagaattggatatataatagttttcataatttacaataattaatctattgctaataaaaaagctcattgaggcttttccacgtgtctacatcaacacttctaaaacactctctccatacgccacatcatcttgagattttattaaataaaaatttcaattattatgttttggcaaaaaaaaaaaacatatcccacaaatttaaaaacttcatacattcaatgtaccttatcactccatattgatttaaaccttcttttttgtgcaccaaattcatagattcatattagaaagatacaggaagattaagcttcaacggacaaacccaaaaatcaagtttgaagattaaagcgttttacccaaaataactaaaacatagagacacaagctgaaagaagcttgataggggaccatgagaagtgctgaaaccaacaatcacaagcatgcatatgagggaaatcgcaaacaacacaaaaacctcgactggtaaggagatagtcacagtacaacgagaagtacaatgtgacgttgagacaaaattcaaactatcaaacgtgcttctagattgaaaacaacctaaatttgcgttagatgtaggcatagggactctagagaagtattcggtgagcaaacttcgctgaagattgacgggatccaaaccaacacatgtcgttctatatcggaagcaaaatgggtttgccggagaagtatccggtataagcagatggaacccggagaagtatccgatgaaccattgaatgccaaaacaggcggaagacaacatgtaactaagggagagacaaaggtttcccgaaatagttgtggacgcaaatgatgagcgttgcacaacattagggcataccaaaagaaagctgcccaaaaaccttaacgggcctctacaccacccaaaagataccaagatgggcaaagcccaaactaaagtcttcttccaaagttgtaaaatgaggatctgacctaatccaaacgaggtcgagaacatgcgacggcggcgggtgacagaggcgacaaaatcatcgaccacggagatcaataaatggcagagatcatcggaaagataggtcgacgaaacaacaacaaccggtaaagatgaaacgcatggctagggaaaaaacggaaaaatgagccggtaacgaagtagttgctggttcttccagaaggaggcggagcacgtcggcctggtgagccaatgaacttcagagaaaagattctaacagatctgcaatcgagaagacgcaactgcgagattgaagatggaaggagacggagatgatggactcaaggcttgaaaagattgagacgagacttgttttaattctttgggagaagagcggagcaacaaagagaagacatcgtccgatgccggcgagcaacagctacaccagcgccggaagatagtgaattatataaaaactgtatgagaaatgatgcaaattttaatgaaagaagacttgttttaattctcctttgtattagtttttttttgtcatgtcattttttattcataaactatacagtcaacaaaaatgtaaaacgtcaaattatatagtctaagttatttagtaacatatatattattcagattctcccaatgttttagaaatacaagttttacaatttgtggtacaaagttataatgcttcttcaactttcttatatttttcaaaatttattttaccgtttcatacaaactttagaactattcaagttagtataaatcaaacacggattgtaaaaaaaaatgtgaattgtaaatatataaaaacaatggtcaattatgtgctaatgtagagtatttctttatattaattaaaaatatatccaaaatttaaataaataaagatataaaaaatatttaaacatttacgggcgtaaccaggtttcctttagtaaatttaggagtaaaaagatgtattttggctagttattatttatgggaataacgtgttatttaaaggattgacaatcattttttgtgagaggtatcgtataacactgttacactagatgcatctcaaacaatggtcccgtgctttttttttcaataacaaaatttcaaaacttatctcagaaatcataattcgaaattatagaatccacatatctcagtttagtcggtttattatttacaaaacaatttttaaccacctaaaaatgatattaaaacaaattgtgatttttaattgtatattactatttgattgacttgtcaagcctcaccaaaacatttaattttacaatcatgccattaaaattaaattatttttttctccctctccatctccacacgctacatctttctttcttacatgcacatctcttttttctgtatttttattttcttttttgatcaacttaaatctaataattcaaatatttgtcaatataaatttttttctaaacaattttagatccataacattaatattttttctctataatatgacatgtattatgtataattgatttcaaatattttatatatacatagttatacatacaacttattcagtgtactgatgtatgaaagtgtatttatttttatttgtatagcatattaattttacaagtgtataagaatatacatttatatatatttgtacacaattaaactgtacacatacaaaaatttatatgtctatacacttgtacaattaatatgatgtacgaataaaattggatatatttttatgtaaatgtaaatttaataaactatgcatataaatatgtatatataaaatatttgaaactaaatatacataatgcatgtcaaattagagagaaacaaatatagatttttgtggatctgaaattgtttagaaaacaaatttttaaaatgggtattttaattctggagatataataaattagaagtgtgtaaaaaaaaaatggttattgtcgacaatattcaatttctgctttggaaactatatttcatatagagtcttccaatatactatacacggatacaccctcctcaaacagtcgaaagcccttttaagtaattttacaattccactacaaaaccaatctcacaaaaattgtattacacaaacattcaaaagtccctattttgctaattataaatagtaaactaactacttttataattatgtttcaaaaaaattaaaatttttccaactcacttagtttttaacaattattaagtgaagaatccttaatccacataagatggttattgtatattgtcaatatgtaaccacactaaatttactcaaatttgttgccactcgtaactacggttggggtcagatttcacccaaaagaccgagccaaacagataaagaccataaacgtctcgggagctaagcttaccacttcaagggcagagacctattcacgagacgttatctactcgggtatctattacccagctcggatcattcaaggaaacacaccccgagcaggggaaggaaacacctcgggaccccggaatagaaccaccatgcggctcggttgttgttccagtaaacatacccgagccaagctttgacgcctcgtggatcgtttaggcccggctcgggagatattaggtcttgtagaatgtgtgccgagccgaagcctagcatctcatagttagaatgtgagcttatggccagctccttcccacttgtccgagactccaccttcttttctcggaccaagtcctagccaacgatcctattgaggatcgcgggcgttacaagtctcccccccttgaattggattcgtccccaaatccgcatcaagttgatctttacccatctccttgaaccactccggaaaattggccttcattttcttctcggtttcccaagtgtattcttcacggcctccacaattccacaagacttttaacaaatccattgattttccccgagtccctttcttcattcgatccatgatccgtaccggccatgcttccaccgtcatgttctcctttaacccgggaggtacatcttccacgctttcttcttgatcacttaaacacttccgtagttgtgatacatggaagacgttgtgaaacgcgtttagttttggaggaaggtcaagtttgtatgccaccgcccctactcgttcgatcaccttgtacgggccaacataccttgggcttaactttttccttgaggtgaatcgccctgcccctttgtaggtcatcgcctttaagtacaccaagtctcctacttggaattccaaaccctttcgacgcttgttggcgtagcttttctgacgatgttgggcttcctttaacttgatttttaagaacttcattctcttcgtgatttcatccacgatcgtaggtccgaacaaccgacgttcgcccactggcgtccaacacaactgtgttctacaagctcggccatacaacgcctcatagggagacataccaatactagcttgaaaattgttattgtatgcaaactctactaaccttagatatttctcccagtttcctccccaatccaagacgcatgccctcaacatgtccttgagggtttgaatcgttcgttcggactgtccatacgtctgtgggtgataggcagtacttaggttcactcgagtccctaaggccttttgaaaagccttccaaaaatttgacgtgaaccttgtgtctcagtccgacactatactaaccggaatcccatgtaatcgcacaatctcgtctatgtacttctcggcaatgatttcggctccatccttatccgagattgccatgaaatgcgcggacttagtcagttggtccactacaacccataccgtgttgtgtttggacttgatccccgtcgacagtcccgtgacaaagtccatcgttttatggtcccacttccattcctgtatcggtaggttttgtaacaacccacttggtacttgatgctccgccttgactagttgacaagtcgggcacttggccacctctttcttcattcctacccaatggtagtaccttttgaggtcgcggtacatcttgttcgacccccgatggattgagaatttcgattgatgcgcctctttcaggattttctcctttaatgccctatcattcggcacacatactcgatcgttcaccagattgtaccattgttagaggtttggtactcggtcttattgtttagtgcccatccttttatctcctcgtccctttcctaagccagccggatcctactaagcagatcggcctgatcggcggctcccaaccctaagggttcaacttccttagacaaggcattcaaatgcaatatccccatcatgttaaccaagttcatttggttcctttccgcttccacttccgagcgcctcctactaagggcatcggcgacttggttggccttgtccggatggtatgctatgtccaactcgtaatccgccacaagtttcatccaccttctttgccttagattcaactccggctgggtgaatatgtactttacgcttttgtggtcagtatagatttgaaccttagcaccatacaaatatgatcgccaaatcttcaacgcaaatactaacgcggccatttccaaatcatgcgtagggtagttcttctcgtatttccgcaattgcctcgatgcgtatgcgataacactccccttttgcatcaatacgcatcctagtcccattatggacgcgtccgtgtacaccgtatatggctcaccttcctctggtaagaccaacactggtgcattagtcaacatggcctttaactccaagaaacttttctcgcactcctccgaccagttgactgcggtgtcttttccggtcagtccagtcatgggttgggccatgctcgcgaaactcattacgaaccttcggtaataccccgctagtccatgaaaactcctaatctcggtggcattccttggtcgtggccactcctggatcgaccgaattttctccggatcaactgatactccttggtctgagataatatggccaagaaaaccaacgctcctttgccaaaacaagcatttacataactttgcaaatagctcatgttctcttagccgttccagcaccgcccttagatgtttttggtgagcttcccaagattttgagtaaacaaggatatcatcaatgaagatgataacaaactcgtctaggaaatcccggaacacactgttcatcattttcatgaaggctgctggcgcattggtcaatccgaatggcatgaccacaaactcataatggtcgtacctcgtccggaaagttgttttccttacattctttggctcaatgggaatttggtgatatcccgaggccaagtcgatttttgaaaaccactgtgcgcctccaagttgatccatcaactcatctatccggggtaaatgatatttgttttcaccgtaactttattcaatccccaatagtcgatgtatagcctaaagctaccatctttctttttcacaaacaaaaccgacgcaccccatggtgagctactcagcctgatgaatcctttctccaacaactccgccaactgtttctttagctccgccatttccgccggtgccatccggtacggagctttagatatgggggttgtcccgggttcaagttctatcgtgaacaggtctgaccggtccggtggtacaccactaacggcagcaaacacgtccgagaactcgttgacgatcggaatgtctttcaactccgcactcgcccccacttccttggttgtgatcgtggctaaatatgcctcacatcctttcctgagcatcctttaagcctggattgccgagattactaagcttcccgaggttgttcttattctttggaattttaacataccctcgtccctctcgaattgtatccgtcctcagtgacaatctatgtgagccttgtacttccccaaccagtccatccctaagataatatcgtgtttctttagtggaataatgattaggtccgcgggcatattgacaccattcactacaaccgagatgccccgaacaagtccggtcggatacattgcctgtctgccggccggtcgtattattccataatcggtgtttggttctttcctgaacccacctgattcaaccgattctatactaacaaaacaatgggtagccccataatcaaatagagtgtgcgtttctacgtcacctactctcaaggtccctacacattcccttagaatgttgagtacctccctttccccttatgcatgatgcaatgcaaatgcagttagagaaataatgaatagggagttgcgatcacgtatcagtaatcgccctgaagttctcggcatcgttagcttcctcggacagctcataaactcgcggtgccacggcctgccgcttagggggaggtggcaacccattacccccgcgattgtccctttgtccggcctgcttcttcgcagtaagcttatggcactcccgctttagatgtccaaccttcccgcaatagaaacaagtccttgtctcttcaccgagaaccttggactgtcctagttccattctcgggcagctttggatcgcatggtccttgcttccacaccggccacatacacctatggccttccagcaagttccgctgtggctcttaccacatgtcacacattccctggtcttagcatcggacttggtgttatccaccttgtcaaatttccttttcttatccgcgggtttggtgtgctgattgttccggatcagagctttctcccgattcaagtacctttcttactcgatcccttcctcaatcattgttgccctttcaaccgattcggaaaccaagttgaatgtccggaccaaacaatggttgcggatctctattcttagtccgcggataaatcggcgcaccaaggcttgttcctcctcaagtttgcgtcccacataacgcctaaggcggttaaactcctcatcatattcacgtaccgtgcggttcccttgaactaggtcgaggtacgcacattcaagcctatcccaagcctccggtggaaagtacttcttgttaaactcgtcttcgaaatccgcaaaggaccggacctcgtcccctctgcattttttgacgcttaaccaccaattatgggcgtctccttcaaggaagtggactgcaatgtccctttggtaatcctcagggcagcgagtagacttgaatttcctcttgagtctactcctccactcatcggccacaatcgtattcgtattccccatgaaatgtctcgtgcctagccttgagacatgttcgagaaggctcagatagtctcccctttttcgctcatgattcacatccacaacttctgagtcatcatcctgttggttatccaccctttaaaccaccagatccgctacaacggccttggttaatgtggctagttgcgccatcattcctttcatcaaatcccactgttcttgggtcgttgaagtattgttccggttatccgtgttatcccttgcatcgctactttccggtgcttcctcatttatagacttcttcccggcctcatgtccggccgagtctgtctcatcaagcattgtcccgactctggttttcttgttgatcattgtttcctcctcaaccaaagtctccttaacaatgcccttgtccttcttgctctttcccgttttgctgctcttactcatctgcgaaaccttcaaagttaatccacataactcatagtaaaatcgcaaaagagtaaagaacaactaccgcgagattctcaagtcaacgagtggtgataccccttaacccaacacctagtcctagaaccaagcatgctctgataccaacttgaaaggccccgatctagactgcctaagtccggacgagatctcccgccccaagccactaagtgactcggccttaaccgtttatgaggttcattcctagtgtaatccgttttatatgattctatgattcaatatatgagacgaatagagtaaacaacttatgagtttgcatataagctattacaagtcatataatcgatccctagactatccgaactatcaccacccatcatcacgaccttgagtctctcgcgcctaagccaagtccttcccacgatcaccattcgttcctgaaagtcatagagccataagtaatctcatttacttagtcatatgcaagtccatgcaatgctctataggccatacattactcggatccgtagagaggattcggagaggggaagatcgcacatcagtccaaccgatttccagtaggtcaattaagacccgccgaatcaacacatccgttccttgcatctttccgaagagttgtatatcttcgcccgtaactgctcgcccttatccaccctttgggcaagtaaccgttcgaccataactgcccaagtaaccgtctggataaccgcccagctggtcgaacagtcgaccagctacctcgagctcaaccgtcactcttccaactgcctcgagcttaaccgtcactcgtctggctgcccgagctggactgtcactcggcccaagtaaccgtcactcattccagctgagcttgagcttcagacgaactgacccgcatgatttcccctttgtctgagcttatggccagctccttcccacttgtccgagtctccaccttcttttcttggaccaagtcctagccaacgatcctattgaggatcgtgggcgttacatagttgcccaaagcaaagacttgcacattttataaaaaggatccaaagacaatttccgaaaaacccggaaatgataatgaagaatcttcgaggatattgtcaaatctggatgttttcctgaagctcgcaaaaaataaggaaaatctccttcctgcgaagaccctcagtagccaacttaaagataagtagaaatcttctgagaatataggatgaggcggtcattaggcctatatatgacacataaaaaggctctcaacataggctataaaaacactccgaatttgaaggctaaaaacacttattctttacttttctataacacttgtacgatcaaatcatcgtttcttatcaataatatcaagaacaccatctgtggttacttaccgattctattgttctttgagattctcgcgaagactgtttctttgtaagaaccctaagaaacaatttccattgtgtagatttcgactctcacaatttgtcgctagaaggaggtgaaatttgagatttctcttactacaagaataaagaaccatcaaaccaagcagcaatgaccaacaatcaggtccccgctaacacaatggacatggagggaaacccgattcctccagtccagacaaacactcctaaggtcgccactcccgcagtcctagcagaaatgaaaagcatgatggcacaacttcagaagaaggtggactatcatgaacaagcgaatcggtctttggcccagcagctcaaggcggctaccttccaagggcagatcatgaccacccgctttgacgtgcgacattttcatgatcggcgagtagcggcagacctcaatccaacgaggctcgtgatcaatacgcctggtaacacgacgaggccagtccgatgaactgtgccagcgctcagtggaatccgagcaaaaccaacagctttgggagagccgaacgcgacaaaccaagtggaggaaaccgatccgcagttttacattccttgagccgaggctgccaagggctgaggaatatgataggaacaagaaataaatgccatcaaactctccctagccaaggaaaaaaccgagatgaagcttgttcgatcgcagctgcatagcgcagtctcctcgtctcaaaacatcgatcacattctggaagagtcccacaacacacctttcactcgtaagatctccaacgcaataattttagacccgaggaagctcaatatcgagtacttcaaggggcatttaaagtcatttataatctctatggcccgagccaagttcaagccaaaggagaggaacgcttgtctctttcatctatttgtcgagcacctgaaggggccggccttggattagttcttaaaacttgaagagaattctgttgacagtttccaagagctgccaacacttttcctcaaacaatactcagtgttgattgatccaggcacatcagacgctgacctttggtcgctatcttagcagccaaatgagccactcaaaggattcctcacaaagtttaggttgaccctagcctaggtcgagggaatcaacgacgtcgcagagctctctcccttgaagaagacattgtggtacaagttagaattccgaaaagagttaaatatgtcaaaaccacaaacgatccgagacgccatgcaccgagcctcagattacgtttcccatgatgaggagatggagttgctgtcaaaaaggcacgacccgtcaaagcaaacacctcaggctgataaatcccaatctagcactctgagccagaaaaagggtgctctagacagaaccttcgtgcatcacgaggggcgaaacttctcctaggcccaaaattaccaagctgatacaccccacgctcgaggacgtgaaatcagaagaatgcccgaatgtgctttatggcaacgcacaaactcagaaaccccatcaccgagtgaacacccgacgcaaacaacaaaaaggctaagttgggctgagctgaagaaaaagctatcgaagaggctcgggaatcggctgtaaggctaagacagtaatcccaaacgatgtgtcgaagtaggtggagatttaggcgaagagcttacagccgagctgacttccttcctcagagataacgtcataactttttcctggtcgccagaggatttgccttgagtaagcgttgaaatcgtgtcacacgagctcaacgttgacccaacttttaaatctgttaaccagaaaagaagaaaattgggtgggaacgtgcggaagctgtgaaagccgaggtggaaaaactgctaagaaatggctctataaccgaggcgaagtatcccgacaggctcgctaatccagtcgtggtaaaaaagaaaaatgggaagtggagagtctccgttgacttcaccgacctgaacaaagcctgtccgaaggacagctttctgttaccacgtatcgatcgcctcgtcgagtcaacctcagggaacaagttactatcgttcatggacgcctttgttggatacaaccaaatcatgatgaaccctgaggatcaggagaaaatgatattctacacgaagcaaggtgttttctgctactgagtgatgccgttcggacttaaaaacgttggggcaacttattagcgctttgtcaacaagatcttcgccttgcagatcggaaaacgatggaagtgtacatcgacgatattttggtaaagtctttggaggaagaggaacatataacctctacaacgtcaagcttaatccagccaagtatcgcttcagagtaagatccggtgagttcttggggtatcctgttccacatcgcggcatcgaggaaaacccaaaagcaaatcgaagcattgataggaatggcgtcaccgcaaaacaaaggctaagtacagcaataaaccggagagttgcagcccttaatcgattcttctcccgatctaccaataagtgttgggccttctacgatgtgcttcggggaaataaaaagtttgagtggacaactcagtgcgaggaagcctttcaagaactcaaaaagtatctagcgagcccacccatccttgcaaaacttgttatcagagagccactctacttgtatgtctccgtatccgatactacggttagcaaagttttagtccgagaagacaggggtgagcaaaaacccattttttatgtttcacagacatttactggagcggaatctcgctacccgcaaatggaaaaactcgccttagcggtcatcatgtcggctcgaatattgtgaccatatttccagtcccacaccatcatgctaatgggatttatgccactccacgtcatcctacacagtctaaaccagtcgggccatttggctaaatcggcgatcaaactcagtgagtatgatatcgagtgtagaaacaaaacgttggcgaagtcccaggtcctagccgatttcaatgtcgaactacccacgaaagaagctcgaaaaaattggcttgacacgacatggctcctacatgtggacggctcattctccaaacaaggtttgggtgtgggcatccccctcacttcacccacaggcgaggttctcgaataatctttcaagctaaatttcgaagcaacaaacaatgtagccgagtacgaagcactcgtggccgggctgaagctagctcaagggttaaaaatcgccaagatcagggctttttgtgattcttcactcgtcgccaatcagttcaacggggagtacacggctcgggacgaaagaatgggggcttatctcactcacagccaagatctggcgaaacagttcgacgagttcgaactatcaaggattccccgaggcaaaaacaaatcggctgatgccctggctgctctggcctcgacgtctgacccgtacctgaggagagtcatcccagtcaaattcatcgagaaacctagcatcgagcttgaaaaagaagagcacgccttctccgtgcagaataccacagattgcaaggatatttttgattcgaatgataactgatatttaggttgcgactcagaagttacatatccgaggggaaagtgccatccgacaaatgggaagctcggaagctgaaagctcaggccgtaggctttgttatggtcgaagagaagctattccaatggcgtctatccggacctttaatgacctgcgtggaaaaggaagcagcctacaaaatcatgaaagtaatccacaaaggctcatgtgggaatcactccggaggaagagccctagccatcaagataaaacgccacagatacttctggccaacgatgatcaagaattgcgaaaaattctaaagaaaatgcaaaaaatgccaaaggcacgcacccacaatccatcaaccggccgagctcctttcatcaatcgccttgccgtatctattcatgcgttggttgatggacatcatcggtactatgcacgcctcgaaatagcgaaagttagtcctcgttgtgacagattatttctctcaagtcaaaaacttcgtgtggaagcacattttatgtcaccatgggatcccttacgagatcgtcacaaacatcgactcgcaatttatttcgactcgtttccaaggtttctgcgataaattaggaatttggctcagcaagtcgataccgcgatatccccaggggaacgaccaagctgaggctgcgaacaaaacgtttctcgacggcttgaaaaaatagctcaacgccaagaagggttttggggccgaagaactcgaaggagtattgtggtcgcatcgaacaacgcctaatcgagccacgagagaaactccattcgcagtagtctagggtacggaattataattccagctgatatggaggtaccaaatcttcgtcgaagcctatctcccgaacccgagacagataataatcagagaatgcctaacgagttagatctgatcgacgaacgaagagattcggttctggtgcgaatacagaataatcaaaacgaaatggctcagttgtacaattcaattgtccgatagcggagatttcacgaaggagattgggttctctgcaaagtttttgaaaataccgtcgagctaaacgctggaaaactcaaggcacactgggaaggaccatacttaatctcgaaagtcgtctgaccaggcatttacgaactcgccgatttaagcggcaaagccattccaagatcctggaatgccatgcacctcaggaaatactataactaagtgcgagaagcataaacttgaactacgaggtggtttgatccctgagaagggtacttaggcagctcgtcttcgaacgagttcagctaccccccccctcacccccaaattaaaaaaaaggggagtgggtccgtatatccatactcccactttcatttctcttgtgagttttcacttcggcatgaataaaagttctacttttcacagtttgtacctgtttcaaatactacgatgagcgacggctcagagtatcttttaaacctacttggttacaacgcactatctaaattcgagttataacctgccggaaaaactttgcgcagaatctcgttctatcttcagaaaaccctgttatatcataacaccggtaccccagcttgtttttaaacgctggtgaaagagtgaatcggatcagatcgcaaccgagaagatttcaccaaagcaaaacgttaagtccattccattcacactggccctaaccaataaaacggttcgtaattagaaagcaattccgcgaaagagcgactcaattaggctacggtaacatcaaacgaataaaacgcatcgggatcatatgagaggccaaattttcaaaaggtgaaatttgtggataaagcaatccagacataagtctttacaaaaaccaaaaaggataaagccatcaaggcgctaatctttacgtacacaaaaataaaaggaaagctggttcgggtcactggtcaagtccttcatttcgcgaggcatcgccacggaagttcgaaccggcttggttggcaataccgatctcatccacctcgcattccaccgatctgttgcctccaggactctggggatccaaggtagaaggaacatgaggaatggccaactcttccttaacttctttaaggagactggtatatgtcgcctcggcgactgcataatccttctaccagctccttctcgtcctccaaatgcttcccaccctcaagcgcatcaatcagctaggcatttgctttagcctgagccaagtacatccagcggttgctggcttgatcaaccatagtcaacttcgcctcggcggccttcatcctctcaacaaacaaagctgcagaccgacaagcctgagcaacttcattatctcggagacctctctcctcagtcaacatgcgtttgtatctctcgactgttgacgatatcgtaacattggcctcggcaacacggacatcgttctccttatgagtgaaagcgttccgctcggctttctcgttctcttgcaacgccacagccgccttggagtcaacatcagcccgagcaagctctgctgcggctaatcaccgggacttagcgacggtgattagcgacggcgctgaggttagaccgcgctgaggaatcgtaagattgcaccatgctgttcatcgagctgatggcctgaagaaatataacaaagacataaggaccttgtagaaactcttgctcggagataaaaattttgaacatacccttaaaaagttcgatgcctcattggcatacaactcggactccagcaaagcgtcaagggggactgcaaaacccaggcgcaagccccaataagattagtcgaggcggtcttatcctcgaatataggctcggctaccttctgagcaatctcagcttccttcctctttttcttcttattctttgcttcggggtctgagcttcttatgcgcttccccgacgccttagtacggtcacgaaccggcaacccgaatattgtctcaagacggttcacggcagtagaaccgcttggggctgacaggaactcgtgccctttgacgggtttggcaaccaaaggcgtcgccctggaacacgatatccggagtggcagtcgcctcgggaacgctgcctacggcacccgcctcgagggcaacctgcgaggttccggcatcctcctcggcctttttcttttccctggcctctttcctcttcttctcatacacctcccgtaggctcagcttggtttcttgcaactcattaaaatgagaaaatcgatggtctgacgattctgagctggaggaacaggatacgccgcaacttaacttcatggctcgttcgactctttcccttgaaaagtgatctacccagttacacttcccagcaggtaactctccgtgaacaaaaacgatatcaccgggactcgcctcgaggaatcgaatagagcgagctgcaagaaacaaggaaataagttaagcgtcaaatctcaacgatcatctcgggtgtaaactaataattctaagtctaactaccaagagtgccccatctcgtcaaaatcgtcccgaccaggttttcgggaacactgacatcgttgagagccacaaagaaaaaatgatcagtatagggcccgtccttgctaaggaacccccagatgattatcttgtctttcgcaggggaaatgtagtatctgttcaccaccgacttgggtactcggcgaatctctaaataattctttcgatgcgtaagcgtgatctcattctccgtctcgtaattccgcaccaaaatcccgacgagatgcctcagggaacgtgttgtaatctaggaaagagtaatctggtatgaggtcacgtactacagaatcatcctcaagatcggaaaccagaggatgcagtaataaaagaacccttcataaagggtgaagaaaccctccagagggttgtcagctctcttgctcgaggttggaaggcgaaggacgacatctttgccaaaatcaaaccgagccgccaggtcccgaagtgattgctcggtgcaaaaggtcgaaccaggcggatcaggtacaacctttttcgtttttctttttttccttcccttgtcagatttccgcatcgcaatctgctcaatagcctagaaaattccgtcagtttcattcggcccaaagtaaagatgatcctcaactatcacctggagcaagggcttggttacgtcctgccaatttgatgttccagcctcatcagcatctggggcacgggtttttcaaacgagagacggctcacgatactttggaagatcgagttcacgagctatatcagcgacggcatcgtccccaaccacgaaagggttcggctcttcacgtgcgttagatgatgatgttgcaccgtcctgacgcactccaaaccatctcttgtttatggatcgggggaagatcgtctcaatgcatagagtcggtagaatctgagagactcattgtctgctcgggaatatttgacgagatgaaggccgaaaaacagaaaattctaatcggaaaaatcaaaataaacctaatagacgacggagcttcacctgaaaaagaaaagaatgtaaagaaatcaagatcaaatgagagaaagcaaaccttgaatttttttctttggaacttcaaatgaaattcttaaggaattttttgctacttatacagcttttagggcgcgtcgggtccagaggatattacgaaccgcgtcatgggtccgtgggctcatcaaaatacggggcacccgcgtgaacctcgggaataagcgaggaagtttccacttgtcaagggaaaagagcggctacatgcaacaaagtttgacagtcccgcgagatgaaacgtcagaagccgcgggacaggaagacgatcggtcggctcggtcatcgtactcatacatcttgtcgcctctcttaataaaaacaacgagctgggggggcaaactattggggttagatttcacccaaaagaccgagccaagcagataaagaccataaacgtctcgggagctaagtttaccacttcaagggtagagaactattcacgagacgttatctactcgggtatctattacccgacttggatgtcattacaggaaacacacctcgagccggggaaggaaacacctcgggaccccgggacagaaccaccatgcgcctcggttgttggtctagtaaacatacccgagccaagctttgacgcctcgtggatcgtttagatctggctcggaagacattaggttgcgtagaatgtgtggcgagccgaagcctagcatctcataggaggaggcggtcactaggcccgaagcaaagacttgcacatgttataaaaaggatccaaagaccatttccgaaaaacccaaaaatgataatgaagaatcttcgaggatattgtcaaatctggaagtttttctaaagctcccgaaatataaggaaaatctccttattgcgaagacctatataaggcgcctcaaggacttcgcaaaaagggtacacagaaaaaggctctcaacttcaggctatcaaaacgctatgactttgaaggctaaaaacacttattctttacttttctaaacacttgtacgatcaaatcatcgtttcttatcaataatatcaagaacaccatccgtggttacttaccgattctgttgttctttgagattctcgcgaagactgtttctttgtaagaaccctaagatacaatttccattgtgttgatttcgactctcacaactacaccgcgttgtagagagttacttagtgagcagcaaaaacaagtaagttttatcctaattttcaactacatcattatgtttcatatgcatctaattgtaattattattttttgttttcgattcgatttttgatcccggagtagccaaatagggcttcagaagtgtaaagagaaatttgtaaagcctgaaaccatatcttcatggtttacgtcaagaggaagaagcgattctttacggtgtcactcttgattccttcttattttttggtgatgcatcttctttattagtgaatacatcagacatgtgctaagtctctctaaatcgcttacgtaaatccttatattgcttgcgacatgaagagaataaaagacatggaagatgtttcatattccctcaaccaaacagatagtcaaacttgttttgctaggtagggttaaatgagaagactctgtctatttatttttaatttatgttgacacatggcaagttctcatgttttgacttgtcaagtatatgataagagatagcctattttcatatagatgatttgtaattggctattatcttgatgatgcacatcacattattttaactaataacaagttaaagttatatgattcgtgtttgttgtcccttcaacattcttcaatggttatacgggtatccaaagtacgaacgagatggatgtttattgttccaaccattttgattagtcccaatcccaacaaagaagaagaaagaaagggaatcatttttaagaaagtttttgtgttgttgatttctcggcgtagtgcttcttcccctatgcctcctatttgtatattgtattagtgtagtaagattgatctgtaataccggaaccataggtaaaaaccttttcttcaatactataattcacaattgaagcatctaaggctgcgttaatagaagatagaagattgaagattatatgatctgaatactctccaaatcgaataagagtaaaacctaaaatgcacattttcttccatgtctaatttgacattttttttttttcttgaatccctttaattactcgtcgatactttatagtctatgacatctaatgtaatttctaaaaacttacagatctttaatatttaaatttcccattgcaaccagatatggaaattcggtagttagaagtcacataattttttttagtgtcactttatatatgtaaatgtgactatagtttataattgactgaaaaaaatcagtgttgatattgttactttatatgtaaattaactatgaattaatcatatctaaagaatctattcgtactgaataggcaatgtagttatagtgttttgacatattgaataagacaaatagattaagaaaactaattcagatatgaatgtttgacaaagagaataaataattccatggttaatttacatataaagtaacaatatcaactctgattaagttaaagaaaccgattaagttaaattaaagaaagctgaaaagaacaagtaggattgacatgtatgggcgagtattggacatgtagttaaagaaaacgagacataattttatggaaaaataacataaattgatatagaaataagaaattaaaaggatatatcgtctgaaggaagcctcacacagttactatcatttttactctcaacatgaacataaattatataaactaatacattgtaaaggactataacttcaatcattgatcccatggaattgtcaaagttaccacagcttccttaaatctgtccataaaaaccaaggtttggctgagaccaagtgaacatgtttgggtccattccttgcatgtttgatctgtcaaactcgcgacggtactgtaatacttcacatgtttccattttgagcctttgtaattctacactccctttttcgttcgaaatagttattacttttagcctttcaatttctacgtgcaatttttcagtcaaagctgcaacaatagagaaatgaaaacaaacgtttgatagttacattcatcccaaaatgttttgtataaacgtttatacattgcaataataaattattttacatcctacacattaccattaaatctctgtatatcaaaaaacgttaacgaatctagaatgaacgcgcgtaatttgtttttaatttttttttatgcaatatattttacatctattttactaaattgaaattactgcacataaagaatatcttggtgttgtaagtactatcatgctaactgcaaaataagtggaatgtctagaataaataaagctgtttctaaatgagatattactttaagggtgatgtcataaacaaagttcatgcaattacgtaattaataacaactttaacccataaaactcaaacttttactatagattgcaaaactaaaagatttgctagagtattgatagaaattaagataacgtaccatcacgaagttgggcctgttgctccaatgattcaatttgaatcgtgatttccttcttctcattcatcaatattgttttatccttctgcatgtacattaaaacaatacaaattcatcaaacttcttatagataccgtttagacatgacaatctcatggttgctaattatatgatatgtttcacctccaaaagtttgatcttttcaaatattaaagcatttttgttctcaagaaattttattctatgttccaagtcaatcatgtactttaacttcctctgctttgaagatgcggctaactctcgatttttcaagattctgaaagagcatccacatagataaatgtcacaaagcatgataaaaaaacaaaaaaaggacaaataataatttagtcatacaagttcacttaccttctgactttcttaggatcagatacaatctcttgaagtttggtactctttgcaatatcttgaagtttggtactctttgcaatcttattcaattcatcatcagtataatcactgctaccaaactcgagccaggaagcatcctcttctccatcaactgaacttgaagaggaaaagttacccggagaaggaggcaacttcagtaagtaatgtaacaactatccaatgaaacagtcctgtaatgtctcctcaaaggtgccatgcctttggctgctcttctcttcacacccaaagggggcaatgaaggatttttattaaccttaatggaagagtctctactctccacaggagctgacggagaaaagctcatcgatggtaatgaattgcgacggaatgttgacgaagaagggctcaatgggggcaaggaggaggaggcaagtgaaggctgagtcatagaccgtgatccggaaggagtagtgatattgtcggatccattcattgttaaggattggagaagaccaacaatggagtataaatctgcatcatataaaacaagtcatgtttctacgtataactcatttttttacatgcaaaaaaacaaaatatcaaatagaaatgggaaaatgataaaaattaatatgatcaaagatattttgttttgcaccgtgacgatatcgagattgtcatcagttattggagaaaggagaacaaaaacacaattgaaacgtttaataagcaataaagagttgagaaaaacctctcagaaacttatgtttgtttggatggagaaaggagaatattatgtatgtttggatggatagtttgctcgaccctctttttatattggttaagaacaacacttcagtctcatgtttttatccccaattataaaaatttaatgattttccttcttaaatccataagtttgaatcttatttttgtgaaacaaataacatacaaattttgaagtcaacacatttgatggaactctgtgtctttaagtaatataatgaaaatatatttatatatatctaaggtaattacgtgttgctattgactcaatcttaatttaatttatattcttggcatgttaattatttttggctagtgagtgattttagagtgttgtttacttttgctagtgagtagttattttgacatgttgtttattttcctacttagctattttggtaaaacatttatttgtatttattgcaaagttattttggagtattgtttactttttctattgaggtagtttggcaagttttttagataaggttattccgtgttatttgtaagggttgacattttttttttgcgagagatgggaggtatcgtaaaacaccgtaccaccatatgcacccaaacaaaaccacctaaagatgatactaaaccaaattaaccgactacaaccaaacctccaaaaaaatgataacaaaatattttaaccacctagagatgatacaaaaaaaacatcaagtcaaggatccttaatccacataagatggttagtacctattgccaatatttaaccacactaaatctgctcaaatgttttgccactggtaactacactgagttgcaaagagttacttagtgagtgtttttgtttttttctccaaaaactgatccaaaacagacccagattagacatttatccaaactgtatagttataagatccaaacgggtaataaactttcccacccgaagaattctaaatccgaattaacccaaaccgaatctgaaccaaagtttgaatatataggcttagatagagagtatgtctttttgccctagtcaatccattttaacgtttcaaatggttgttaacgtttaattaatatataaaataattacatatgaagttgatatataaacgagtacaatttaaaagtgaaaatattaaataatatttttcctatcaaagactatatattattaaatttattcgaaatggttagtcacataagacggtcactccagaaggagcttacatgaaaaatgtaaccttgtgtctcaaggcttttgaaccatactctaatttgaaaattttatttgtatttcaggacatacctatctttttaacaatagtcaaaatcagtattatgttgttgtctaatatacattctaatttttctgtacttttttgttcgtttatcttcatattcaaaaactttcttgtatataggctctataaaccgaatcacacgtggatgctaaaatcctaatacctttcaaattttaagttccttaccgtattatttaaaaaataagaattatatgtttacactaaaccgtctttgaccaatgttaaaatattatcaatatgagcaatctagtaaaatagaatatgaaaaaaaaattcttataatttgtttagttttaatacacttggattaagctttaataaaatagtaaatttggataaagctttaatagttttgcatatttatgtactttaggggtttagtaaagctaagcctaaatgatgcaactgaaaaacttaaatttaaaacgcatatttaggtttcattagtctaaagagacatcttgacctccaaataatcaaattgaaacgatggtcttgatttccgcaccaataacaatggcccttcggattcacttggtccgttctcttattcggacatccattggaacgatgcccttcttcgctgcagaaatagcatgtgatatatgccgtcgttggttgggtaaccacatggcaagatcgtgcgaaatgtcccaattttccacacttgtaacatgcccttggatcataatcgtttctcctcctatcattgttatagctcgcccttgttctttctcgatcattgtctctctcttgatttagtgtgaatttaggagccatcctcaacggacgagccatcatcgacggagaaaaataaggcaattgagggagaatgagtagtaaaatcagtcccgaccttaatccagttttagaggcagagaagtctcacaagaatgaggaagaaaagtctgagaaggatgaggaagaaaagagtgaagaagaagagagcaaagaagaagagaaagaagaagaggagaaagaagaagaaaagaagaagggaatgacgacgaaggagagtcctccgatgatagtattagatccttgggcggaggagaaaatgtctcaggagtcctttttgccaaactctaaccccatctctcccttagaataacataaattaatttggatttaattttattctgaaaagtagggattttacaaatataccccaactgaaattcaactttacagagaaaaccaggatctattcgaaccctcacccgacccatctctcccaagcgggttttccaagtttcgagacttcaatttttgagcggactgttcaatttctctctttctcctttctcaaacttgccctccgttctcaacaacgaagaaccctaatctattcttcaccttcttctaagtgtaactgcaaccctaatctccttttcttattcttctccttcttctccttcttctccttcttctccttcttctccttcttctccttctctcaatctctcgatttcttgttttctcgtttcagataatgcctgtaaagaagaaaactgggttaaagaggaagagaggagtagcaacgaagctaattgataaaggaacaaaagcaacgacggaggagccatcctcgacggagcaaaataaggcgatagaggtaggaggagtgaagaaatagtcccaaccttaatttcggttttagaggcagtgaaagaagataagtatgacaagaatgaggaagaaaagtctgagaaggatgagcaagaaaagagtgaagaagaagagagcgaagaagaagagaaagaagaagggaatgacgacggagaagagtcctccaatgatagtagtagatccttgggcggaggagattatgtctcatgactacccttttcccaaactctaaccccatatctccttgaaaaaacagaatttagtttggatttaattttattacaaaaagtggggatttaccaatatactccaaccgaaattcaacttttacagagaaaacctggatctattcgaaccacacctaacccatctctccccatcagatattccaagtttcgtgacttcaattttcgaggaattgttcgattcctctctttctcctttctcaaactcgcgctcagttctcaacaacgaagaaccctaatctattcttctccttcttttaagcgtaactgcaaccctaatcgcctcttcttactcttctcctccttctccttctctaaatctctcgatttcttgttttcgtgtttccgataatgcctctaaaaagaaaactgggttaaagaggaagagaggagtagcaactaagccaattgatagatgaataaaagcaacaacggaggagccatcctcgacggaggagccatcatcatcagagcaaaataaggcaattgagggaggaggaactgaagaaccaatcctggccttaactccggttttagaggcagtggaagaagagaagtcttacaagaatgaggaagaaaagtctgagaaggatgaggaagaaaagagtgaagaagaagagagcgaagaagaagagaaagaagaagaagagaaagaagaagaaaaagaagaagggaatgattgttggggtcggatttccccaaaaagaccgagccgagcaagagagactagatacgccccgggatctcagcttactacttcaacggtaggaaaactattcacgagatgctacctactcgggtattcattatccggctcatgtgccactccaagaaacacacctcgagccaggaaaggaaatacctcgggattccggtatagaactatcgcgcggctcggttgttactccagtaaacacgcccaagccgagattgggcgtctcgtggatcgtccagggccagcgcggaagacattaggttgcatagaatgtacaccgagccgatgcctagcgtttcatagttgcccgaggcaaagacttgcaaattttaccaaaaggagcccaaagaccatttccgaagaatccggagatgataataaagaatcttcgaggatatggccaaatctagaagttttcctgaagatagaacgagatataagggaaatctccttattgcaaagatcctcggtcgccgacttaaagataaggggaaatctttcaaaaatattggaagaggcggtcgttaggcctatataaagcgcctcaaggatttcacaaaaaggggacggaaaaaaggctatcaacttgaggctatcaaaacgctctgactttgaaggctaaaacacttatctttcacttttctaaacacttgtacgatcaaaacatcatcttttcaataataatatcaagaataccgtccgcggtaattgaacaattctgttgttctttgagagtctcgcaaagatccattttttgaagaaaccctaatacaattttgattgtgcgagtttcgactctcacaatttggccctagtaggagggtaaaatagatttctcttactccaagaacacagaaccaaccgatcaagcaacaatgaccaacaaccagatcccgctaccatcgttgacgcagagggaaacccggttcctccagtctaggcaaacgcccctgaagtcgccgctcccgcagtcctagtagagctgaggagcatgatggtacaactccagaagaaggtgaacgattaggagcaagcaaaccagttcctggcccagcagatcgaggcggttacttctcaagggcaggtaaggaccactcgcttcggcgcacgacactttcatgatcggcgagcagcagcagatctcaatccaacgagactcatgttcaacacacccggtaactcaacgaggccattttggctgcgccagcactcggcataacctgaacagaaccaacagcctcgggagaacagaacatgacgaccagagtggaggaagcctacccacgggtcccaattccccgagccgaaattgacgagactgaccagatcgaaatctctgatggcgaagattcggaagaaaacattagatgcgctgaggaataagctatggagcaggaaataaatgccatcaagctctccctagccaaagcggaaaacgagatgtagctcgtacgatcacagatgcataacgcagtctcctcggccctaacaatcgattgcattctagaagaatcccacaacacgcctttcactcgcaagatctctagcgcgataatttcagatccggggaaactaagaatcgactacttcaacggatcatcctaccctaagggtcatttgaaatctttcataatttatgcggcccgagacaagttcaagccggaggagagagacgctggtctctgtcatctgttcgtagagcacttgaaaggaccagtcctagttttattcttaagacttgaaggaaattttgtcgatagtttcgaggagctttcgacgcttttcctcaagcaattctcagtgcttattgatccgggcacattggattccgacctttggtcgctatctcaacagccgaatgagccgctcatggacttactcacaaagttccggtctaccctagctagtgtggagggaattattgacgtcgcggctctctctgctctgaaggaggcgctttggtacaagtctgagtttcgaaaggaattaaatctgtccaagccccaaacaatctgcgacgctctgcaccgagcctcggattatgtttcccatgaggaagaaatggagctgctgtcgaaaaggcacgagccgtcaaaacaagcatcccacggcaaaaaaattccaccctagcgctccgagccataaaaagcgcgcccaaggcgggacgttcgtacatcacgaggggcgaaacttctccagagcccacaattatcaagccgacatgccccgagatcgagggcgaggccacggccgaggtagtggacgagaatccttaactttgacgaaggaccaccctgcaggaaacgagcaggaatactgcaaattgcacaaaagctagggtcatcatacctctaggtgtcgtagtctcggggcgaaattggcggccaagttcttagctggtgaaatcggtggaggcttgaccatcaaagatttagaagcggagaaagccaaaaccgagcaggtaaatattgtggtgaaccccgagcagacagcccctacggcaaaccccgaaggacccaagagaggtagaggcaaccgcgaggcatatgacgatgaatcggaagctgctcggggaagaatcttcacaattctaggagattcggtcttttgtcatgacacaacgacatcaatcaaagcttatcactcaaatcgtaacttgacacgaccattcaacggaccagatgacaaagtcactttccatgagagcaacattaactgcttggatcagccgcacaacgaccccttggtcattacattgactatcggggctttcaacgtcgagcgagttttagttgatacaggaagtgatatatccctatttttactgtttttaactatgttttaggtataggttttagagtctaattgttatttctagagtcttttctaatccttttcaggtctatacatgtttgagatgcatttggagattatggagcattctggagattaacagacaacttaagctgcagaagcaacccggagacgaaaatgcacgtaggtgtcaaacgacaccacacctggtgtcgagcgacaccaatacctgacggcaatttcgagacgcaacttattgatgttttgaagatttccaaattcggcccaaaactttctcctctatttaattaaggcccaacacgtttttaatacatatatatatatatatagttttaggtcattgttttagatcctaaccttggagaggctattctctatctcttttgtactttgagagcacaaccctgtggagactccctttagagaagatctttcttactctttctcttgttatattgattattgatttcttattcagactatgatttgtgtttctttgatcatgtcttaatagttttcttgttaggtttagggtttctcattagggatttagatgatttagtagattgcccccttgctaggttatctgtaggatttttcatcttgattgttcttaatgctagttctagagtagctaactagaacttgatattagataataggtattcccaccataggtacttgctatttgatccatcatagatgagcctaggcatttaagaaagaactggtaggctcatagaagggctctggtttagatactaggtgaactaatcaaacatgataataatgcatgatttagcaaaggatttctcggcttctccggttatcttagctctaagtatagagggtttcgcggaacgccacctgttactctaaaatcatagtttgagtttgagaacggttcgataacaacttagctatttatagatttactatcatctatttcctgagaataccctaagcctgacgtttttattatctattttcacaaccatacaattcgctattgcttacttttgtttctcttattttcattactgttttacttcgcttaattcaaaaccttagtttattgcgtgatccgagaactttgtgaattcgatccctaagtgctgcaattgacctctttatttgagagagtggtcttaggattaatttgacatatatcaaatttggcgcctttgtcgaagttctctttgattcaccattagactaggtgtagaatttaaactaagcttttatttttctttcttttgtttctcacgcgttttctttcttctcttttctgtgacaagggagctaaaagatggaacgcaacaaactgctggcagatttcgacgatagtgttgaccgacaccaactgggcagcttggattagattcaaatcctattagagagaatgtccccaacatggtttccaacagagccaactcatcaatatcttctacagacggatagccacgccataccagactcaacttgatggagcgagctagtgtaacttcatgacaaaaactactagtgaagcattactcctcattaccaatgctttaactagtctttcgacacaggaatttgacactgaacgaagaatttcagctgagatagctaccgcaagcaaagaaactcatgtttcagcaatttttgaccctatccacgccccccccctccaccctcatcggagaccagaatggaatctatgcttgcgcaacttcttgcaggcctaacaaagctcgaaagcaaacatgattctctctatagcaagattgacaatctacgctctcatacatccgagctctcacctccacctctatcaatatagtcacactacctagtggaaagcaactaaacccaatccttcatcgcgaatgttcagcttagacttcatttcgtccagttgcaggaaacgtctcagtgtcgatcgatacatcagggtgtcgatcaacgctaattaatcttgacgacactgttttgactttgtcgagaggaaccaataatttcacagaggaggaggcgcttattcccgatggtgtcgaacgacaaccacctcatgtcgatcgacaccagcaccaaacagacaggccagtgttgacgtttgatagagcaggattgagtctagacagtggtgtcgaccaacactcacctagtgtcgctcgacactagactcagactccacctatctgccttgaatctccgcctattgcttacacacaaaacgtttattgtctactgcctcgacagtccaagcagaaattcgtgatatgcattgcatgggtatcatcgatgagactctacttcagttgcctccggttgatatagagaagttgtcaccccctcttcagagtgatatgctacgagatgatgctccagagaagcaagttgacaagacaacgataagggttgtctcagaacaggtactcagcaacagcaagcgcccacatgaagcaagctccagattcgctgctgagaattgatctatagagatggtgtcgatcgacaccattacctatgtcgaccccaaacgggctgaaccagaactatctactaaagctgctttgcaagttcagaccactgctgctgttccaggacctgttgtcacaccaaccaatgcacctctataactgcatccacatccgaagaggcaaaggtactcatctcttcctccagatataatcaatttgactttaaaattttcaaagactgtttcacggtttagcaagccacgagtttctcatcgagcgcttgtttattcttttgatgattgtgcagttaaaagaagtataccacccatacttgagtctcaccctgctgatgttccacacttctttggtctacctcacacaccgagtgcctataagccaccttggatgatgagacgtctttcaaaaaagcatttactgccaccttcagatccacttgatccccatactccatcaaagtcaagctattgactctaaacaagcgcttagtgggaggcaacccactggtatggttatcttcttctttttcttttattttactcgcttactctggatttgaatgccactagggacactgtcgtttaagtcagggggaggttcttactaatattggttttatttttgatttttatgatttttcgtttttgagtttattgaattccaaaaagaaaaaaaacgtattcattagtttatttaggaatcatgatctatatttctttagattattgccttgttaatgaatgctacaggttcgactcaatccgactattcgaaaattcagatagcaaaccaacagacttgaggatatcctagtttccaactcaaccactaaggctggagctaatctcactgctcttccttttacctcttaaaacggttagtattcatagatcttgactccttgttcatacctgatattgagaccaaagtgataaacagaatatgttcctctccccttaaaaaatataatgagagattgagacgattttcagatagtgtataggggtatgaatgtttcctatgaccccattattatgcattatttggaatgatcaattacaaaggttggaaaaatgccgagggtgtcaatctagtatgcgagttcccctttgtttactctctaaaaagaataagtctggggagagaaagaacaccaaagaaaaaaataataaaagaatggtcgatttatcatggtatagtacaggaatgagtctagaaagatcttgaatgttagcttgtttgatgagatccatcgatgaaagcctggtggatattgttgtggaccttaggtatggaatctagaatgttgtttaagctt

SEQ ID NO: 212 - DNA, 92260 bp, Arabidopsis thaliana
aagctttaccatataaaagatgaaaaggtgtggtaccaagcggagttttgaaagctgtcttgtaggcccacagtgcatcatataacttgtaggaccactcctttttcgctttacccactgttttctcaagaatctctttgatttgtctgttagaaacttcaacttggccgcttgtttgtggatggtagggggtagcaacccgatgctggactccatattgtaaaagcaatttctcaagaatcttgttaatgaaatgcttatctccatcactaatgactatgcgtggcactccaaaacgagggaagatgatagatttgaagagtttcatgacaaccgctgaatcgttctttagactagctatagcttctacccatttggagacataatccacatctactaggatgtagagattcttgttggaaggtgggaatggtcccatgaaatctataccccagcgatcgaagacttcgacttcgagtctaaaatttggaggcatctcattacgcttgctgatctttccccttctctgacaagggtcacattgtgatatgaacttctgagtatcccgaaacattgtaggccaccaaaagtctgcttgaagaactttggatactgttttgaaagttgcaaaatgaccaccatagctagagctgtgacaatgtgatagtatagaaggaacctctgttgcagcaatgcatctcctgtaaattccatcataactatgcttatagagataaggctcatcccattgatatcgcctaatctctcttaggaatctcttcttgttataatctgtgaaattatcaggctccacatctgcagctaggtaattaacaatgtcagcataccatggataatctttttcgaccgctgtgacggcgcaattctcagttgatgaccattttcttgtcgattcagaagggtgtcgatcgacaggtgcaagggtgtcgatcgacaccatcgcgcaactacgaatatcaacttcctctgaaatgtgagtgtcgatcgacataatgggagtgtcgatcgacacttacgcacgatcctgcaacctgtcatgtttgtagacatcgtcttcaactgtatcaatcatgtatatgttctcttcaggcaagaaatcatttatagggacatcatcatcgatcctaatgcgtgacaaatgatcagctacaccattctcaactcctttcttatctctaacttctatgtcaaattcttgaagaagcaaaatccatatcaaaagtcttggcttagcatccttcttttgcattaaatacttcaaggcagcatgatctgtgtgaacaataaccttggatccaacgagataagatctgaattttccgaaagcaaacaccacagctaacaactccttctctatagttgcataattcctttgagcatcatcaagagttctacttgcatagtagattgcatgaagcttcttatccttcctctgtcctagaacagctctatctgcaaaatcacttgcatcacacattacctcaaaaggtaaatcccaatctggtggctgaacaattggtgcgctgatcaaggcctgttttatctgctgaaatgcatcatgacactcctgtgtaaactcgaatttgacttccttacagagtaaagcagtcaatggtcttgcgattctgctgaagtctttgatgaatctcctatagaaaccaacatgtccaaggaaactcctcactgctttgacattatccggtgcttgaagacttgtcatgacctcaatcttagctccatcaacttttataccatgctcagaaatcctgtgtcctaaaactattccattctgtaccatgaagtgacatttctcccaattcaaaactagatgtttctcctcacatcttgctaacactttgtagagattctctaaacaatcctcaaatgatgatccataaactgaaaagtcatccacgaaaacctccatgatatcctcgatcatatctgtgaagatagacatcatacctctctgaaatgtcgctggagcattacaaagactgaagggcattctctgataagtcgttttctcctggtcatctggatgaatcgggatctgaaagaatcctgagtatccatcaaggaagcaataatacttatgattttctaacctctccaacatctgatcgataaatggtaaggcaaaatggtctttcttggtagcagcattcagctttctgtaatcgatgcacatccgatgtcctatgattgtccgagtaggaatcagctcgtctttctcattcttgactactgtaacacctcccttcttaggaaccacatgaactggactaacctaactgctatctaagattggatagataatccctgcttccaacagtttcataatctctttcttaaccacttctttcagattcggattcagccttctcttatgttcgactgaagacttagactcatcctcaaggtgaatcctatgcatgatacatctggagatatacctgcaatgtcatcaagagaatagccaagagctttgcgatgattgcgcagctttcttagcaataaggtgagctctacgggattaagagaagcattcacaataacaggataagtataattttcaccaagaaaagcataccttagccctggtggaaatggtttcaattcgattttaggagcctttgctggatcccaatctgaagtaggagtcggtgttgaagtcacagatggaagagcttcttcaactgtaagtttcatcacatgttcggtctcatctagcagcttagtatatgttgaagtttcgcagtccaaatctgcactatcctctatgaaagagaccaaaactcgctctagtgggtcttctaattccatctctgaaatactatctgaagctgaggaagtgaaagaatctatcaagaaggttttcccttctatgatcggtttcttgaccaaagtgttcatatcaaattgcatagtaagatcgccaacattcagccctatcctcccttgtcaaacatctatgattgctccagctgtatgcaagaaggatctccctatgattaatggatccttaggttccttctcataagccaagactacaaagtctataggaatcatactctttccaatcatcacgggaacatcaataagaattccatccgaaattcgggtagaacaatctgctagcacaagagtgataaaggtaggctcaagattggaatatccaagacgcatagcaactgaacgaggcataagattcacactagaaccgagatcacataaagctcttgggaatgaatcatgattaatggtgacactaactacaaaagtttcgggatcaggtagccttcttgaaaccgtgatgggggccctgagtggtgtagcttttaaacctctcccaagcttcacagaaagttttattgtttttctgtgtgaagcctgagatctcgttcctcaatctagtggtgcgagcgttagagaagaacttggcaagaaaagctttcctacaatcgtcccatgagatgatgaagtctgggggtagagtcttttcccagtggtgtgccttatctcccaaagagaagggaaatagtctgagcttaaacatatcttcaatgtcaccattgatcttggtaaggccagagagcctatcaaagctgtcaagatggttcaggggatcttccataggtagaccatgaaacttgtttccttggatcatggagatgagaccactcttgatctcaaagttgttgttctgaactggtggaggcactatcccttgtctttggtgatgattccctggggcatcatcatcaccaatgtttctttgtttttcttttccttttattttttttgtttttcttttatttttctcgcttactccggatttgaatgccactagggacagtgacgtttaagtctaggggaggaagttactaactatgtttttcttttttgagtcttattcttactcttattttccttatttttgagtcgttttattgagtcaaaattttgttaggaattatgatctctattctttagattattgcctggttgattaatgctgcaggtgcgactcaatccgactattggaaaatctagatggcaaaccaacaaacttgaggatatcctggtttccaacacaatccattaaggccggagctaatctcactgctcttccttttacctcatcaaacggttagtgttaatagaacttgactccttgttcatacatgatattgagagcaatgtgaaaaaagaaaagtatttctctccccttattaaaaaaaaagaaagcaagagattgatatgatttttggtaaggtataggggtataaatgtttcctatgaccccattattatacattattaggaatgatcaattacaaaggttggaaataagccgagggtgtcgatccagtatgcgagttcctgataaggaggttttttaggcctacttatatgctgaagggtgtggttcagttcaattaccctataaacactaacatgtcgatgcagctatagggggtgtcaatccagtccactgttattgctagcaatcaagacgtgtacagaaacaactaagtcaagccagattataatgatggtgggtttctagtaataatcctaggtcaggattcaaacaactaaaaataagaacttaaaagccctactcgatcattgggtcgagtagaaccaataggcagaactaaaatgcaatcaacaggggatacaaataggagatacaaataacaggtaaataaaagtgcaatcaacaggggatacaaataaatctaatagaagtcctaaggatggattcattgataagggcaactctatggttcattagatggctaatgggtgaaaggtagatacccttgacgatagattcaaaaaccgggtcaatccactgtcgtgacagagacccccataactctaccacttcctaatctcaactgtcgttgatgaaacatagcaagtagggtttatgaaacaatctaccaaagccaataagcagacaagccaatgtcttggtcgagtctacaaatctctagaattcgtagatcaaacatccattttaacgtcttttggacgctggacgtctatgatcgaatctccatattagccagcgaaaaccgcataggagccaagcaaatctataagggttctaacctaatcttaaccacttaactaacctagagattaccctaatctaatccatcatcaagaaccctaatcattactcaagcaacattctcaagaacacaaacccagaaattactgaaatcatacaaaaatgcagatctaaacaagctaaacaactttacttaaacaactaaatgcaaaaacgaaataaattaagagtaattaagttttgaagattcataaacacaaagaaaaactaaaggataaaagcttgatcctttggacaaactcgaaagtgatctatttatagtaaaatgtcgaaaccctagattcactagaagacaagagacttgaggcggtttgggcgaatgctcgatcttgaggatcgagtaaggagggtgctgcaaagtctgcgcctttgtgtctatgctccgagtgatcaattggtcgagtagatgcttcttcctctcctatccgtatgctcagatgtctggttgagtggggaatgaggaggatccgaagacgctttgatagctcaacaagtcttgtagagttggtcacccttggtcgagtaaatgggtcgagtagaggatcgagtaggaggggcgagtagatcaatctgctgcttcatctaaggctgccttgatcgagtaaaggggtcgactgaattgatgcctcttctgtagctgcctggatcgagtgaatggatcgagtagagtcctttttagctccttctacacctgaaaacacaccaaaatatgcgatgcgtatgcaagatgatcctagatgcctaagtatgcaaaataagcttaaatggtgcaaaatgatatgatacaatgagtaaatgcacagctaaataatgataaacatacacctaaaatgagtaaaataccgtctgggggagagaaagaacaccaaagaataaaaaatgagaatggtcgatttatcatggtatagtacaggaatgagtctaaaaggttcttgaatattagcttgcttgatcagacccagcgatgaaagcctggtagatatagttgtggaatataggtattgaatctaggatgttgtgtaagattgcagagaagtacatgttggttaggatttaattagacttgctaggcatatggatttggttaggatgatcattgcaatagactagagaatgtttggagttcctttgttttcaaaacctcttccacgggtttggcttttgtgttttgcttgagggcaagcaaaagctaagtctgggggagttgatatatccctatttttaccggttttaactatatcttaggtatatgttttagagtctatttgttatttctagagtcctttctagtctttttaaggttattacatgtttgagattcatttggagataatggagcattctggaggaaaacagagaatttatgcagctgaagaaatctagagactaaaaaccgcatcggtgtcgaacgacaccaccgctggtgtcgagtgactccaatacctgacgacaattcgaagacgcaacttattgatgtattgaaaattttcaaatttggcccagaactttcccttatttctaaagaaggcccgtcacgtgttttaggtcatatatatagttttaaaggtcattgtgtagaccgaagcttggagaggcttgtgggttctgaaatccacactagagatttgtaattgagattatgagaaatgagggctagatcttcacggaaaccttgagagttatactgttaagaacgaatggactttttgtattgattataacaaagcttttacaaagtgaaaggagattacaagtgtaaaagtatgtgtgtgaatgtaagctaggttgaatgtgtctttcaagtcgtccttgctccttatataggtctacgcacgtggtagctccgtccgggatctgcggagattctcttggatattcggcaggtccgttccgagatatcaggtccgctccgcaaatatctcctcgttagttcctaggttgttattcgcttatctcccttcatcaggtgaccgggcttatcaagcccaagtacccattcgcgtatgtgggctcatcagctgcgtaggtcctctacttggtgggattggtgggctttgtgggcttgattggtttttttgcaggtggattcctgtaggggaatccagctccaacatttgccccccaacccattgagtgagtaggcgaactcgatgagtggacatataggtcaggtaagattgcgaaaatattccagatgaggtgatagatatgataagatcagtcggttttgaggataaactcaacaaaaacgatttaatttcaggttcctgaaccgaaatattttgagtacatacgcaagacaaatcggtgttggcgtggacgaatgagatggagcgtctcttcagcgcaccgcatctgacggcccagatcaggcgcggggaagagatctctgcaatctcgaaaaatcgtggtgatgatggctcctttaaataacttcccacatctccacttgatttcatgtcaactcacacgactctcaaggtaacttctcttcatcttatctatttactacgtttagttttcatttttagagatagaaaagtttcacctttcttctgctatctccatcgttttctttctcttctgctcccttctttttcgatcttccctctttgctttttccttcatctctctcgtctttctccatcaaaatcaagagatgagcaacctagaggattcccagaacaagagcaaccacagttacgccgacgacgagagttcgtcaaagacggggtcggcggcgtcaccgccgcaagtacaaaggcgcgttataaccctaggcggaatgggtccaatccgtccgccgtcgaccagagccgacaagccaaagaagaagaaagctcccaagcaaaagggaggcacgctgatgacaaacaacgaccttgttgagagttagtatcgttactaacgttatttttcttttgatggcttgcggcaagaaccaaggaggttactctctcagagacggaactcgagctgttaacccttctccgacttggtcagaccgactgggccacttttagcagagatagcatcgtagctgctcttgctgtagctccagcagttcccgcaattgtccttccagcaacacatcaggatccgatcgaagaggtcctgcggattgaaccaaaccttgaggcagacctgcctataagtacgagtttcatctttttttttgtgtatgagtcattgcgcgatcgagctacaaaataacaaatatcgtgctttgtttgttcagttcctcctgactccagctctacttcggacctcccgctcatttctagaggaagaatgaggcgaccaagtcttcgtgttcaacgagcaaacaccggggctccggctcgtgctggtgatctattggccgtggtgactgcggctcggaacagtctagctatctctagcgcatctgcctcagcttctcatccgtcgcttcctgagttcaataccgggacctctattacagcaggtcaggcggataacaatcaggtcgctcaggtttctgagccatctgcggctgttcattctgatggtgcactgtcttctccgaagagagctcagacccagccggaggtgcgcctggaggctgagcttatcgtgatcgatcaggaggtcgctcctcctagagaggagagggcgaacctgtggctgctaacccggaggcagctatgtcctcagacaggcggaggccgaggatcaagaggtgggggcaggtcctccttccaaggtctgaaccagtctcaggaagtgagatagtcgtccaattctggtggggggtctgcgggaagcagacctttccactggtcttacactcacgaccgtgatcatccgatcgttgaggaggaggctgggttggcgaacctgcttcgccacatcaaaggaggaactgccagattctcgaagtgaagaacatggccgaggcttcggcttatgctgacatgatggcgaaggagggccaggtgacaatctataaatgcctccttctaattcaattcttatgccagttctaatcttagttttgcctttggcaggcgatagctgccacgaacaagctggttgctctctatgaacaacgtctgagcaaggttccctcggcgagtgagctcgaagaagggaagacccttatccaggagctgacagcgagtgtgaaggctggtcaggagcgtgaggtttcgttccaggtatgcctcggttatgacttgtttgtatatattttatcgatggtacgatgattctgacctgactatggtttcaggcggagatcgagaggttgaaaatggagctgtccacttcgaaagatgtgggttatgaaatccacactagagatttgtaattgagattatgagaaaggagggctagatcttcacagaaacattgaaagttatattgctaagaacgaatggactttttgtattgattatgacaaagcttttacaatgtgaaaagagattacaagtgtaaaagtatgtgtgtgaatgtaaagctggattgaatatgtcttacaagtcgtccttgctcccttatataggtctacgcacgtggtagctccgtccgggatctgcgcagattctcttggatattcggcaggtccgttccgagatagcaggtccgctccgcaaatatcttctcattagttcctaggttgtaattcgcttatctccctttatcaggcgaccgtgcttatcaggcccaagtacctattcgcgtatgtgggctcatcagctgcgtaagtcctctacttggtgggcttggtgggctttgtgggcttacttggtattttcgcaggtggattcctggaggggaatccagctccaacatttgccccccagcccattgagtgagtaggcgaactcgatgagcggacatattagtaagataagattgcgaaaatattctagatgaggtgatagatatgataagatcagtcggttttgaggataaactcaacaaagcgatttaatttcaggttcctgaccgaaagattttgagtagatacgcaagacaaattgctgttgacgtggacggctgagatggagcgtctcttcagcgcaccgcatctgacggcccagatcaggcgcggggaagagatctctgtaatctcgaaaattgtggtgatgatggctcctttaaataacttcccacatctccacttgatttcacgtcaactcacacaactcccaaggtgacttctcttcatcttatctatttactacgtttagttttcatttttagagatagaaaagtttcacctttcttctgctatctccatcgttttctttctctgctgctcccttctttctcgatctgccctctttgctttttccttcatctctctcgtctttctccatcgaaatcaagagatgagcgacctagaggattcccagaacaagagcaaccacagttacgacaacgacgagagttcgtccgagacgaggtcgccggcgtcaccgccgcaagtacaaaggcgcgttataaccttaggcggaatgggtccaatctgtccgcagtcaaccagagccgacaagccgaagaagaagaaagctcccaagcaaaagggaggcaccccaatgacgaacaacgacctggtcgacctttggaggagatgccaggttccagtgggggtgactatgatactcccaaggccgtcgttgcatcctgagaacgtgccggccgagtgatgctgcacttacgccaatttttttgagaaatgtgacctattttcctgattccggcttgcatcctcgagatgctctattgcctcggcctcgcctttcctcagatgtgcccgaactttgtccgccatgtactggcgttattaacccgggcccgggaaataaacagagaattcggctgccaggtcaagaccaatgctaggagcgaccaagggacgtactacatcagcgctcgtcccggatctctagtcctaagcaggttgaaggcctgtcggaacaccaattggcgatccaagtacttcttcttcagattagatcgtcattcgatcggcagttttgatcccgcaaggatgacgagaacctggtataccaaccatggtaagatggagatcagagtctcttgattttgttgttgtttctgttggatctttgactgcttttgttgagcgttagtatcgatacgaacgttatttttcttttgatggtttacagcaagaaactcgagctgttaacccttctccgacgtggtcagaccgactggccacttttagcagaggtcgcccctcctagagaggagagggtggaacatgcggctgctaacccggaggcagctatgtccacagacatgcggtcctcgggtaggtcccaagccggatgccgagtatcaagaggtgggggctggtcgtccttccaaggtccgaaccggtctcaagaagggagacagtcgtccaattttggtggggggtctgcgggaagcaggcctttccactggtcttacactcacgactgtgatcatccgatcgttgaggacgaggctgggttggcgaacctgcttcgccacatcaaagggaagaactgccagattcccggagtgaagaacatggccgaggctgcgacttatgctgacatgatggcgaaggaaggccaggtaacaattgataactgcctccttcaaattccattcttatgccagttctaatctctgttttgcttttggcaggcgatagctgccacgaacaagcaggttgctctctatgagcaacgtgtgagcaaggttccctcggcgagcgagctcgaagaagggaagaccctcatccaggagctgacaacgagtgtgaaggctggtcaagagcgtgaggtttcgttccaggtatgcctctgttatgacttttttgtatatattttatcgatgatacggtgattctgaactgactatggtttcaggcggagatcgagaggttgaaaatggagctgtccactttgaaagatctcgagaaaggttgtgctgagaacatcgggctcatggagatggaaatttggggattgcaggctaacaagcagacgacgagaaaaggagtacacagtgctggacctgagttcgactgcgtaaggagcgaagaagacggttcacgatgctaaggttagactggccaccgcatattcgaggttgctggctgggatcaaggaaaagtgggtcgccaagaaggagtacacagtgctggaaggtcaagcggtcgaggtggagtcgaacctggctttgatcgaccagatcacgaaggctgctatcgatttgaccgtggagagacctcggttgcaagcggaactggatggcctggatgcgcagtgcaaatcgaaggaggtatcagacttcactctaagcaagttggatatcccgccggttttggagatgtcggtggtacgtccgatggacgtcgacaagcaaggaacgccaatcggcttggatgagttcgggagcaacaaagatgcatttcctagaggtctcgcggagggttctggtactgtctttgccacgccggccggggaactgaaagagtgatcacttacgctcctcctgttaggcttttgtgttttttgtttcggacttagtgcctgggaaggctttcatccttttgtttgtttctttttgaacttggtgcctaggaaggcttttatcctttgttcagttaagtactttgatgcctaggaaggcttttatcccttttaacaagtacattttgtcttttattcgtgtgttgatacttcgtcgattttggtgtatgatcaccttgttttgttcatgttccgaataataattggacttgttttaagtccaagttatttcggatgtgatatggtatattcttcgtaggttcaaacttgagtaagtttgagtggtttatctcgggaacctgttgaagtgaggtcacacaagggacctggcagattttgggagctgggcttgtggtatcgccagatcgcgaatgaaaccttcgtttcttccttatttagtttgttatgtgttgatagcgaaggaaggagttagatatggttgtagtaggtgagctccgatgaagtcgaagtgatgtgtttttataggtaaagttcactgtcgactttttggaagcgagatcacaaagtggatccgccaacattcggatgttgggctttgggtatcgtaagattacgaatgagttttaaatcgtagtggaaacgattgttttgcgaaacatgatattgagtatcaaaattttcttttattcttatctcgaaattgttgagtacaaatgaggtaaagcaaacgacgatctggtgtctggtcacctggaagggacctgcttggtatcgagggatggttgaactgttaggtgagcagctaaccttctttgatggaaaatgtgatgttcgttttccttggtgagcgcatacctggttaggggatcaagccttatcgtactacaattgaaatggtggctgcgctcttggggggagctgcctacgtactctgccaagggatcaagccttatcgtagttcgattgttttggagtacctatacgtggtatttcttgagatgcatggcattccaaggtcgtaactcaagtactccgttgataactttttcgagcttataaacgccgtcacgtaccacctcggtgattcgatagggaccttcccagttagttccctgttttttggcgtttagctctctcgtgttgcttcatagaacgagctctcccacttcaaatctccgaattttgatattggagttatagtagcgggcgacagcttgttgatagttttgaactcggatcattgcctgatctcagcgttcatcgatgaagtccatgttgtcctataacatttgcgtgttcaggtctgagttagaagaactggcagtccttatcacgcttggtactatggttttgacagggattactgcttctaaacaataggcgagagagaacggtttttcttatgttgatttgcgaggtgtagttcggtaggcccaaagaactacgtggaatatgtctgagtgagtacttatcgcacatgagtgagtaagctatgcaatcggctagcattgttggctagaagtagccttgctttttgattctgagggcgagggtacgtccactgcagtggctaccacattgtccttcgtgcatgcgtttcatgagttcttttgtttgttgcccgtaggtacacaccatatagggacctgtgacactacgtttcataagtctcccttccatgatgcagtaccttgcactctaggctttgagttttctggcctcccacttgtcgggaggtgtgatctctcgttcaatgtaatcgatgattgggattctccagtcattgtacggttcaggttcgtacggggcaggttgttcgggggttttgagctctggctcctcttccgttgcacttgcctccgcatctgttgggagagccctggctgcggcggtggtgcttcgggttactcgcgtgaagttgcaagttgccgaggtttccctccaagcatgtttgaccgtaaggtcgatgcttgggtgttctattccttcgacagggataattattttgacgaaaggatctgacgtagaagcgagagctgccaaggcgtctgcagagatgttttctcctctggggatcctagttaattcaaacaattcgaactgttgggtcaatgttttgaccagttcgaggtacgcttccatgcactcgtctttagcttcgtattccccgtggaactggctagtgacgtgttgggagtcgatgtgggcgtgtgtatcgcagatctccattccttaagctagcttaatgccagcaatgagagtttcatactcagactcgttggttgatgcgttgaatcttagtcggaacgattgttcgatgacttccccggtgggggaggtgagttgtattcctactccggatccttgccggttggaggagccgtcgacgtggaggagccatttctattagagttggttccatccaggtccgctaacaggatctcgattacaaagtcggctaggacctgtgctttcaagctggttctggtgcgatactttatatcgtactcgcttaattctatggcccatttcgcaagtcgacctgattgggttggactatgtagaatggttctgattggttgggacgtcatcattacgatggggtgtgattgaaaatgtggtctcagtttttgagctgacatgactatggccagttcaagtttttccattgctggataacgggtttcagcgtctatcaacgttttactaatgtaatagatcggtttttatcattagtgatcttccctcaccaggacaccgcttatcgcggttcgatatactgccgtgtataggtatagcggttctccttcttcgggttttgcgagtatgggtggttcggacaagtatgctttcaattgcttgaaggcttgttcgcagtcctcattccaatcaaactttttctcctttcagaggagctgatagatagggacgcatttgttggtgaacctagatatgaacctgttgagggcggcgatacggccagtcatccgttggacctcccgtgccatttttggtgaaggaatatcgatgaaggctgcaatctgcttaggattggcctcgatgcctctttcggttactaggtatccgaggaattctcctgatggaactccgaaagagcatttctcggggtttagcttcatttcgaatttgtttaggattttgaagtattctcttaactgcatgacgtggtctttttcgtgagctgatttgaccagcatgtcgtcgatatagacctccatcattttacctagctggtcagcgaacattctgttcaccaatcgttggtaggtagctccaatattttttaaactaaagagcattactttataacagtaggtgcctcggtcggtaataaaagctgtttttttttggtcatctaggcgcataagtatttggttgtactcggagaatgcgtccatgaaggacaatagttcatgtcctgtagtggcttcgaccagtcggtcgatatgcgggagtgtgaaattgtctttaggacatgccttattcaagtctgtaaagtcgatgcatactctccacttcccatttttctttttaacgacgaccgggttggcgagccagttagggtattttacttcccttatcgatctgatcttgagcaaccggtcgacttcatcgtgcacagctttggccatttttggacctagcttgcgacgtttctgctttatagatcggtaggtcggatcgacgttgagttcgtgtgaggttacctcgaggcttattcctcggaggttcgcacttgaccatgaaagctgtctttgtttatcttgagaaaggttatgaggtcctcacgtattgctgggtcgaggtcttgacgtatcccaatgcattgtttaggatctgattcgtctatgcagaccagcgttatcaatgatttttgaggtccgcgttgagaagggtcagagaatctgactgttttcatttctgcgagtttgtcctctatcattagtactacggggtcgacttttttgatatgctcgtagccacccatatagcatttttgggagctgcgttggctgccgtatacgactactatccctttatctgaggggaatttaatgcattggtgataggttgatgggacctttttcatgaagtgtagcgatggtctttttagtattgcgttaaaaggagctttcttatcgaccacgagaaagttcgtgagttgtctcactcttcgtgcgactactgggagctggatggttcctagagaaaaggtcgtatctccagctaacccggtaagtgacgtttttctgtcttgcagctcggaatcgaaatgttccattttttttaaacgcgtcgtaaaagagtacgtcaattgagcttcctgtgtcgatcattatgcgggagagttcgtagttgcctatgtcgattcggataacgagagcgtcatcgtgaggtttatcgaggttggtggtttcactttcccagaatgtgatctggtgatcaggtcccatcatcggggttttgccttttgtgtaggaatctgccttcctcttatgagttttgatcgaattgattgagtcgtcgggaggaggggtttcagctttggggtttgaaccttttttagttttacgcctagctgcaattaatttttttaacggcgcgacattcctcgtgtcctctttttttgtggtacttgcaatattttccgaggtcaagttctagactctcgtcctcgtctgcctcttttattgcgaatagggtatgctgcccttgcgtttggttttcctttttgaagggttttttagttgcaaggggagcgttttgtgttttaaattctttgaatcttaaggccagcacagcgagttcctcttcgactttggcgaagtggagagctttgtgaagggcatcgtctaaagtgaccggttgcctaatggtgagttcctcacggaatctaaaggaaaaccacaagctgttgtgaagggcggctatggctacctcctcgtttaggttcgcaatctttgatttgataattttgaatttttcgacgtaagatcgcagggattcgttctgaagttgggtgagaccctagaggtcggcttcagacgtcctgtgttcgatgagtaccgaatactgttttaagcaagcggcggcgtgctggtcgaaggtatcaatagagttcccttcgacactagcaaaccattctagggcgtgacctttgaggttttctgcgaagaaacggcaatgacctgcttcgttttctttgtccgtcaggtacgctcgtgttatagcgaaacggaaggatctcaagtgagcctttgggtcgctcgttccgtcttactccgggaaacggattctcccgacgtctcgaatgcgaaaacgagagatcctatccgtgaacggggtatgcctagtttcttcgatcactctatctatgtcgggagcatcgctcactgctggatgcattcgtgaatgcatttgagccatgttcgcatttgtttgagctgggtaattgcggaatgtttctatatccacgacgttacgcggattgaccggtgctcgaggatcagtcggaccgttacggaggtcgcttcctggtatccggggagtggttggtggattagcgatagaggtctgttgttgcgttgagttcccgggaacgcggtaactggacgcggttgtttggtttctcgtccacgtgtacctagggggcgagtagcctagcggtagcaaaggttagagcggtagccttgggaaggcaggcgttgtgcgtgtctcattccctgttgttgggttttcgacgagagtgttcgcaggtgccagtaaaaaggcgacctgccggttgataggaggtgagacttctatcgaggcaaagtctagacgagtccttggagtaggatctgtcagggagacggtacctgtcagatctatggggatctgggcaggaatcccagtttcgcgggggggggggggggatttccttacccgcagtatcgccctgtacctcatgtgccattcgagtggagtcgcgtctctgctgacccaccattgcggcgaggttgcgatgcgcaatttcttggtttttgcttatgttgatcaggttcatgatcattgtgtggaactcggccagttcgctggcaggtcgcggagtagagatttgtaattgagattatgagaaaggagggctagaagtatgtgtgtgaatgtaaagctggattgaatgtgttttacaagtcgtccttgctcccttatataggtagctccgtcaggtccgggatctgcggagattctcctggatattcggcacgtcttttccgagatatcaggtctgctccgcgaatatctcctcgttagttcctaggttgttattcgcttatctcccttcattaggtgaccgtgcttatcaggcccaagtacccattcgcgtatgtgggctcatcagctgcgtaggtcctctacttggtgggcttggtgggctttgtgggctttctttggtattttcgaaagtggattcctggaggggaatccagctccaacaaaagatctcgagaaaggttatgctgagaagatcgggctcatggagatggaaatcgggggattgcaggctgacaagcagacagcgagaaaccagattcatcgtttggagcagaggagggaggagctctccaaaagggtgatggacctgactttgactgcgcaaggagcaaagaaggcggttcacgatgctgagcttgaactggccattgcgtattcgaggttgctagctgggttcaaggaaaagtgggtcgccaagaaggagtacacagtgttggaaggtcaagcggccgaggtggagtcgaacctggctttgatcgaccagatcacgaaggctgctatcgatttgaccgtggagagacctcggttgcaagcggagctggatggcctggaggcgcagtgcaaatcgaaggaggtatcagacgtcactctaagtaagttggatatcctgccggttttggagatgtcggtggtaggtccgatggacgtcgacaagcaaggaacgccaatcggcttggatgagttcgggagcaacaaagatgcatttcctagaggtctcgcggagggttctggtactgtttttgccacgccggccggggaactgaaggagtgatcacttacgctcctcgttttaggcttttgtgttttttgtttcggacatagtgcctgggaaggctttcatccttttgtttgtttctttttgaacttggtgcctaggaaggcttttatcctttgttcagttaagtactttgatgcctaggaaggcttttatcccttttaacaagtactttttgtcttttattcgtgtgttgatactttatcgattttggtgtatgatcacctcgttttgttcatgttccgaataataattggacttgtttaaagtccaagttatttcggatatgatatggtatattcttcgtaggttcaaacttgagtaagtttgagtggtttatctcgggaacctgttgaagggaggtcacacaagggacctgccagattttgggagctgggcttgtggtatcgccagatcgcgaatgaaaccttcgtttcttccttgtttagtatgttatgtgttgatagcgaaggaaggagttagatatggttgtagtaggtgagctccgatgatgtcgaagtgatgtgtttttataggtaaggttcactgttgactttttggaagcgagatcacaaagtggatccaccaacattcggatgttgggctttgggtatcgtaagattacgaatgaggtttaaatcgtagtggaaacgattattttgcaaaacatgatattgagtatcaaaattttcttttattcttatctcaaaattgttgagtacaaatgaggtaaagtaaacgacgatctggtgtctggtcacctggaagggaccttcttggtatcgaggggtggttgaactgttaggtgagcagctaaccttctttgatggaagatgtaatgtttgttttccttgttgaagaaactgtttcaaacggaagagttaagacggtggctgcgttcgcagggggaactgcgtgcgtacctggttaggggatcaagccttatcgtagttcaattgaaatggtggctgcgctcttggggggagttgcttacgtaccctgccaagggatcaagccttatcgtagttcgattatttttgagtacctatttgtggtatttcttgagatgcatggcatttcgagtttatagacgctgtcacgtaccacctcggtgattcgatagggaccttcccaattagttccctgttttctggcgtttagctctttcgtgttggtaaacacttttcgtagaacgagctctcccacttcgaatctccgaattttgatattggagttatagtagcgggcggcagcttgttgatagttttgaactcggatcactgcatgatctctgcgttcatcgatgaagtccatgttgtactgtaacatttgcgtgtacaggtctgagttagcaggactggcggtccttctcacgcttggtactatggtttcgacgaggattacttcttctaaaccataggcgagagagaacggtgtttcttgcgttgatttgcgaggtgtagttcggtaggcccagagaactccgtgaagtacgtctgaccacattgattttttggaatcaagtcttttcttgatgttgttaagtatcgctttgttggcggcttctgcctgtccgttaccttgtgggtattgggggtagacgtggtaagacggatcttccacttgtcacagaatgctttgatttttccggaggtaaggttagtcccattatcggtaacgatctcatatggtatgccatgacggcatacgatattttccaacaagaagtcctcaacttgtttcttggttacctgttggaaggctttagcctcaatccatttggtagagtagtcggtgaggaccagcaggttttttagtctctacttcccaccggaagcttccatgggacctaagacgtccatggaccacttcatgaacgggtaaggagaagatatcgaggatatttcctcgggaggttgatgcagaataggtgcgtgtcgttggcacttatcgcacatgagtgagtgagctatgcaatctgctagcattgttggccagaagtagccttgctttttgaatctgagggcgagggtacgtccacaccatatagggacctgcgacgctacgttgtccttcgtgcatgcttttcatgaggtcttttatttgttgcccgtaggtacacaccatatagggacctgcgacactacgtttcataagtctcccttccatgatgcaataccttgcactctgggctttgagttttctggtctcccacttgtcgggaggtgtgatccctctttcgatgtaatcgatgattgggattctccagtcgttctagggttcaggtttgtacggggcaggttgttcgggggtttcaagctctggctcctcctccgttgcacttgcctccgcagctgctgcgagagctctggctgcggcagtggtgcttcgggttactcgcgtgaagttgtaagttgccaaggtttccctcccagcatgtttgaccgttaggtcgatgctcgtgtgttctattccttcgagcgggataattctattgacgaaaggatctgacgtagaagcgagagctgccaaggcgtctgtagaggtgttttctcctctggggatcctagttaattcaaatgattcgaactgttgggtcaaggttttgaccagttcgaggtacgcttccatgcgcttgtctttagcttcatattccccgtggaactggctggtgatgagttgggagtcgctatgggcgtgtatatcgcggatccccattccttgggctagcttaatgccagcaatgagggcttcgtactcaaactcgttgtttgatgcgttgaatctgagtcggaacgattgttcgatgacttccccagtgggggaggtgagttgtattcctacttttgtcattgtcggttggaggagccgtcgacgtggaggagccatttcttattagagttggttccatccaggtttgctaacgggagctagattacaaagtcggcgatgtagacgtgtcggtttgctgaaggttccaagtctacttcgatatatggcgtgtcggttgcgtcggcatctacatccatggtcgttataggatccacgatgacgcatgtcaaaattggtagtttgatacgtggtttgcttatgctctcgacaagactagagcggctaaggcatttgttgaagagttatctctccaaagaattttaatcaggtcaaacttgtgaaactattttgacatatcttggaccaacgaaagataagctcgcattctttcgtccccgctaaactggcttactacgagttgagttcgctaaaggctttgatttgtttggccccaatcccttcagtgaggcgaagtccagcgagaagtgcctcgtactgcgctttgttgttggatgctttgaatggaagtcggagcaactgttcaagcacctccctggtcggagactggagtaggattccaagaccgtaaccttgtagtgatgaagagccatttgcgtagagtatccagttttctttagggacttcatcgatcacacatggagatagttcggttatgaaatctgccaggacttgtgatttgaggcttggttgggaacgaaactccacatcatactcgcttatttcgatcgcccactttgtaattcgctcggattggtttgggttatgaagtaccgttcaaagtggctgattggtgaaaaccactatagaatgcgattggaagtagggtcagagcttacgagcagcctttataactgccaatgctagcttctccagtttttcattaccatgatcgtctcttactaacactccactcaccgccgaacttgacatcgagacatatatatatagagtctcaccaacctcaggtttggccaagatcgtcctgctcataaggtaggatttgagctcctggaaggcggtttcacatttctcatccaaatggaaatccttattgccacgtagaagtttgtagacagaaaggcacttgtctgttgatcgggcgataaagcgattcaaagctgcgatgcgacctgtcagccttggtacttctcttttgttctagggggacggtagtttgattattgcactgatctgctttggattggctttgattcctcgttcggtgactatgtatcttaagaattcgccagatgtcactccgaacgtgcacttagtaggattcagcttcatctcgtacttgttgaggatatcaaaacacgcggtaagatgtttcatgtgatcttccgcctgcaaagatttcaccagcatatcatcgaggtaaacttcaattgtgactcccaacagttcggcaaacatttcattgaccaatcgttggtaagtcaccccagcattcttcaagccaaaaggcatgactatataacaatagatcccgcgatctatgataaaagcggtcttctcacagtcatctttatgcatcaagatctgatattaccccaagaaagcgtccatgaaggacaaaagctgattcccggcagtcgcctctacgaggcggtctatgtgtgggagaggataactgtcttttgggcacgctctattcagatcggtataatcgacacaaactctccacttcccgtttttcttcttgtctacaaccgggttggctagccattcagaatattggacttccttgatcagaccagccttcagcagtctttcgacctcgttttgaacagccttggcacgatcagatcccaaccgcctgcgcttctggcgaactggtttaaaagtcggatccatattgaatttgtgacaggttaccttttgagcgatcccagtcatatcctttgtggaccaagcgaaggtggacgaccttgatttcaggaaggcaatcagcttttccttcatctccccctctagttctcttccgataccgactgttcgggatggctctggcatgttaatattgacttggatgatcttgcagcttgacgtctttattgattcacgagccgggcgtttcgagggagtagatcgcactttgtcctataattgctataagatctccttcctttgctgcttcttttcgatcgcgtaacaagtccgggagaccttttagttaccgtacagggtgaagattcccgttgctattgggaacttcaaacacagatggtaggttgaggggatagctctcatcgagtaaatccagagacttcccaggatggcgttgtagatcggttccgaatcaatgacaacgaacttagttttctgggtgatgccgtccgcctggacaaggagcttaatttctcctatggacatcttcgcttctccatcgtatctcgtcaaaggccggatttttggcattatctttctttcggagatccccatctttaagaaagttttcaagaaaatcaagttgaccgagctgccagtgttgatcaagacccgctccacatcaaaatcttccattactagtttgacgaccagtgcgtcgttatgcggatgctgaataccactagcgtcctctggtgtgaagacgatgggctcttggcttagcggtgcagcctctgggacgaccctaacgctgcatacttgtcgtgctcttttctttagagctgacactgaatcttcatcgtcggacagaccgaccatattcgtggaaattcttccacgggggtggtctggagctcgctggggttgttgtcccctccatctttttgaaggccccgggagttcattctctagggtcctgaattcctccgcatgatcttcctcttggtttggatgattctccagcaagtgttgtcctttgttcgcgtgttcaccttgggcatgtttgaaatcgccccattcttaggacaatacaaattttttgagttggtcggtttggccaactgttgaggcataatgctgacgtggctcctggaagtcaccttcgggtcataatgctgacgtggctcctggaagtcttcccgcgctctgtcttttattttgggtggttgagacttccccgccaacttagcgtcttcctcttcaaggggcatgggtggtctcccgtgctgactgacatgatggtgtagccctgggaacatggtgttgaccctgttggactgtgcgtccgtgaagtcgaaggtgaggccacgcggttgaattgatctcggcggtgttatcttggagtttggatgttgcgggattccccttactaactcgtcgaatcggcggttggtttctgtgacagcatcggagagatctttagtcatggtggcgaagatggctttgaggtcctccagagagaaagctggtggagcgatggttggggtgacaggatttgcctcttgagccattcgatcttcggctgccttggcagctaattcagctgcggcgaagagggatcttctccgttaaggagggttgactctgtaccgtcgccgttgattggagggatgatggggtcatcgatcggtagcaacgtttcttcttgcgggagtttcgaaaagagcgtaaagagaatttctttatattcccctacctggcgcaccaattgatgattctgtaaaccaaacgatgaatttatactaagggtttagataaattcacttctctcttagctcttatgtaatcggaaactataagaaaagaagaacaaggttgcttaatgatgaagctagggttttcgctttaataaaagtaaggtttttgtattaaggtgcagatggattgaatagagaacaaatccatctatttatacaatactttgatcgtctaggaaaatgcaaaacttctaattatctaaggcttgaatcttcattccttctattattcgcaagatactcctctcacaaatggaagctttctttctcttcaatttaagaagtcggctaggcaatctccacccgcataattaggtctaccggcgatcttatctcttaggcccgttcacaggctaaccggggtatcccggttaagttgaattctttactttattcataattcctccggtttaaaccgatattgacgaaggtgctatatcctgcaccaattctatacctctacttctttgacttctcgctagattccaaatcatgttcagactggtgagagattttcttcgagcggtaattgaagaaacattgtgaagtgaagatggaacaatcattatagaagatctagtaacaacgatagatcagttgggaagaaacaatgacaaccacgtggaaaataagacattgactttataaattatggaaaacatatataatatatataaggttacgattgagcgattagggttttacatgaggcggtgtattctcgtgaggaaaaaaaaaagccgatgttagcaaatcattatttcatgtgtgcaataaaattatagaaatctctgatatcattcgagttacctctacagattcacaatcataatcgtttatgcatctacataaaacaaaacggtttaaattaatcacacaaccaccaattaaagaatcaaagtatctaaacaaaaaccgatatacctcgtttaagagttaatcaaccacaaacaaagatctatgaatcttgctttctaagaaagcatgatatagaaaacaaaatgttggtgttgattcacaaaatttgactataataggcaaaaagcaaagatctatcagatcttacattccaaaacacaaggagaggaaaaacatagatgacgatgcataaaagaaaagaccaaatcactcatataaacaaaaactataaatcataaataagatgcaaaaagaagagctttgatttttttgtttgatgaaagacaacttttatattaataggagtttgtaatataggattttagggtaaaattaaagctcgtttgtaagatgcaaaaagaaaagctttgattgttttgtttgatgaaacacggctcttatatttatagtagtttttaatatagggttttagggtaaaatcaaaggagtttgtaagaagatctcataaaaagacgaaagtaaaatcataaataaacacacatataagaccgaacaaaacacaaactaagaacatgctacagatatattataaacctcgtataagaggaagatcaacaattggcaaagatctatgagatcttacattccataaaaccacatatagtaagggtaacgaaacatgaacgaatgtccatcataaaaaggaccaacttcgacatacaaatataaattataaaccataataacgaaaatagaagaaaataaaaaatgtgtgttgcttatgtttcatgagaggtatatactatatttataggagtttgtaaataagagttttagggttttacatataacagtgtatttttctctaggcttttttttctctctctcagtctaagcccacgaaaattatatcattaaggaaattaagcaaataaatggaaattaggaaaatcagattgtatactttcattaagggtagcaacgtccgctcatattttgagagcgaacgtgagcactttaaacatctgctttaatatataagatggttgatagattttatagtaaacaataatttagtaaattttaaaagtattgaaaatctaacaacaacattcttatctaataaaattggagcatatccacaaaaaataaaataacaaacatgttttagcactgagtatcaaatatatttttcttgggtaggcaaacgaggaaatcatcatttcacttgctgcttggatcgtacgatggcgaacaatgaatggcacaccttattcttggaatcaaaaactgtcttctaagaatttggggaatcagatcagcgaccattggtcacacagattttagcgcaaaaagaagaaagacggggtttctttaattatgatagtagactcactcacaaaaaaggttttagagatacaatccttcataactggcatagagatgacaacatagagaatcatgctgctcttttagacaaaaagctggttaattgtagcagagtaatatctaaatggaagaaggataaccgaatgaatgctgaggaaaatattagattgatccgccataagcttgatagggccattgcgacaagaaactccacagtaaatgaaaaaagaactctctaacgggaactgaaccaggtatacattgatgaggagctcttttggaagacaaagagtaggaacagatggcttaatacaggaggccgaaacacaagatacttttactccactactaaaacatgatgagtacgaaatagaatcttatcaatccaagatgaagcatgtgtgatacatagaggagatcaaaacatagcaagggttgggactaataactttgagaatatgtacacttcaatgcctgtaagagaggctaactacaatgacgcttttcaaggatacactagcaagataacatcacatattaacaatgatctcacaagactaatgactgagcaggaaatcgaagaatccatatttgcagtggaaccattgaaagcaccaggctcggatggtttcactggcgagttctatcagcatttttggtcgaaaataaaaggctccattattcaagaggtaaacaacgtttttagagaaaacaagctatacgagaatcgtaaccacactaatctctgtctcatccccaaagtggaagccttgtcaccaatgggtgatttcagaccaatagctttgtgtaatgtaagctataagataatctctaagattctgggtaatcaactaaagaaacatcttagaggagtgataatagataatcaagcggcttttgttctggggcgaatgataaccgataacatcattatggctcatgaagtttattatgctctgaaagcaagaaagggtcgagcgtcctcaaacatggcaataaagaccgatattactaaagcctatgatcggttggattgggattttttggaggaaactatgaggcgaatgggatttgatgacaaatggatatcttggatcatgacctgcgtgacattagtgagacactcggttttgattaatggagcctcacaagggcactataaaccggaacgaggtatacgttaaggagacatactctcaccatacctttcattctgtgtgcaaaagtcttatcgcatctgaagaaacaagcagaagctacgaagcaactacaagggataaaaatctgcaacagaagtccttctttatctcaccttttatttgtagatgattcgttattcttcactcttgcaaattatcgatctggcatggcaatacagaatatcctaagtaatatgaggaggtttcaagacaggctgttaatttaagaaaatcagctataacctttggtcgacttgtgaagtcaaatacaaagagacaaatccgtcatttactaggaatcaacaatgaaggaggtggatgtaaatatttggggcttcctgaacagtttgatgaaaagaaatcagaactttttcaatacatcgtggaaaaggtgaaggaaaagactcaggaatggagcaaaatgtttttatcccatggaggaaaggaagttcttctcaacgcagttgctcttgcgattcccgtctactcaatgaatgtttttaagttaacaaaggagatttgtgaaaagataaatggcatataagcgaagttttactggagctcaggcaatgacaaaaaaggtatgcattggttctcctggaatcgtctaagcttgccgaagagagaaggaggtttgggattcaaggatctaaagaattttaacttggccttgttaggaaaacaagcatggaggatcttagaacagcctcattgcctgatgtcaagaatgctaaaaggaagatacttcccagacactaatatcatggatgctaatcaaggtcagaaggattcttttatttggaaatcaattttgcagggcatggacctactaaagaagggatttcgctattgtgttggtaatgggactctagttaatgcgtggttggatccatgctgcccattcacccgccgagaccgccacaaaaaaactagggatgccctagatcagcatatggttagtgagctcttaaactcaacacgcacatattgggatttcatcaaactcgctacttagataatacttgatgatgtggagaatgtcaaaaatattaaagtttgtgcattatacaaagactgacattatacaaagactggcatttagactatgaaatctgcatatgttatacaaacatatgttttgaaggagataatcatgagttggaatcaattatcaacagaagaagtccacacttttgagtttcaattttggatatgagagattcgagcttagaaacaaatatttctaggaagcaaatttttatgaataggaagaaaacacaacaaaccagcggatattctcgtaaagcagcaatgacctcaaggaacaaaatttatctttcataatcatattctttatgtaattcataatgctatgtgtttgtatcatacgttatttcaatattaataagaagctacaattcaaaaaaaaattaaaaccaaaatctacaccaaactttttttttttttttttttttttgtcgtcctacaccaaactttttaaaaccgaaaatacgaacttaaaaaaccaattatagtatactttttttttgttccgttttaatttttgttttatttcgataaatatctctggcgtagattagcgagagaggtttagctgtcgttttacattctctcaaagctctctcttttatagctttccaataacaaatcccaaatctgattctttcagctaaaaatcttacatcaatcaatcgaattgtcaaaaaaagatatcacaacccttcttctgaattctcatttcttaagcttatacacttgaaatctccaaaaaggtaccatttttatgactttgttatctccgttttgtgttcgttgtttgcgattctcaattgggttaaaagggtttagtcgttaaacatttccatcttcgtttttggacttgatgtgaatttaaagttgggaccttttatgttttgatccaaagaaaagaatctgcttaattgttgttttagtgtcagatttgtttcttctttgatgcaggggaaaaagaaaatgagttaggtgaagtttcagaaccatagagacgacgatttgatcgttgcgtaaaccaaatgatataaagcaaaagatgcaatcgagaatcgtcggattagctccggcgttttctctcttccctaacctaaacacacctcacaaaaccttcactttccatcaaatcttagttctcatcatcacattcacagcctacgcttcctttcacgcttctcgtaaaccaccaagtatcgtcaaaagcgtccttggtccaccttctcttaattcatcttcaattgataatggctgggctccgtttaacggaacccaaggaaccaagagacttggtgagcttgatttggcttttctttcttcttatgctttgggtatgtattttgctggacatttaggagataggattgatttgagatactttcttgtgtttggaatgatgggtagtgggattcttactcttgtgtttggtttagggtattggatgaatgttcatacacttgggttttatatgagtgttcagattgtttgtggtttgtttcaatctattggatggccttgtgttgtttctgttgttggtaattggtgtgggaaagagaaacgtggtttgattatgggtttgtggaactctcatacttctgttgggaatattctcggttcggttattgcgtcttcggttcttgatttcggttggggttggtcttttgttttgcctggtgtgttggtgcttgtgtctggagtggttgtgtttatgtttcttgttgttagtcctaatgatttggggtttgaagaattgggtaaagagattgagattgagatgagtttaggtgagaatgtagaggaaagtttgaggaaacatgaagctgagggcgcggtgctacttgaaaacgtagatgattcgtcgtttgctatcgggtttctcgaggcttggagattgcctggtgttgcgccttacgctttctgtttgtttttctcgaaactcgtcgcttacacgttcttgtattggttaccatactacttaaggcacacaggtatgtatccatccatggctggctttttccatataactcaacttgcatcaccttcttactgttatagtttgtaacagctgttgcgggtgtgaatctctcccataaaaccgctgggattctctcgacggtctttgacgttggaggagttcttggtggaatatcagcagggttcatttccgataaaattaaagcgcgtgcgctcacgtcaatcacattcttggcactctctattcctgctttaattatgtacagagtctatggaagtgtgtccatgttcatcaacatcgtcttgatgtttatatccgggttattagtaaacggtccttatgcactaataaccacagctgttgcagctgatctcggaacacaagactctataaaagggaatggtcgagctttggcgacagtaactgctattatagacggtactggttcggttggcgcagctttgggtccgttgcttgctggttacatatcgagcagagggtggaacagtgtttttttcatgcttattgtttcaatattctttgcgggtttgttcttggttcggcttgcaaagtctgagatcaatacgatgaggtccggagaattgatagcgtcgagtgttccttaaagctgatgattttgatcccagcaggattgtatacaaaggtagtatcaggtacatagattcaaacaatacaatacaaattgagacaccacctgatttgtttactaccattttagtttagatgaagtaaagtctactatttttgatatttcacgacattgaagttgtaaaaaaaaaatatgagtagtggttgcatgatctgaataacgtgttatcatcatcatatatagtatatgagattgtattttcgaattaaagaaaatagaaagagaatttgtctctttggaaaaatgattcaaagggttcttctcatgcaagtgtgggactctttggaggtcaagatgatcttcattttgatttatgaaccattttcagactctgaaatgtgcgttttaaatttaagtttttcagctgcatcatttaggcttagctttactaaatttctaaagtacagaaatatgtaaaactattaaagcgttattaaaatttactattttattaaatcttatacaagtttattaaaactaaataaattaaagaaacatatttccatattctttttaactagcttggtcgtattgatattttttaaacttggtcgaaaacggtttagtgtaaacatctaatactttttccctaaataatactggaataaacttaaattttgaaaggtattaggatttaacatccacatgtgattaggttaatagaacctatatacaagaaagtttttgaacacgaacattaacaaacaaaaaaaaaatacagaaaaattcgcatatattttagacaataatataatattgattttgactattataaaaaaaaaaaaaggtctgtcttgaaatagaaattaattctttttaactaaagtacagttcaaaaaccttgcaaaaaacatcactatataaggagtatagttttctctcttctctcttccatatcttttaatgagaaactctgcttgctttctacgatcaaatgtttcatttgatgaatcgccgttccgaatgactcggctcttgcacggtatcttccagctccagtagtggagatagccggttcttgtcccgcaaatccggttttcaatgactgttttgccaggcttttccctttttcgtcgtcgattggttttttactgattgactttatcttctttttttttttcaataaccactatagatctgagtagggaattagtctttagatgttgattgcttaagattaatgtttccgacttgtgtctttagaaaccttgatttaaaggaacttactcaagagattgtgtcttgcccaaaggatcgaataacagttcgatgcttattacaagatccttatgttgtttctttaaatttagctccgttcaattatatttcggtggtaaacaaggattcttcgtgcgatttttcggcgatgctttcctcaccggattcgatgctcgtcggcgacgaaagttgatgttagtcgacttatgttaactcatcaacacatgttttggttgtactctcaaattgacatgtgttttgatagaatccaaatgctaaatctcattttttcgatgtaatttgtggtggactcttgctagatttcactttctttctttttccaaattcagtgtcggcttttaggcattgtaaccaacttttagtttgtttattcacatatgagacaaaaaaaagccttgcaaaaggagtttaagcacgaggttgcatttttttccatgtaatctcttaggttatggtgtggctgcctcatgagactaacctttttaaacaagcataataatatattaagtttttgatgtaaaaaataataatattaatatgaaacaatatgaaacaaaaattaatctacctccttagtttactgtattagttacgtccacatataacaacattactttaacaatttttcaatgcatagtaaattttcagaaatactcattctaacaatttacttttttgagggacaatacttttagtttgcaacaaaagtagaatagaatatgataataaaaatataaattaataaaaacaaaaaaaaattaacaataatgagacatactatgttttttgaagctcaatgagatcatgtgatattttctttcctctatgcattttcttcatcatcgtctccttatacatttcatgggactaaagcgtgaactttcaaatttgggacgaaaaaacataaattttcaaaatgccataaaagtcctaaactttgctctaactttttgaaaaatgatcaactttcgttgactaggccatttcggacatgacattaattttccgttaacaggacaataacagagtttactttcaacgacgtcgttttgaattcactaaaaaaaaagaaaactgagtactttaagattgaacccataaccttttgatggatataacaaacttgcaaccattgagccacgacatgataatgttgttatagcaaacaacgatttatatatgcaagttattttaaaaaaaacaaaagttaaaaatctttttatgtctttttatgtgtatatataatgtatacataaaaaaatctttgttacgtataaatatacacacaaaaatcttcattaaaaatatatacaaaaatatttattgtgtatataacgatataaatcttaaattattatttaaagtaatttattacatatacataaaataatataaacaaaataaatatttttatgtgtatatctgttatgaagatatttgtgtgtatatttacatggaataaatatttttatgtctatattgtatatacatataaatattttttagttttcttattttaagtaattataaatataaatctgtgtttgctatcattgtgtaatcgtgttatggctcaatggttgcaagttttttattatcatcaataggtcatgggttcgatcctcaaaagctcatgctttttcgtcccaaatttgaaagttgtgttgtaaaccacttgatggatggactccataaccgtggcccatgtcctttaaggttaggtccgtcagcccattggtgtgacggcccatcggccagtcggcccaccagtccgtcggcctgtcggcccgatccatggagagaagccacagtcggtccggcccgtaggtccggcccatggggactagacataggtcggtcatagacttaagtagttatgggccttttgtaaacctagcccattagacatggaacctcctcaagtatgtatatatatgtgatgtaacctcattatgaatcaataagaaacgagttagttcttcacacgttatcagcacgagcttgctcttaacaaaaccctagcagcagcagctcaaccctagctcgtccgccgtcagccgtccgtcgtccgttcgttgctcgtccgacgactgtcaccgttcgctgactgtccatccgctgtccgtctgacgatcgctccttaccaccgtcagataccaaacgatcgttccaccgttccgtcgatccgtcgttccgtcgtccgcctgtcgaccgtttgctgtccgtctgtcaaccgacaatacaaccgtcgaccgccgactgtcaaccatcgaccaccgttcgataaccgaggtctttagctcccggttccagtccgtacaaccccaaaggagaaaggtaattcattaaaccctaaagctaaagaaccctaatcgaacatggatctaacaaacggctaaaaccctaaaacgaatggttgattagtgtttgcgatatgattgcttgtttgctcgattgtttgtcttgtttttaaattttgggagaataggcatctagtttttaaatttgctttgtttgctttgctttgtagtttgaattctattgcttgatgtcttggatttatttatgttaatggaattgctttgcttcattattgtttgctttatcgcctaagacatagttcttgtccacatttagatatggccgagaacaaggacatactagtagtggacagtgactcaagccacacgatattaagagacaaaagatatttcataaatctaacattgagaaatgccaacattagcactatagcgggtatagcgagtctcattgagggctacggccaagcccatgtactcttaccaaacgtcacacatcttgaaataagtgatgccttgtattcacccagctcaaagaggagcttgttaagtttcaaagacatacgtcttaatggtttccacgttgaaacaaagggtgaagggaatagagaattcctacatgtaacagagatcgcccaaggacataagagagtcctagaaactatacccgcattgtccactggtctttaccatactaagatcaacatgatcgaagctaatttggcaatgaacaaagagttcatagagaagttcactttgtggcatgaccggcttggccatccgggtcataacatgatgtgaaaactaatgataagttcaaaggggcacaccctaaaagaaaagagagttatcccaaagaagctcacgtgtgctgcatgtgcacaagggaaactcatagtaaggccatcaccggcaaaggtcaataaagagaccataaactttctggaaaggatacaaggggacatatgtggaccaatacacccaccatgtgggacgttccgatacttcatggtcctcattgacgcatcgacaagatggtcgcatgtttgtctgttgtcctctaggaaccaagcatttgctaggttattggcccagatcatacgtttgagagcccactttccagattttccgcttaagactatacgtctagataatgccggtgaattcacgtcccaagcgtttaataactaatgtatgtccatgggggtaagtgtggaacattccgtggcacatgtacatacacagaacggattagcggaatccttcattaaacgaatccaattgatagctcgaccattactgatgaggtcgaggctcccagtagccgcttggggacatgctgtattaatgcataagaacttattcgtatcaggccatctagtgaacacagatattcaccatcccaattgttaacgggtcatgagccagacatatcccatctaaggacattcgggtgtgccgtatatgtaccaattgctccaccacagagaacaaagatgggacctcagaggaggatgggaatatatgttggatttgattctcccaccattataaagtatctagagccaacaacgggtgatctatttaaggctagatacgcggattgtcacttcagtgaatccgagttccctgcgttaggtggtgagacgaacaagctgggtaaagaaataaaagagatagcatggaatcaaacatccttgaattggcaagatcctcggactctgatgtgcgattcagaggtccataaaattatacatttgcaaaagctagctaatgagttgccagattcttttttgctgacccaaagagagttgtgaaatcgtacataccagcttgtaatgcaccagtacgtattgatatccagaagggaatcaatgtaattgctaccgagtctaacccacagaagaaacgtggtagaccagtaggttccaaagacaaaaatcctcgaaagactaagaaaggtgcaatgggaaccgaggtaaaggaaaccatagacatggccgcggcaagtcctaaggaaccaccaaatgagattcgggacgccgaagctcatggtcctgaaggaattgataatgatgagatctcaataaactacatcatgtctggaataaaatggaaccaaaaagaagtcgacgtcgacgagaaatttgcatatgaggtagcatatgagataaatgaggatcatgaacccacgtctataatagagtgcactcaaaggacagattggctaaactggaaagaaaccattgacgtggagttaggttcattaaagagaagagatgtgtttggtccaatattgaggacaccatctaatataaagccagtaggacacaagtgggtctttgtgaggaagagaaatgagaaaaacgaaatcgtgaggcataaggcacggcttgtggcacaaggattctcacaaagaccgggagtagattatgaagagacatactcccctgtggtggatgcaacggcttttagatatctaataagtctggcaataagagagaaccttgacttgcggttaatggatgttgtaaccgcatatttatatggtccactggataataaaatatttatgagattaccagagggtattgagctcaaaggaaaagataagaatgggtctcgagaccaatactgcatatggctgaacaaatcgctttatggactgaaacaaagtgagcgcatgttgtacaataggttaagtgagtacttagtcaaagaggactatagaaatgaccccatcagtccatgcatcttcatcaagaagtttgctagcaaaggatttgtgataatagcagtatatgtggatgatttgaacatcctgggaacctctggggaaatcgcccaaacagtcgaatatctaaagaaagaattcgaaatgaaagacctaggcaagacaaagttctgtttcggattgcagcttgagtacgtagataaaggaatccttgtgcatcaaaaggcatatatagaaacagtactcaagagatttaatatggacaaggctcacccattgaccagcccaatgcaggtgaggagcttaggattggatagtgatccattcggtccaaagaaggacgatgaagaaattctcggtcctgaaatgccatatctcagtgccataggacaatgatgtacctgtctagccacactagaccggacatatgttttgccgtgaacctcctctttagattcagttcttgtccaaccaagaggcactgggaaggaatcaagcatttgctttgatacctacaagggacaattgattttggtttatattatactaaccataacaaagaaggtttagttggttttgctgatgcaggttatctttcagatccgcacaatggaaagtcacaaacgggttatgtgtttacgcatggtgggaccgcgatatcctggagatcaatgaagcagaccatcgtggccacttcctctaaccacgcggagatattggcaatgcacgaggccagccgcgagtgtgtgtggttgaggtcaatgactcaacatatacgagccgattgtggaattggcgaagacaaggagccgaccatcatgtacgaggacaacgcggcatgcatagctcagctcaaggaaggatacatcaagggagatcggacgaagcacattctgcccaagttcttcttcacgcatgacctacagaaggatggtgaagttaaggtggtgcaagtacgttcaagcgacaattcagccgatctattcaccaaggcattaccagcatcgacattgaggaagctcgcacatcagattgggatgcggaggcttaaggacttatagggatgaccaaatcagggggagtaatgcgtgctgtactctttttcctcactatggttttgtcccaaaagggttttcctagtaaggttttaatgaggtagcatcccccctagcgcattactgagatctcgttggcatctacacggttatgtcatccaagggggagtgttgtaaaccacttgatggatggactccataaccgtggcccatgtcctttaaggttaggtccgtcagcccagtggtgtgacggcccatcggccagtcggcccaccagtccgtcggtccatcggcccggtccatggagagaagccacagtcggtccggccagtaggtccggcccatggggaccagacataggtcggtcatagacttaagtagttatgagccttttgtaaacctaacccattagacatgtaacctcctcaagtatgtatatatatgtgatgtaacctcattatgaaacaataagaaacgagttagttcttcacaagttgccgcttttctgatatttttcccttttttttgcttaaagttctcctgtttgtcatcacctttttcttatttataggatcaatctttgtcttattcctcttcttctgcaaactaaaacatataaaacaagtaatttatataacataattgtaaaacatgaaaaataaataattacaattagatgcatgtgcaacatattgatgtagtcggaaaattaggataaaatttacttttttttttattgttcactaagtaactctcaataactcgatgtagttaccagtggcaaagtatttgagcagatttagtgtggttacatattagcaatagggactaaccatcttatgtggattaggtatccttaacttgatcatttttttgctatcatctttaggtggttaaaaacaaatgtgatcattttttgtggggtttggttgtagtcgattaatttgctttagtatcatctttaggttattaaaattttcttgtaaactataaaccgactaaagccaagatatgaggcttctgagattttggaatatgattcgtggggtaagttttgaaactttgttattgaaaaatatagcttaggattattgtttgggatgcatttggtggaacagtgttataggatacctctcgcaaaaaaatggattgtcaaatcttaaaataacacggaataaccataataaaacaacttgccaaaatatctcaatagcaacagtaaacagcactccaaaataacccagaaataaataataataaaccttttaccaaaatagctaagtggcaaaataaacaacatgtaaaaataactactcactagcaaaagtaaataacacttcaaaatcactcactagccaaaagtaattaacatgccaagaatataaattaaattaagattgagtcaatagcaaaacgtaattatcaaatgtgttgacttcaaaatttgtatgttattttattgaaaaaaataaaattcaaacttatggatttaagaaggaaaatcatttaattttaataattggggataaaaaacataagactaatgtgttgttcttaaacaatataaaaagagggccgtgcaaactatctatccaaacaaacataaatcatattccagtttctgagaggtttttctcaactctttatttttcaacgtttcaattgtgttgttgtttttcttactctataaactgatgacaatctcgatattatcacgattcaaaacaaaaagtctttgatcattttaattgttatttttttccaatttttgtatatgattgtttattattattattttttaatgttttattttgatttttattttttcaatgtaagaaaaatgagttatacgtagaaacatgactcagccaatgatcgtattatatgatgcagatttatactccattgttggtcttcttcaatccaaacaatgaatggatcggacaatttcacttctccttccggaccacggtctatgactcagccttcatttgccttctcttccttgcccccgttgagcccttctccgtcgttatcccgtcgcaattcattaccattgatgaacctttctccctcagctcctgtagagagtagagaatcttccattaaggttaagaaaaaccttacattgcctcctttgggtgtgaaaagaagagtagccaaagacattgcacatttaaatagacattacatgagtgtttcattggatagttgtttacatgacttaccgaagctgcctccttctccgggtaacgtttcctcttcaagttcagttggtagcagtgattatactgatgatgaattgaataagattgcaaagagtaccaaacttcaagagatcgcatctgatcctaagaaagtcagaaggtaaatgaacttgtatgaataaattatatttagtgttttttcttcttcttcctattattattattattattattattattattattattattattattattattattattattattattattattattattattattattattattattattattattattattattattattattattattagtattattattattattattattattattattatttttatggttattattattattattattattattattattattattattattattattattaggattcggatcgcgcgatgtcgccgaggaatattcttaatatgtttatttagtgattttatttaaagcaaatggcatattataaattctcgtaattattattatttttattattattattattattattattattattattattattattattattatttgtgacatttacctatgtggattctctttcagaatcttgaaaaatcgagagtcggcggcatgttcaaagcagaggaagttacagtacatgattgatttggaacagagaataaactttctctagaacgaaaatgcttcaatatttgaaaagatcaagcttttggaggtgaaacatattacattagtaatcatgagcttgtcatatctaaacagtatctacaagaaatttgataaatttttattgttttaatgtacatgcagaatgataaaacaatgataacgaatgagaagaaggaaatcatgattcgaattgaatcattggagcaacaggtccaacttcgtgacggtatgtcatcttaatttctgtcatcttaattatgtcatcttagcaagttttttagttttgcaatccatagtaaaagtttgagttttatgggttaaggtttttaattacgtaattgcatgaactttgtttttatatccccttaaagtaatatctaatatcgaaacaactttaatctttctagacatcccactttttttgcatttagcatgatagtatagtacttacgacgccaagatattctttatttgcatccaataattttaaatgagtaaaatttattgcataaaaacaaacatttttttaactaagtttactctggttcatactagatcctttaccataaaatatgctaactttttctactataccaaagattttctggtaatgtgtaggatgagaaataacattttgggatgacaatttttactagatcgttaactgcaactccttagagaatacattctcttgtaactatcaaatgtctgttttcatttctttattgttgcagtcttgaccgaacaattgcatgcagaaattgaaaggctaaaagcaataacaatttcgaacgaaaaagggagtgtggaattccaaaggctgaagatggaaacctgtgaagtattgcagtaccgtcgcgagttcaatagatcaaacatgcaaggaatggacccaaacatgttcactttgtctcagccaaaccttggtttttatggacaaatttaaggaagttgaagtgactttggcaattctatgagatcaagattgaagttatagttcttttgaaatgttttagtttatataatttatgttcagggtcatgttgagagtaaaaatggtagttagtaattgtgttaggtttccttcagatgttataacctttttatttcggatttgaatatcaatttctgttaattttcaataaagttatctctttttttttcaaaatacaggtccaatactcgcccatacatgtcaaacctactttttccagctttttttaatttaacctatatcatttttctaaaaatttggaatttttcattctctttgtcaaacattcatatctgaattagtttccttaatcggtttgtcttatcaatatgtcaaaacagtaataattacattgcctattattttatttcaataagaatagattttgtttgtaagaaaatagatctgattaatttatgttatatcttttacatataaagtaacaatatcgatactgatttttttaattaattataaagtatagtcacattgaaatatataaagtgacaataaaaaatcatgtcacttctaactacataattatcatatatggttgcaaagggaaattcaaatattaaagatctgtaaatttttagaaattacattaaatgtcatagactataaagtatctaagagtaattaaaagggttcaagaaaaactattttcgtcaaatcagaaatagaaaaagatgtgcattttaggtctttctcttatccgatttggagagtattcagatcatataatcttcaaatcttctatcttttatgaataacaaacacggatcttaggtttaactttattattagttaaagtaatatgatgtgcattataaagtaggtctgggagttcggcacaacccgttttaaccgaaccgaacaaatcgacgatttcggtttttggtttcaaaccgatttgctgttgtaaaccgttcgacagacttttaaattgagttcggttttcggatttttcggttcggttcatcacaaccaatcggttttattcggtttaggggataccttataaaacagaaaaccctagatctatcacttcatcttctttgttttctaattctcctcttcacgaacaccttcttttctcctcttctctaaacccatttttatattttcttccttattccttcttcttcttcttgtcttcgttcttcttctccatcttttaggttcttagaaatctatcaagcaaccgcgacatcgatcttctccagcatcaactttagcggcaatgatttcatggttctctacatcttttctcaccaccgcatagcacaaatccattttctctgttttttatgttcttcttcttcatctaccattgtttttctttgacggtagcatacgaaaaataaaacaaaacagaaccctagatgggtgtgatgggctgtacttaccgaggaaaaaagtttgggtttttaacttttgaaaatcgatatgggctttgaaaaaacagcacattatgcctacaattgtgatccaaactaattcgggtaaccgattaataccgatttaaaaattttcagtttaatctcggcgaatcatatatcttagtaatcgaaccgaaaaaccgaataccgaaccgactcgaaccgaatttttgttcggctcaattcggcaggatttttagaaaccgaaaaaaccggaaaatcgaacaaaccgaaccgtttaacccgattaaaccgatctcccaggcatattatcaagataatagccaactacaaatcatatatatgaaaggaggctatcttttactatatgcttgacatatatatgagaacttgccacgtgtcaatataaattaaaaacaaacggacaaaatttttcttgcttaaccctagcttgcaaaacaagtttgactatccgtttggttgagggaatataaacatcttccatgtcttttattctcttcatctcgcaaacggtataagcatttacgtaagagatttagagagacttaaaacatgtctaatgtattccctaataaaggagatgcatcaccaaaaaataagggggcatcgagagtgaaaccgtaaagagtcgcttcttcctcttaacttaaaccatgaagatatggttcaagcgttataaatttctctttacacttctaaaagtgaattgagaacaaaaaataataattacaattagatgcatgtgaaacatattgatgtagttgagaattaggataaaatttactcgttatgctgttcactaagttactttctacaacgcggtgtagttaacagtggcaacaaatttgagcagatttagtgtggttacatattgacaatgggcacaaaccattttatgtggattagggatccttcacttgtttttttttctatcatctttacgttgttaaaaaataagtgagttggaaaaatattaactttttcaaacagaattataaaagtagtctttttcctatttataattagcaaaatagggaattttgactgtttttgtaatatattttcggtgagattggttttgcagtggaattgtgaaatgacatagaagagctttcgactgtttgaggtgggtgtatggtgtattggaagactctatatgaaatggattttcaaagcagaatttgaatattgtcgacaacaaacatattttgtgttgggaatatgcataaactaaccatgaaaaaaaagaataaaaaactaacatttgcacattctttttccattgctcctttttgttttgtctttccatccatttttcgctgataacagagcctccatgcatatttgaaatagctgctacctattgctcttttatacatcactgccacttccgcagcaagcacaccatctccatagctactatcattaccatatactcttcttttatcattattcgatctcaacatcttgaaggctctcactccattgttaacgtcaacatctatttcacatccactgctttcaatcaacttcacataatgactaatcaacaaccatcaaactatttttcatcggcatctccataagttcagacgaaaatcatagtgattattttattttaccagatattttttcatatggcatgcctttttttaaatggcatgctattgtttttcaacacgacatatctttttaacacgttatattttctgacatggtatgctattattttttgtttcagatatcgtgtaattgttatttggtaaatgtcatttttaaaaacttccaagatctaattgtcttctttcgccggatattctttcttacaccagctattctttcatatgacatgcgattggttttgaaatgggatgctaatgtttcgcaacatgctattttttttaaacacattatattttctgaaatggcatgcaattgtatcttttgacaagctatattttccaaaaacattgtcgttttcacaaaatttaaactatttcaatgtttttctttctgatattgtgtcatttttattttatacatgttatttactaaaattaccagcatttatttgtcttctttctttatctcatttgtaacttccggtattgcattcataaatcttgacaacactacctccatcaaaattaactttgctacttgtttctttttttatcattcattgtaacctctccctccatggtcaccatcatcaccgctgtcagaattatgatattgattatctatgcaataatcatcctcgccaaataaatatatttatcttgtaatgactataatctaaaaatattgtcttacctctatcacacatgcaaaaagttgggttgcaaagaaaactgatacaaacattagtttcttaattatattgtaaaatttggctatccatttatataacccttttttacacacttctgtttttttttttcttctctcttcaaaatcttcaaattacaataccctttattataaatttgttttctaaacaattttagattcataaaaatcaatattttttctctcaaatttgaaatgcattatgtatatttaatttcaaatataaataaataaatatatatatatatatatatatatatatatgcatagctcattgagtgtacatttgtataaaaatgtatctggttttattagtacagcatattaattgtacaagtttatagaaatataaacatatatagaaatatatatatttttatacttttgtacaaataatatgcaataaaaattaaaataaatacatttttatatatcaatacactaaataagttgtacgtataattacgtacatataaaatatttgaaatcaaatatagataatacatgtcaaattatagagaaaaaatattaatttttatggatctaaaattgtttagaaagcaaatttatatcgacaaatatttttatgattatatttaactggatctaaaaagaaattgaaaaaataaaaatgtgcatttgagaaaaaaaaatatagcatgtggagatggagaaggagaaagaaataatttaatttcaatggcatgattgtaaataaaatgttttggtgagggttgacaaattaattaaatagtaatatacagtaaacgctattttgctaattgtaaatagtcaagttactacttctctaattatgttgtgaaatggttactaatatgcaacatatcatataaaaactttgtgatcattttttggggtttgtttgtagttgattaatttattttagtatcatctttaagtggttaaaaattatttcgtaaacaataaaccgactaaagctgagatatgtgggttctatgatttcagactatgatttgagagataatttttaaaactttgttatggaaaaaaatagaacgggatcattgtttgagatgcatctagtgtaacaatgttatatggtacctctcacaaaaaatatattgtcaaacctttaaataacccagtattcaattaccataaagaaacaacttgccaaaatacctctttttccttttagattttactaggagaaaatccgggctacacccggtaaatgtttaaatattcaaattaacaactggtataacatagaggttgtataacacgggatatatagtttcactttcatctagacaaaatctcctcaaaaaggaaaagacagaaaaaaaatattaagtgggtgtatacaaaagtgattttaaaacaaatttttttgtgttaatcaatcacggattttaaagaaaacaaaataaaaaatccaatgtcgttaattcaactttaaatttaatgttattggaaagattgaattagaattttaatgactttaagattaggtttgtaatgatcaatatattatataggataagagaaactatttttattttcctattaatcaaatgagacaactttatcttactggatcaaggattgtaattagttttagattaaagctaaaaagaataagaaaataagaaacttataggggggtgggtgggtgattaaaactctctaaatcaatttttattgggaaaattaagtattggatttctaatgaattactgagaattgttatcatcaataacaaatccaagaataagaaccaaaatcataaatttcaaactcagtaacccggagtttctaatcgttgtaataacgataaagcctcaagacttcactaaagccaattggaacaagggactagggagcattacatgttgctatgcgatcatatctttttattataaccttcttaattagctttctagtttcgtttacggtatacacgaaaacataattatgaaaaacttgacgatgatagacaacttactaagcagtcacaaataatgtaattgagtaagatcaccaacatcaaatatcaaaagtaaaggggaattcagctactatatgtttattacttaaaagtttaaacagaatcaactctgttttaataattgactaatctcgttttaaaacaaacgatatttgactaagtcaccttttcttcctgctggtccttgtgcactctcttgatgttgttgtttaggtacatgtataatatcaatacatcgcatgatttgtctcagacttattggtcacccataattccaattctatttttttttaacgaagggtgaacccatttattcacctccttttgtattaaccaataaaagtatgtcatgtcaaatcatacttaattacataataaattaaagctataattataaatccaaaccgatatatcatctcgtttaattacaaaatctaaacctgaattctcctttgtaaacccaaaccgacatttaacctcgtttacatataaaatctaaatctgtttataaacctaaaccaatatttaatccgtttaattataaaatctaaactctaatcatactttccaaacccaaacggatatttaatctcgttttctaataaacccaaactgatacatattttcgttttagtggcaaattaaattttataattaaattaaatttctattattattattaagtgtcaaattttaattggctaaaataaaggaggtgaatataaaggttcacccctatggtgaacccaagtatcttttttttttttttttagaacaaaagaaagtctatgtaattcatgttataacaacatgaatatatatatatatatatatggatattacatatatttgtgttgagatacaattacaatgtcacaactataggggtgaacctttggatattacatatatttgtgttgagatacaattaaagcgattccctaaaaaaaagggagcttacaagttgcaatgaaatcttatatttcaccaaccttcttatactcctttgctaattagctttacactgttttcttttcgttctattggtttaaggtattcatatgcacatgacgccatcaagaattctccatgaatcagagttgaactcatagatttcaaacttagcgatagaataagttcggatggtgagaaaaaatcaaattcaagattttgtagctattgcaagatttgttgttaacgtatcctagaacatagctgttcaagatcatatgattattggattttatccacctggtttgacctgtgcaagggttccaaaccatggctccactattatcaacggtagtgcacagtaataaaccatcacagtgagagataatatgatctataatgttctggatcattaactctaagtttaacttggcccccaatggatggatcaaagctgttttggattccacggagattgatactatgaattagagtattcatctctgccactaaataatccccacgatcattaaagatcacatgcgtgttggataattacaacttacttgaggagcaagttatctccttctagaagatgctagaagagatacaagaaaagaaattcaagaaaggaaatcaagaaaaaaagaaatacaaataatgtcaagttggataagatttgtaagtattcctattcacaatagggaaaggaggtgtttggtcctagtatatatatgatctctatgaagaagaagaagataacacaagagagctaaagcatccaagaggatcaaagagagagctcaagatgtgagtcaagagagatctccttagagtcgagagagacctcatgagataaacatgcgagtcgagagagacttcatgagatatagacttaagggtagctcagttctatatagagagactatggagagttgttccataagtctcaagaaagacattgagaggctttagagagttgttctaaagacctagagagatttagttttgagtagtttctaaataaataaagaaaagttgttctttaatttgttttgttcttgaatcacgtctcaaatccttgagagacaaagtcagagcaagtcagctttgatgtgaattggtatcagagcttaagttgaagactcgatccaaggacggtggtgtgtgactcgtaagcaagacggtgggtgagaatcgacaaccaagaacgatagtccttaaaccctaagcgtggaggctatgagaataatagaggcagttataacaagggaggttgtaacagaggaggctctaactagtaaaaaatctatgtatagccactttaattttcgtggttaagcatgaattttcgtggctataagtcgatataaccacgtttaatcacggaaaacattcgtggttatagcgtcgtaactttattttttcgtggcttttcgtggctgaagagtcacgaatcagtcactcttcattcgtggttatatatagccacgaatttgtcacgacgatttcgtgacaaatttagccacaacataagagcaacaatttcgtggctaaatttaggaagccacgatttgattatgtagcataatcgtggtaagtcatttaaagctacgaatatgagaagtagcattatcatgacaatgttgccaacattttgtatttttggtgacaatagtagtgacgttcaaataacgaaatttcttttgtattatcgtagctatgtataattttgaaagaaaaaaaataataatcaaaatattataaataaacctgaattgaaaagcctaaaattcaaatgacatgagtaatgagaatatattacataagctattagtcttgtagggcttacaataccaaaaggcaaaagagtcataccaaagatcccatacatacaaaaggaacattaaaacataagcttatatacctagtgaagcacaccaagcatctaaagggctttgttgtgttcttgtagatggtacagttggactagcagcacgagagacagcaagagagacagcaggagaagtagtaggagcaggagacacaattggtgcaggagaactatcacgaccaccagcagaaccatgaacaccaagaccagcatcgcgagcaagagcaacaagttcaggtggaatgattgttactccgagagacttcataatcgcattcatcgcaagtcgggttgtcgccaactcgtccattaccttgcctacaccagacttcaacaccaacatgtcttccttgagtgcttcattgttttccttgagtgcctcattggttttttccaaactatagatgcgcaactcattgtcaaggttctgagacatagcaacagcaggtttctctgatcgattgatatcccggtattgaacactaccttatccgtagatatacccatttttagattggccacgctgttaaaaaacaaacaaataagaatcaaccatcattcaaattcaaacagaattagagataaataaacaaaacagaaccaatcaaaccaatgagaaattcagatggacaagactaaatgaaccaattcaaaatcaaacaaatgaacataaacttactgaacgaatttaaaagcttacaaatgagaacaaaccaaactgaacaaagacataagtcatttgcccaatatcacatgtggcaattaagacataatattttagtgaataccttgagatattctttgttcagaatatgtcgagagggaacaacaccagatgaggctgtttggctaaggccattcagacaatcatcctcttccataacttgtttagccgcttcctccacttcgagaacaagagactcagaacgtgggtctatgaaagtaccggctttacgtatgtgagtcttccttacaaggttgtgaagggaggtggttcatccaaaccagactcaaccaaaaacaaaaagaaagaggaatgttagtccaaaaccaaataaagtatataacaataacaaagcaaaattagaagaaagtcacttaccatatcatactcaatccgtacaaatggcacagggccagcacaatgcttgtgaatccctttattaagaggatcagacatgcggctattagcagctgacttgcttttcttttgagcaggtgttgtatcccaatactccatcagaaagtcccaatcggtttgtccaatgtacttggttttttttttcttcgtctttttcttgctgatgcgatcaccaattgatgtcattgtctccttcctccaaagagagtagattgtgtcatgaaaacgagtttcccagtagtagtgttgctacaaaaaaaaagagattagtaattgtaaggtaagtaataaaagtaagttagcatagaaaaaagaacaacattaccacaaatgtgtgccaccaagtttcttgcctatcctcaggaacatttgaccagttcttccatggtcccatgaaattgctttgccatgtcgcaagatccattcttgatttaatgttatcttttgtttttccaggaacattcaaaatcgtgttgatgagattatcgaagaaattcttctcaatgtgcatgaagtcaaggttgtgtcgaagaagaagattttcccaatatggtaactcccaaaatatactccttttcacccaattgtgatgaaccccgtatccatcgatagtttggggaagcttctcgtgtccgttcccttcacaatcgactgtgctaaacaatccaagaatattgtttattctctcgtgaagaatttcctctccagtcaaccacggtggaggatcatctttcacttcctttcctctgcgaaatgattgaacattttgcctatacatatgaccttgaggtaaaaatattctgtggcaatcaaaccaactatgctttcttccatttggtaaccaaaatgatttggtattatctagacaatatggacacgacaaacgaccatgcgtcatccaaccagacagcatgccatacgccgggaagtcacttattgtccacatcaaagcagctcgcatcgtgaatttttctttctttgatatgtcatacgcttctgccccgtcaatccacagactctgcaactcctcgatcagtggctggagataaatatctaaactttttttgggatgctttggccaggaacaaggactgatagaaagaaaaattctctcttcatgcacatgctggggggtaaattataaggagttactatcacaggccaaatcgagtgtgccacaccattcataccaacatgattaaatccatctgttgataagcctagataaatattgcgactttcagcagcaaaattcggatatatctcattgaaatatttctatgctgctccgtcggacgggtggtgcatttctccttcgggagacatatgttcagcatgccatcgcatagcctttgcggtagcctctaactggtatagccgcttcaatcgatctttaatcggcatgtaaaacattctttgcttagctcgtttttttccttttccattgtgtggatggtatctatctttatcacaaaaccgacaccgcaacaactctcgatcttctcctttccaaaaaagcatgcaattatcctcacaaacatcaattttatataccggtaggccaagcgcttttgtcaaattcttcgtctcgtagtaagatgcaggagctttatttggtgtgggaagaacggctttgaaagtctgtgctagctcatctacacaagcttccaccatactgtaatcagattttactttcaacatacgggaagacaaatataaatgagaaatgccttctggacagccatcataaagaggttccttggcggcttcaaaagcttcgaaaacgctatcatgatatggctcttcatttgttgtttccatcaaattcttttcttcttgtggagcccccatctcttgttcgatatcaacatacccatatggaaaatactcgtacgtattttcaggaacttgaaaagttttataatttgatgaccatgttgcttcttcaccggtaaaattacttgttcctgatgattctccaacatcataaaatgtttctccatggttcaaccaaacatagtaatttcccttaaaccccactcgtagaagatgtttcataaccatttttgcttcacgctgctttccgtttttacaacgcgcacaaggaaataaaatagtatttgtttcttggtaagaaggttggttacaagaaaattcgataaaaacatttacccctcagcaaactcatttgaaacacgatttgttaatggatcaacacgttgatccatccaccctcgatattgaaaataataagacatttcaacagaaaacacaaaaaaggtaatcgaaatttcaaatggtttttattttttctcttctttgctctgataaatgatggaaaaacgcaattgtatttataagcaagaaagccacaaatttgccacgatctatttcgtggctatattttagaatcttttccgacaccatccacaatggccaatttggacaacttgatgaaaatgactacatgatttgatgtttcttttggtgtaattgcgacgactcaaccacttttcgaattcgtggctattttattgcgacgaaataaccacgctattgtataattcggtggtgttatatgatgtgatgttttattaggtggatttgcgacgaaaaaaccgcattgcttgttcgtagctattgtatagcgacgaattacccacacattgtctcgtcaccattcggctacgaatatattcgtcgctattgtgtggctatatttaccacgaattagtatatgacaaattcgtagctttatagtcacgatttagccaggaactagccacgtaaaaaattaaaatatatttcgtggctattgcgttgctacgtcgtggttagtctaatatttgccacgaatcaacgtggcaaaatcgtagctatacgaattttttttactagtataaccgtggtggtgacatattcggtagaggcaggggttgaggaaggatcacctaccaaactcaaggaggagtaaccggagatcacaaccataagcataggtattcccgagaatgaaacgacaagcggttcaagcagggatccaagtatgtttcatatgagatgggagagccagaagaacttgctgaaggattagctgaaggacatgttgaaggatgtgctgatggacattctgaaggacgtgcagatggacttgctactgaagctacaaggacatggcatgcttggttaggtcatgtaagttttggtgttatgattaagatgctggaaaagaacctgaagaagatgatgtcatggcggatatcactcaagacaaccacaagaaggagtttggtgaagtataattcaaagactaccatagtttagaaggtcaggtcaacaagttagtcagcccaggtaccttgaagactatgaacgttccagcaagcttatgttgaaagttagagacgtcaacttgcatagaggaggacattcttcaatggaggaaagcagccaagaagaagaagaagaaggaggtgtttggtcctagtatgtatatgatctctatgaagaagaagaagataacacaagagagctaaagcatccaagaggatcaaagagagagagctcaagatgtgagtcaagagagatctcatgagagtcgagagagacctcatgagataaacatgagagtcgagagagacttcatgagatatagacttaggggtagctaagttctatatagagagactatggagagttgttccataagtctcaagaaagacattgagaggctttagagagttgttctaaagacttagagagatttagttttgagtagtttctaaatctataaagaaaagttgttctttaatttgttctcttcttgaatcatgtctcgaatctttcagagactaagtcattacaagtcggctttgatttgaatgcgttgttgctttacacaagttcttcttgacgaatcttgtatctctaaataaagtataccatcgtttgcaagtagtttgcaattcttttggagatgtggctggaattccctagagagtatctccaattctaaatcatgtggaagatcagcaaaagtcattatttgtttttctcttttgattttctcgtctgacctctctatgaagaatattgcgacaggactgcaaatacaattaagggtttcaagcataaagtgattgtataataacaaatcatttgttattaaatcatgaattttaaaaaaatcttataaaattcagtgttattgattgaactattgagtatttgtactttaaaatctacttttattggaaacattacattatatttgtaaatgagaaattatttttattatgatgacttgatgtgttagagatagatttgttatgatcaatatattatataggagaagagaacttatgtatatttattttgtttttctattagacaaaatgagacaactttgtcttctcatgatttagttagttttagattatagttaaaaataagcaaataagaaactaaaagtttgtgaaaaaaaagaaaaaagaaaaagaaactaaatgtaagggagtttttaaaattatgttattgggaaaaaaaaattaagtattttgtttttctattagacaaaatgagacaactttgtcttctcatgatttcgttagttttagattacagttaaaaataagcaaataagaaactaaaagtttgtaaacacaaaaaaaaggaaaagaaactaaatgtaagggagtttttaaaattatgttattgggaaaaaaaataagtattttgtttttctattaaacaaaatgagacaactttgtcttctcatgatttagttagtttttagattacagttaaaaataagcaaataagaaactaaaagtttctgaacaaaaaaaaaaagaaaaggaaaagaaactaataaatgtaagggagtttttaaaattatgttattgggaaaaaaaatttaagtatattggatctaaatcaaatgcaaatcttaacaacttcactacggggttgtattggactatgtattttggaagagtttactatttttttgaaatcacttgttattgaattagtgattttaaaatacattcacaaatctgatgttattgaacatggaattcacttaaaaagattcaaagtcatctacaatcactcgttattcaatctatgatttataaaactcttacaaaatctggtgttattcaaaagtttagtattatttttaatgtaaaaatgtaaaatcaaaatcatttaaaatactgaaatttacctagtttggcttcattgaatttgaaccaaacttaaaacataattgacgagaaatcgacaataacctttgggattgtgtgcaatcttttgatgaacttgtataccctctttagcaaaataaattctaaccttcctttcaatgggaccaatctctgaaactcacgtaacttaacgtctcacttgttaacgtaactttaccaaaatccactaccaagaatttgctccaagacaagtctttgtcataatcgagcttactttcggtcaaccatatattcatctttgatgaattgtatcaaacctatgtttcatcaaggcaaatttctcttctctaacaactgatgaaccaccttttaatcatcatatgattattctcaataggaagcgatagacgtcggaatctctttgttgtgaaatcaaacttgagtatgaatttgccttctttatctgaagaagaccaataagtatttcctttcaaagtcacaccatcaaaatgcaggaaacaattaggagagacgccatcaagaattctccatgaatcagagttgaactcatagatttcaaacttaccaagagaataagctggggagctaagaagaatttcaaaattcaagattttgtagctctcgcaagatttgttgttttcgtatcctagaacataaccgttaaaggacattcgattatcggtttggatccaccctggtcaaccaataataaaccatcgcagtgagagataatacaaagtatcttattatgttctggatcattaacgttaagtttaacttggaccccaatggatggatcaaagctgtttttgattccatagagattaatgctatgcatcagactattcatctttgtaactgaataacctccaagatcatcaacgatcacatgcgttgctgctttacccaagttcttcttgacgaatcttggatctctaaataaagagtaccatcgtttgcaagtagtttgcaattcttttagacatgtggctcgaaccctagagagtatttccgattctaaatcaagtggaagatcatcaaacatcattgtttgtttatcttatgatgatttctcgtctgaccttcctaggaagaaagcgacaatactgcaaacataaattagggtttagaagttggtataaatagagacgagagtgtataatagtcaattagtataagactgcacgcatagttgcaagcaaacttgttgatcaatactgaaaaattgtgttttcctttactccaccatattatttggatatgccttggatttgagtttcacgttgcttgcgttaaggcttcttgccaagtttgcgtctagtccgtgcctgtaaaacatcacacacacagagagatccagttaaagagaattctaacccgagaccatatacaacaacgatatatacatatcaaaaagctctttgatttgcttgacaagaacactatccttatgtgctatgaatcatgaagtctcatatgttttaatcttcgggaactgctctgtttttctcaatcagcatccaatctaaacagaacttatttgagtaaggtcataagatcaccaccaatcaatttcaaaagcaaagaagaggaacaaagtttgactaactcgttcaaagaaacatgaccacaaggaaaagcaaaaagaaactaaggtgatccattagacttacctcctttgctctcaatttctttttaactttgggagtgtctttctgaatgtgaaccaaatttggagcataactgacgaaacatggccaattaagaactgatccctttgtaacctctttaaagacttgtttacaaagatccactccaacaatatagattttggtcctctcttcatcttccatgtctgtatcacaacacagtgccactttattctcctcgtccaacaagaaagttatcacgctgttcaaatttggtaacgtaaatttatcaaaatccactactaagaactggctccatgacaagtatttggcttcatcaaacttattagtcacccatatcttcatctctgaagaatttatatgaatattctgattcatcaaggagagtttttcttccttaactaccgatagaaccgcgatatcttcataatcataactctgatacggaagaggaaaacgcccaaacctctctgttgtgaaatcaaaatccatcaagaaaaaaccagtttctttctctccaccaatccagtaagtattaccattgaaagacacaccagcagagaatattccccaagtgatagcatcatcaataacccttccacaatcagatccaaaatcaaagatttcaaactcagctacacgaagattttctgttaacgtatccaagagcatagccatcattataccggtaacaagttccaccttctttgacccgtacatgggttccaaacaacaagtctattgttcccatatgtggtgcataacaccaaaccctcgcactgatagattttagatactacgacgtctttcgaatcgcttagccggatgagtttacctgaaaactccatggatggatcaacgccctcgtgaattccatggcgattgacgctaattgagtgtaacctttgattcatcactaacatcacctctctcgctgatttacccaagttcttcttcgcgaatttcggatctctgaataaaacgtaccatcttttacaagtagttttcaatttcgttagagactttgccggaatcctagagagtatctccgattccaaatcgtctggaagattgggaatcttcgtcatcgtcgttttcgtcatttctaatcttagctctcgaggagaaaattaagtacaaagactgttaacaaaacttatgaagatatatattgggcttttattattataagcccattatcgtttttcttggtttgtaagttacaaagacacgacatcgtttcattaatggcttctaatttctacatattaatttgtaatagtaactattctgaagatttatgttcatgttacttatattcctatactttatagtcttgtgtattccaaaataaataaattattgactagtaatatcaaaaccaatagtaatggaatttactaatcgagatccatcaactaacatttaattttgattcccaaaactagggaaaaatccggactacgcacgatatattttattaaggaagacttcaaattaatttagttgatgttgctacatgatttagagtcaaacgtgaattctatattatccgatgttgcttctccttagaactttttaagttagctgatgcgatggtgtatcttgaggccaactcttacattggttttcaaagaataggatggtcttttgtttgccaattttttttattgtcattttatgagttatatatctatttaaaatgtgttttgaaatggattttaaatgtataagaatttcgtcgataaaaataaaaaaaatgattttcttgtttagcggttgttcgaaaccatttagtaatattgttatttgatttgtgggtttttgttttgatttgtttattttcgttttttttttgtagttagttggtaatttctgtaacgaattttttgatatttcgttgtgagcaatttttgagttagattaggtttatttttgttagctatgaattttgaatagcagtttcatcattgtgataagtaaattgaaaaatgtatgtgttgcaactaaagtagtgaaagagtagtcaaaagtcgacataatgaaaatctttattttaggcttattttgtgtatgccacatagcctacaagcagaaatctaaaatactctactcttgaactacaatcctttccttttcaacccttgttgtatcttgagtattggaggtggtggttttgcctttgttgattgaaattgttgaactacaacatttcttttatgaaatatttgaagagatatttgatagcatttgaagtattacaccattccacatttttgagtttgtaaatggagctgcacttaagaccctcttggtatagccgatttgcaaacatgaatccttgtactgtgtttgactgtatgatggtttgtatattgagcatataatagacatacgtgagagtcaatcaagacccataaatatgttgcctttttgaaattccgggtttcccaataattgatttagtcggactaagacttgctctcacagaaatatccatcaatttcaatgaaattcttaaaggtggatgactggagagactgttgagctttatctggtgtcatgttttgattgtattaagtggtcgtttttttgtttctctatgtggtgagggagatttggttttatagcgaaacccaaagcgatgtgaatgaaggcagtggccattgaagtagacatatggggagtaaagatgaggaagtggaggggaataaagatgaggaaatggagatttgataacatcggcagtttcggtttttttttaggtatctaaatcgatacaactttagaggttataaacgacggcgagagttgatgatgaaaagtttgtgttttataagtgtaggcatgtttatggttttttttgtaggcatttttcccaaaaaagtagttgctgactatatatttgttaattaacttaattgttaaaataattagatgtttttttgggaaattgtgactgctaaatttatgatttatgttttacttttaccatacctccaaattgaattttatttttatgaacttgattttgtcaactggagcgatagaacttcagaggatagaaacgacagcgagagttggtgatgaagaagggtttgtaccaaaagaatctccatcaatattattttgggccaacgtttttcaagatatgtggatttgatgttcttttcggctaagggtttttattagtaattggttcattagagctgctgaggtgtatttttgttgactatatagtttctgaatcaaacatgacatgacaaaaaaaaacgaatatgaatgatgaaatattatttcaattgcttctttatatttttatcttgtttcattaaattttgcatcatttctcatatatttttgtttttttaaagagatgtttaggttcttacaagggttcaaacaatatggagtgatagggtatattgaatgtatggtttttttaatttgtggactattttttttctttgccagaaaataataatttaaatttttaattatgaaatctgaagctgacatggcgtatggaaagagtgttttaatttttgccaaaaatattaatttaatttttaattaatgaaatttgaatatgatcaaatcggtagccgcggcattaccaacttacgttatgtcttgttttcgtcttccaaaaacaattacgtctaaacttacgagtgcggtcgctaagttttggtggagttcaaatagtgactcaagagatatgcattggatggcttggaataaaatatgcagtagtaaagcggaaggagggttaggatttcggaatgtagatgatgttaattcggctctattagctaaacagttatggcggctgataacggttccaaattctctttttgcaaaggtattcaaaggaagatattttcggaaatccaatgcactggataatataaaatcatattctccatcttatggatggagaaatatgatctcaactagatctctacttagtaaagggcttcttaaaatagtcggttatggggcttccatttcagtttgggaggacccatggataccagctcaattcccgagactagcaaaaagtaatggttcaatttttgaccaatctttaaaagtcagtagtctattagacagtaggtcaaaattttggaatgtggatctcttaaagaagctctttgatccgaaagatgtaccgttgctttgtgctttgcctgttggtacaccaactaaggaagataccttaggctggcactttacgaaatctggaatatatacaattaaatctggatatattcgacaaggcttggatttaatgaggctagttcttttatagggccagagattacaatcctcaaagctcacacttggaaagtgcaatgtccacctaagttacgatattttttgtggcaaattttatcttgttgtgtgccggtaacaacaaatctacagaaaagaggtataaattgtgataaggattgtgccagatgcggtgcatctgaggaaacaattaatcataccctttttctaggtcaccctacctagcagatttgggcactctcgcaaatttgggcactctcgcaaattcctacgactccgggtatttttccctcgaattttatttttgcaaatttggatcatttgttttggagaataccttctggtgttgattcgtctccatacccatggattatttggtatatctgaaaagcaagaaatgaaaaaaatatttgtaaatcaacaccataaaaacactacaagtctctcttgtgctgacacctcagctttttcagttaacaataacttgacacctcattaaaatcaacagccaatcagaacatttccaataatacacctcatttacgttgaccaataaaaacttactatttttccgtgtcatcccatcaagttaataaaattaaaattagacatgagcctagcccaaccaagctattttcaaaactaaaatccatataaaaatatgggcctaaacttcttaatctagaaaacttaatcctcggaaaataaaccgcagagaatataccgaaccaaaaccgataaaaaaaaaaccgaaccgatttttttttttgaaaataactgaatggatattaaattctataaccgaaaccgaatggataaagaccaaaatattttggataaccaaatatatccgaaatataattatattttttaaaatattagttatttctaaacctaataattaaaaatagatatatagtagtaaaaatactcgaaagtaaccaaatatatatgaaaatgttaaaaataaccaaaatatccaaaaatatttaaagaaaaataacccaatatatattaatttttaaaaccgaaagaaccggaattgaaccgaattcgaactgaaagcgaatcaaaattttaaaataaccgaatggatgctaaactttataaccgaaagaaccaataactgaatggatacgaaccgatactgaatggataaacgaatgcccataactaagaaaacttatctaaaggcttgattggttgaaacgcagtgcctacatttgtggctgcatgagtttacagaaccagacggttgcggtttcaagctatataaaattttttgaacgactggtttagcggttaaaaattggtgcgttttcggaatctttatgactggttaacggatttccgtttatggtagaaaatttacgggtttatgtttttggcaagctaagtacggatttacgtttttggccggaaaattacatgtttatattttttggcggaaaaattacagatttacgtttgttggcgggaaaattaaaagttaacgtttttgacgggaaaatgacggggttttttttggcaagaaattacgggattactatttttggcaaaaaattaagagtttctgtttttggcatgaaaattacgagtttatgataatgttatcatcatgatgatatctatcatgactatggtatgttgatatgatgatgaaaaagatagtatgatgatgattggtgatggtagtatgatattatgagagggtaatgatgatgatgatattgtgttgataatgagtaaattgatgggttgatgaaaccatttggaaaaagattgattacactcaatcggtttagaaattttggtacaagtaagatgtcattttttgttctctaaagtctaattaaatttatctttctggtatggttattcgattctccaataatctatgtttcaattttcaagttttgaaaaacaaacaaacataacttttagctttttatgcttctttaacatattaatcaaatatgcatgtggaacattaaaatcaaagatgataactccatataacatattcttaagaatctacaatgactttaacctcaccaaaattagcacctggtgatttttaactctttttacttttgttttttattggctcttctaaaaagatgttcgtaatgcaaaaaaattagcttccaaaatttataaaagctatatagatcttacttaaaagatttatcaaatgcattgagctcttaatcactttctaatgaattcttttgttttacatatatcatgaatcatgacaaataacattcaatacctacatacaacttaacaaaattacatttaaaaacaaaaaacccgcgacttggcgcgggtttcgccctagtatggataaagaccctttggaagttttacgtttagcggaaaaagaggcacttttatggcaggaagcgcaaattaagcttcatgttgaaagccatggtcatttgaatttcggagctcgatctcgggtaccactacaagaaaaaggctaaattccaaccgccatattagttgttaatttgtaggaattatatgtttccaataaacttagaaaagaacatatatttgttggaatatgatcgttggaaatttgtatttgtcacaaatttattggaaacgtttccatctaataattctataaccaatttgttggatagttctgatattttttttattgaacatttgttggaatttaccgtaaagtttctaacgaattgttccaacatatattttgttggattgtcattaataatttgccacaaatattcaacaattctgaaggtttgtttatgggaaactactaataacatatttgttggaactttgttgaaacgttttcttggaatcgtgtgagaaatatctgacgcttcattttttggaacttcatagaaatatattgataatttaattgttgaaaatttattgatatttttcattgtaaatttgtgaataacttctgataatttaattgttggaattttatcagaaattactttttgaaaatatgttgatatattttactaagtttccaacaaaatgtgtgatgaaccatttatcaacttttgttggaatatcacatgttttcttgtagtgggtgagggatatctcacaggatactaactattcaggttttcgttgttttgttgatggatcatggacagaaagtgatcagttttcaaggtaaggatggtgttgtacatattcatcaggagagtcaccaaccatgggcgccgataatattcgtagaagtctatgtcctctacatacagaagtggaagctcttctttgggcgatgaagtgtatgatttgagtagacaaccaagacgtagctttctttatagactgttcagatttggtgaagatggtgtcttcccaaccgattggccgacatttactgtgtatttggaggaattgcaaaaagcgacaaggacgaattcacaaacttctctttatctttaatttctcgtagtgctaatgtaaaagtgaataatttggcgcggaagatccgcaccgaatcgcatcatgtcatatatgtaaataatatcccccgagattggctcgtttgatctttaattaattttggatgacaaaaaaaagaaatttgaagctcatgtggcgtatgttttaaaaatgctgatgtggacacatagagaaatctcaatgagcttcttttattagtagtagattatttattgtaaattatgagaattgttatataggcaattttactacggacaatttatttcagcccttgttagatccacgaaagacgacacctttttctgtttctccatgctttggatggtcaccttcaattattatctctgcgtagaatcctggcgatcggctataattttacatagttggagatctcctgcacacttgtcttcattgatctgcaaatctgctaataattctcaatattttggatacgtacttcatatatctagatgtagaagcattaatgaactattggtcaaccaatagacaaagggttccacacttgccaaaataaacaacattccaaaataactctctaagaatttgtttaccaaaatagctaagtagcaaaataaacaacatatcaaaataactactaactagcaaaagtagaagacactccaacatgactcactagccaaaataattaatatcccaatagtttaatataaattaagattaatatcaccataaatgtataaattttcattatattacctaaaacacacagaattccatcaaatgttttgacttcaaattttgtatgttattttattgacaaaaaacagattcaaacttatggatttaagaaggaaaatcacgaaattcgaatataatataaatcacgagactcatttgttgtttttaaacaatataaaaagaggataatgcaaactatatatatccattcaaacaacataaatcatatttcagtttctaagaggtttttctcaactctttattgcttactcaacatttcaattgtgtttttgttctcctttctctataaactgatgacaacctcgatgtcgtcactattcaaaacaaaagatctttgattttaattgttatattattcccatttttctatttgatttttcttttctgcatgtaaaaaaaatgagttatacgtagaaacatgacttgttttatataatgcagatttaaattctattgttggttttcttcaatccctgacaatgaatgaatccgacaatctcactccttctcgaccacggtcgatgactcagcctccacttgccttctcattattgcccccattgaacccttcttcgtcgtcatcccgttgcaattcattaccattgatgaacctttctccctcagctcctgtggagagtagagactcttccattaaggttaagaaaaacccttcattccctcatttgggtgtgaagagaagagcatccaaagacatttcacattgaggagacattacatgagtgtttcatttgatagttgtttatattacttaccgaagctgcctccttctcaaggtaatgtttcctcttcaagttcaattgatggagacgagaatgcttctgggctcgagtttggtagcggtgattatactgatgatgaattgaataagattgcaaagagtaccaaacttcaagagattgcatctgaccctaagaaagtcagaagttcagtgaacttgtatgactaaattattattagttctttttattaatgatatgtgacattgattcatgtggatgctcgttcataatcttgaaaaaattgggagtcagcgacatgttcaaagcagaggaagttacaatacatgattgacttagaacatagaataaactttcttgagaacgaaaatgcttcaatatttgagaagatcaagcttttggaggtgaaacgtatcacattagtaatcatgagcttgtcatgtctaaacagtatctagaaaaagtttacttaatttttattgttttaatgtagatgcagaatgataaaacaatgatgatgaatgagaagaagaaaatcatgattcgaattgaatcattggagcaattggcccaacttcgggatgttacattatcttaatttctgtcaatactttagcaaatcttttagttttgcaatctatagtaaaagtttgagttttatgagttaaagttgttaattaattacataattgtatgaactttgtttatgacatcacccttaaattaatatctaatattgaaacaactttaatatttctaggaattccacttattttgcatttagcatgaaagtacttatgacaccaagatattcttacgtgtagtaatttcaatatagtaaaaaaggtgtaaattatattgcacataaacaaacagttcatttaataaatttacgcgagtttataccagagatttgatagtaatgtgtaggatgagaaataatttattcttgcaatgtataaacaaaataacaatttgggatgacaatttttagtagatctttaataactgcaataccttaaaaaatacattcggttgtaactatcgaatgtctgttttcatttctctattgttgcagccttgactgaacaattgcatgcagaaattgagaggctaaaagcaataacaattttgaacgaaaaagagagtgtagaatttcaaagactgaagatggaaacatgtgaagtattgcagtaccgttgcgagttcgacagatcaaacatgcaaggaatggacccaaacttgttcaccttgtctcagccaaaccttggtttttatggacagatttaaggaagctgtggtgactttggcaattcaatgggatcaaagattgaagttataggtctataaaatgtttcagtttatataatttatgttcatgccgagagtaaaaatgatagtaactgtgtgaggcttcctacttttcctttttagctgtgtttttcttaatcactttttatataaatatagaattatttattctctttgtcaaacattcatatctgaattagtttccttaatcggtttgtcttattcaatatgtgaaaacactacaattacattgtctattattttaattcagtaagaatagattccatagatatgattaattcatagttaacttacatataaagtaaaaatatcgacactgatctttttcttttcaattaattataaactatagtcacatttaaatatataaagtgacaataaaaaatcatgtgacttcaaatattaaacatatctagttgcaatgggatattcaaatattaatgatctgtaagtttttagaaattacattaaatgtcatagactataaagtatctaagagtaattaaaaggattcaagaaaaaatattttcgccaagctagaaatggaataagatgtgcattttaggttttactcttatacgatttggagagtattcagatcatataatcttcaaatcttatatcttctattaatgcagccttagatgcttcaattgtgaattatagtattgagcaaaaggtttttacctatgttcccgtattacagatcaatcctactacactaatacaatatccgaataggaggcataggggaagaagcactatgccgagaaatcaacaacacgaaaactttcttaaaaatgattccttttctttcttcttcttcatgggattgggactaatcagaatggttggaacaataaacatccatctcgttcgtactttggatactcgtataaccattgaagactgttgaagtgacaacaaacaccgatcatattactttaacttgttattagttaaagtaatgcgatatgcatcattaagataatagccaattacaaatcatctatatgaaaagagactatctcttatcatatgtttgacatgtcaacacatgagaacttgccatgtgtcaacataaattaaaaataaacagacaaagtcttctcgcttaatcctacctagcaaaacaagtttgactataagtttgactatctatttggttgagagaatatgaaacatcttccatgtcttttattctcttcatatcgcaagcagtatcgcgatttacgtaagagatttagagagacttatcacatgtctgatgtatttcctaataaagaagatgcatcaccaaaaataagagggcattgagagtgacaccgtaaagaatcgcttcttcctcttgatttaaaccatgaagatatggtttcaggctttacaaatttcttttacacttctaaagccctattaggctactcagggttcaaaaatttgaattgagaacaaaaaataataattacaattagatgcatgtgaaaaataatgatgtagttgcaaattaggataaaagttacttgttttgctgctcactaagtaactctctacaatgcggtgtagttaccagtgacaataaatttagtgtggttacatattggcaatatacattgataaagttcaaattaccctagaactactctctcaaataagagatcaattgtagtatttaaggatcaaattcacaaagttcttttgttcaaacagtgagttgaatgtcgagattaagctagcaggtaatgattgaaatagtaagaaaacaaagtaagaaaaccagcacgttgattgtgttgtaaacgattaggaaaagagctaggaacagggtgttctcaagaaactattggttagtagatctaaagaaagttaggttgttatcgaaccattcttaaactcaaactctaattattgaataaccggtggtgttccgcgaaactccctatatctatagctaagaataaccggagaagccgagagattattaacctaagtatgcattcttaacgagttcaattgttcaccttagtagataggccgattcttattacacacctataaaccaggctcatcaaataatagatccaactacagatacctatggtaggcatatctattgtctggaataaagatctagttaattactctagatctagcattaggtataatcaaagatgatgaattctacagataacctagcaaagggggcaatctactaaaccatatgaatccctaatgagaaaccctattcctaacaagcagattactcagacatattgattgtaacaaacaacatgattgaataagaaagcataaacacagtaaataagataagggaaagcagggatctcttcactgtattaagaacttgaatgaatctttgaaaataatcgatgaatagcttatgtctctcaataacagagtttttgaaaaaaggttgataataagaacttgctaatcgaaactagggtctaaaacaatgtatataaaccctataaaacgtccagggactaataatgtaaatagggaagttttctggggcaaatttcctcttttgtaaacttgaaagcgtcttggactctgctgggccgaaactggtgtcgatcgacaccaagagtgtgtcgatcaacactcctcttgattcctaaatccaaaatcgtccttagcttccttttctttagcttttgctccaaaatgtctccttatcttcattgttgtcccactgcatagagtacctgaaaagagactaaaaagactcgagaaataataaaaactcaaaatcctatacctaaaacatagataaaatcagtgaagataggaatatatcatacaccaaccatcttatgtggattaaggatccttcacgtaataatggttaaaaactaagtgagatgaaaaatattaactttttgaaacatagttataaaagtagttagtgtactatttataattagcaaaatagggacttttgactgattgtgtaatacactttgtgtgagataggttttgtagtggaattgtgaaattacttaaaaaggctttcgactatttgaggtgggtgtatccgtgtatagtgtattggaagactttatatgaaacatagtttccaaagcagaaactgaatattattgacaataaccatattttttaacacacctctagcttattcttttatttatttttattatatctccataatcttcaaattaaaatacccattattaaaaatttgttttcttaaaatttcagatccataaaaatctatatttttctctctctctaattttacatgcattatgtatattttaacttcaaatattttatacatacatatttatatgcatagtttattaagcgtatatctaaataaaaatgtatccaactttatccttacatcattttaattgtccaagtgtatagaaatataaaaatttgtatttgtacagtttaatggtgtacaaataaaaataattacacttttatacatcagtacactgaataagttatatatataactatgtatataaaaaatatttgaaatcaattatacataatacatgtgaaattaaacagaaaaaatattaatgttatggatctggaattgtttagaatttttttatattgacaaatatttgaattgttaaatttaagtggatctaaaaagaaaataaaaataaataaaaataaaaaagagatgtgcatttgagaaagaaagaggtatcgtgtggagatggagagggagaaaaaaataatttaatttcaatggcatgattgtaaattaaatgttttggtgaggcttgacaaatcaatcaaatagtaatctacagaaaaaatcattattttgctaattgtaaatattaaaattactaattctctaattatgttgagaaatggttacttatgcaacatctcataaaatttgtgatcattcttttgggggtttggttgtaattgattatttttttttagtatcatttttaggtggttaaaaaaattttcgtaaataataaaccgactaaagctgagatatgtggattctatgatttcagattatgattcaggagataagttttgaaactttgttattgaaaaaatagaacgggaccattgcatgagatgcatctcgtgtaacagtgttatacgatacctctcataaaaaaggatagtcaaccctttaagtaacacgttattcaattaccataaataacaacttgccaagatacctctttttcctcctaaatttactagaggaaaccaggttacgcccataaatgtttatatattttttgtagaagcattttaactttgtacaaaaaaattgtaaaacttgtttttcttaaacattgggagaatctgtatcacttagactaaataatttgattttttatatttttgttgactgtatagtttatgaatccaaaatgacatgacaaaaaaaaactaatacgaaggagaaatattatttcaattgcttctttatattttaaccttctttcattaaattttgcattatttctcatatagtttttatataattcactgtctccggcgctgatgtagcagttgctcgccggcgtcgaacacagtcttctctttgttgttccgctcttctcccaaaaaatcaaaacaagtctagtctcaatcttttcaagcctctagtctgtcatcttcgtctccttccatctttaatctcgctgtcgcgtcttgccaattgtagatctgttagaatcttttctctgaagatctttggctcagcgtaccgggccgacgtactttgcctcatttctgggagaaccaacagctacttcgttaccggctcatttttttccgtttcttccctagccacgcgtttcatcttttctggttaaagccggtggttgttgtttcaccgaccttcctttcggtgatctctgccatctattgatctcaatggttaatgatttgttcgcctctgtcacccgccgccgttgcatgttctcgacctcgtttgtattaggtcagatccctactatacaactttggaagaagactttagtttgggcatggcccatcttgggaccttttgggtggtgtagaggcccgttaagttttttgggctgctttcttttggcctgccctaatgttttgcaatgctcattatttgcacccatcactatcttgggagaccttcgtctctccctttgctacatgttatctgccgcctgtttcggcactcaacggttcatcggatacttctccgggttccatctgcttataccggatacttcttcggcaagcccattttgcttccgatcgagaaccacatatgttggtttggaacccgtcaatcttcggcgaagtttgctcaatatggaatgataaggtacactaagtgtatgtttttttttatttgtggtatatgtttttttttttggccaaaaaataataattgaaacttttaattaatgaaatctgaagatgacgtggcgtatggagagagtgttttagaaacgctgatgtagacacgtggagaagcttcaatgagctttttttattagcagtagattattgattgtaaattatgaaaactgttatatatccaattttaccacggacaattccttccaaccattattagatccacgagagatgacaccttattcttcttcttcatgctctccgttattaaattcacgagagacgacacctctttctccttctccttcttcatgttcttgatgatcaccttcaatgatcctctctgcatagaatcctggcgatcgtctataattggagatcgtctataattgcctccattgatctgtaaatctgctaataatttgcctccattgatctgtaaatctgctaataatttgcaatatcttggatacgtaccccagatatcttgatgtagaaacattaatgaagcattaatgaagcattaatgaagcattaatgaagcattggtcaacaaatagactaagggttccacacttgccaaaatacctcaatagcaaaaataaacagcattccaaaataactctaagattttttttttaattttttttttaccaaaatagttaagtagcaaaataaacaacataccaaattaactactcactagcaaaagtagacaacactccaacatcattcactagccaaagtaattaacatcccaataatttaatttaaattaagattgagtcaatagcaaaacttaatcaccttagatatataagttttcattatattacctaaaacgcacagagttcaatcaaatattttgacttcaaaatttgtatgttattatattgacaaaaataagattcaaacttatggatttcataaggaaaatcataaaattctaataaatgaggataaaaacatgagacttatttgttgttcctaaacaatataaaaagagggtaatgcaaactatatatatatatatccatccaaacaacagaaatcatatttcagtttctgagaggtttttttcaactctttattgcttactcaatgtttcaattgtgtttttgttctcatttctcaataaactgatgagaacctcgttgttgtcacgattcaaaacaaaatatctttgatcattataattgttagtttttccatatttctaaatttttttctgcatgtaagaaaaatgagttatacgtagaaacatgacttgttttttatgatgcagatttatactcgattgtttgtcttcttcaatccttaaaaatgaatggatccgacaatagcactccttcccgaccacggtcgataactcagccttcacttgccttctcttccttgcccccattgagtccttctccgtcgtcatcccgtcgcaattcaataccattgatgaacccgtctgcttctgtggagagtagagactcttccattagggttaagaagaaatctttattgcctcctttgtgtgtgaagagaagagcacccaaagacgacattgaacctttcaagagacactacaggagtctttcagtggatagttgtttgagtgacttactaaaactgcctccttctccgaataacgtttcctcttcaagatcggttgatggagaacaaaatgcttccgagcttgagtttgataccagtgtttatactgatgatgaattgaataagatagcaaagagtaccaaacttaaagaggttgcatcggatcctaaggaagtcagaaggtaagtaaatttttgtgactaaattattatttatgcttctttttttcttttctttttttgtattccttttttattattatcatggtttgtgacatttatccatatgtatgctctttcagaatcttgaaaaatcaagagtccgcggcacgttcaaagcagaagaagttacaatatatgattaacttggaactcaaaataaactttcttgagaacaaaaatgcttcaatatttgaaaagatcaagcttttggaggtgaaacatatgaaattagcaaccatgagcttatcatgtctaaacaatatctataataagtttgatgaatttatattgttttaatgtacatgcagaatgataaaacaatgaggatgaatgagaagaaggaaatcatgattcgaattgaatcattggagcaacacgccgaacttcgtgatggtacatctctttatttatcgacactttagcaagtcttttagtttgatttttatgctggtaattgcatctcacttattttgcattcaccatgatagtatttacgacgacaagatcttctttatgtgcaatttccatcataaaaacggttaaatatattgcataaaaaggaaacttttttgaataagttttagtagatccttaaccgtaaaatacggttactttttctgctatacctgaaacttaatgtgtaggatgatgtatattttttttattacaacgtaaaacaaaataacgcattatgaacaaaactttttacttgaatcttaaccacaacacctgttcaaaaaacgtcttcctttttaactgtagaatatttgtttctattttctctattgttgcagccttgaccgaacatttgcacgtagaaattgaaaggctaaaagctgtattaatttcgaacgaaaaagggaatgaaaaaagtccaaaatctagggatgacaacatgtgaagtattgcagaaccgtcgcgaattcgacaaatcaaacatgcaagtaatggacccaaacgtgttcaattggtcggaggcaaaccctggttttaatggacgaatctaacgaagttgaggtgactttaacaattcagtgggattaaggatcaaagttatagtccacttaagttttttcagtgtatctaatttattttcatggtcatttgagagtaaaaactaatagtaaccgtgagacttctctcagacgatatgaccttttttatgttttgttttatcccgttcttccttttttcaataaaactatgtgtttttgtactagctcatacatgttggtttgttgtccttatatttagagtttttacatcagattttatttagagcttagaggagtcaatcctaagttatattgtttacataagtaatacgaagcagttgagtataaatttttcgtgccgaattgtccgcttttacatttgcattacaagatattaaacataaagagaagattgtgaattgttccttgtagctttggaaatcctccaaatatgctgaaaatgctaattcttgattgtcggcaccaattatacacttcatcgccgagagtagagcttcaacttctatggagtggagatagagttctacgcagattggctactcctatggttgacgactctccatttgatgagatgcaaaaccacccttatccacaaaacttatcgcttcttttccatgatccatccacaaaacaacaaaatccaaaataaatattattcttaattttagttctctataatgttttaaatagtttgtattaatgtactcttaactaatttatcatctaaataatttatgtttcttttttaacttctaattaatcagttttcatatttggttgcaatggaaaattaaaatataaaagactcctaagttgttaaaaactacatcaaatctcatagaaaataaatatctaagagtaagaaaaaggaatcaagaaggagcattttcgtcatactagaaaatgaaaaagacactgaacctatgtcttgcccgatttggagagtactattcggatcacataattgtcaaataccgctatcaataacagaaaagtagccaatttaatctaaaatagttaatgagatttcaacaactaatatttaaattgattcatattggtataataggagtatattccaataacaaattataaaaatttaatgtactatctctctttgaacatatttctaaatagggaaaactaggaaaaatgatatctaccactgttttgtacatattttatttttttggtaaaaatgtcaatttggacaaacataaacctatactttattttaagttgttttcaaaaaaagaaaatcacaataacatgtagatatacaagaatagacatgttatgaagtgaacttttattggttttattgaaaatgttgattttcttatagataaaattttgtgtaattttgttagaacatgttttctagagttctatgaaagtaagagtgtgtattctacatttttgtacacgttttaacaattttagatttgttttctgttcttaataattcagaagtccgaatatcaaatttctaaaatatttgaaactggcattatacgatttgttctatgctccaaatttctaattacttcataatatgctattgttagaattgtaggggatgtattataataatgattttggaaatttttgctttttttttgtaaaaatcacacgttatgcaattagtgattttaaaatctcatctcaaatttcatgttattgaaattgaaatttatgtaaaatcatttcaaatctcatgttattcaatcatgaatttcttaaaaccataagaaattgactgttattcaaacaaccaaatttgttttaaaaaatattgaaaaatgatttggtgagcctaagccctaaggatacctttttagtgtaaaaataagaactaaacaatcacacctctagaggtggtatttgatttttttttgaaaagaactaaaaacatgtggctaacgaaactaaactattgaacaatctcctctcactacaagaaaacagtcattttgcgaggaacaattacgagggaattgcaggtattttgctacaccacggacgaacgttgctaatccctcgcaaatattgcgagagtctgcttcctcgcaaatattgcgagagtctgagtactttgcaattaacgatatcaaccctcgcaaaccactcgcaataatctcgcaaatctttaccctaaaccctaaaatacatagaagtgatttgggatctttgatttttatttataaatgtaaatctaaatgactgtataatcatacaatttgattatatggtgatgcacaaaaatatattgtatatgtttcaatatcaacatttcatattgaagatgttaaacacttattattcatattattgaaaacacataagttcatcattgatgtatttgggaaaaatgtacatttgaagtttttgagatgaaattagattctaatgtagatatttaacttcctaatgattcagaataactaatccgaataattttaagtagtgttttcttgtattttttcaaattgactcaacaatgcgaggtctttgcgagagatttgcaagtctgtcgtagcagttccctcgcaaatatttaccataaaccttaaattatttaaaatatttagtcatgtttttatttgctgagagtcttattcgaaataggagaatctaaatcagatctgattcaaacactgaatcaaaatggtgagttaattggttgaagaattgcgagggaattgctagacgcaatcgcacttccctcgcaaattttaccctaaaccctaaattattaaaaatcataaattgcgagggacttggtaggagttctcgcaattccctcgcaatatgtggtgcgttttaattggtttaaaaatcttcctcgcaatttcaaagcaaactatgcgagggttttgcgaggaaataaatttctatatatactcgaagacctagtttgagtgaagctcaaaccagccgcatcaaaccctaaccctaaattttttcttcttcttctctgatctcttcggcgccggagctcttcttctccgatctgattccgtcgccgcctctcttcttcttcttctctaatctgttatactcatcgccgcctctcttcttctccgatctaattacggcgcagactctcttcgccgcctctcttcttcttcgatctgtgctccagaaccgccgcggctcttcttctctgactcgatctgtttggcctcaaaggtaacctctgtttctccgatctaagttcttctctcaaatctgacctattcttcttcgatccgatcttacttcttttttcccagatctaacacttgatttgttttttgtgcaagatgccgtcggataatacttatgtccggtttagacaacagcagcgtgacccgttgcatgtcaattctccgcttagtggtgggaatatctcaggggttcaaggttcaggttcaggttcaaccgttccaccatcgcctccaacgccaacgactcagccttctgtcaatcattctgatgttcaagctgaccgtctcaacaatctgacactggaagagctcctcgatagtcctggtcgtgctggcttgacaaggctagacccaaagcgtcctccgggaactctatggtaaggttaagcttatagtctctggaattaggtcttgtaagttggttagttctgctttagaagtttggttctgccttagaagtctctggatttaggttggttctgccttagaagtttggtcctgccttagaagtctctggatttaggttggttgtacttagcattgtagtttcttagaagtataaagacatagagatccttatgtgttttgttgctgttattgtaggtttgacgatgactctacaattgcagcaacagtccgcagcatatttgaaagagatttcaaagaacctcatgccaattggtcacagacatcaaaggctacaatcgatcgatggtatgaaacgtttgcggtaagttttgtgctcttttgatgtttatgcttgttttgtttgctttgtctgttttgtttgctttgctttgtctattttgtagtctgatgtttgatgtttgctttgtctgttttgtagcaagtatataactgggaccgttcaattaacaaaagagtaagggttgagtttgaagcaaagctaaagtctaggatgtctgatcaagtgtcaaggtggaagggaaattggaaggagaagggtgatgaagccaagccaaaatggattgatcctgatgtgtggaaaggtctagtacagttttggcaagatccaaagtcagagaaaaagagtaacaacagcagaaatgctagatatcatgatccggatggcaaaggcatctataaacaccgttcaggccagacctcttacaaagctcgtgcaagaaaacgggtaagataagtattcttctctccttaccattacttaaactacaatgttatgaatctaacttgtttatctctttgtgtttcagtgtgagaagactggagaaacaactcctgatttcctagagctgctagatgagacacacagaaaagcggatggaactttcatcgatgggaagtcagaggaaatttacaagcaagtgacatctaggatagaagaggaagagtctcatatgtgctcagtggacaatccggagagcactggatcaggtggattgtctgttcatgccaagaacaagatttttactgaggtaaatcttctgtgctttttctttgcagcttgttgtgtacttgtaagcttgtctgaattctgttgtgtacttgtctgaaatgtttgtgttgtgtctctagtctttgatatcaagttctcgtaatcttggcagcttattcattatactttgtgtctgaattctttgtgttgtgtacttgtctgaattctgttgtgtacttggcagctgaattcagttctgttgtgtacttctgtacttgtctgaattctttagtgtacttgtctgaagtgtttgtgttgtgtacttgtctgaaatgtttgtgttgtgtcgctagtgtttgatataaagttctcttagtcttggcagcttattcattatactttgtgtctgaattcttttgaacttggtttctcatggtttttctgttgtgtccttgtgagtgtttgtgatctttgcaggttgctccgcgaaagaaaggaaggatttatggggttggatctctgcagtttgaagcatcctcagcccatagtggtccaatgcttcctagtgatgattcggtcatactttctcagaagctggctgccgctgaagcatgcattcaatctcaggctgagaggatcaatagcttcgacatcctgtttgactatcttgctgaaaaagatcctgctttggctgcaattcttcgacgtggttcctcgacacagacaggacaagccaacccaaatgaaccacctgtgtctactgctccagaaccgcaggtggccaatgaggagacagcagctgctgccctagctaaccttgcaacaggatcctctcctctatcaactgtattttgaaaacattgtcttgctttttccttgttatctctctttagaacaagttcttagagtttcaaacaatctaatattgtttttgaatttaagcttcaattgtgtatttatctatttagaacaagttaatgaaatttcagctttgaattgcatacaaaatcatctataattaacaactaattaactaggtaattaaaggctaatcagacactaatcaagtcttaatatatcagaaaaaacgttgcagaacgcttgcaaatccatcgcaaattctgctagagatttgcaaggcggtaaaaaagaatcgcaaatccgtcgcagttattgcgagggaagtactaggcaagcgtgtgatttgcgaggaaaacagttcctcgcaaaaattgcgagggaattgcgacatataaccatttgcgagaagcgatttgcgaggaactcgttttcctcgcaaatcccttgcgtatagctgtttgcgagggattagcgagtaattcttccctcgcaaaacgactgttttcttgtagtgtctcttcatcctcgtcttcatctccctcgatcttgatcccttgaagaaaaataacataagagatcctaaaatcaaagtccccatttatctcgaaatatgtaccaggactaaagtcaaaagagtttggtgatgagttacttctcatcctcagaagtctcgaacagcttcaatcagattctcgaggagcacaaacggtttcaaatagatgaataaaaccatttgacaagtaaacgtcaatttgttgctaggtccattttgatcctcagttctcatgtttgtttcttcgctaataacataaaagagctttatttgcaaaattgatgaatttagatggaattttgagttggtttatgggtcaagcatggtggtgaatctcgttatgcttatgtgtatcgctttaatagaaatattttgagtttgtttatgggtcaacctattattatctctttgaaatctcaccaaattataaattatctatagttttttgaaacgaaaaataacaattcgaccaaagttatcataaaactaacttaaatctcttcaaatcaaaaatttcctaaattccaccaaaccctcctaaatctttaattgaatactacttctttagatgtgtcacccatgttatgacataaacctgtattaataacctttggcaaagagaagtgcattaatctagaattgagaatttctaaacatgaatttacgagacaatcaagggagctagatgcattcactttcagctctagtgatgtagcatctactacttgccttttagagcaagttgcagcaaaatgtcccttcttatgacatctataacatgttggttcattcgattttaaagaatcataggactgaccttgctttagtccatcatgcggttcaacatatagttcaagtacatgtatggggcttgtgtcttcttttggacatgtaccgatctcattcttcttagcgggatcttgattcgcaatttgattggaactaacacgtagatttttgagagttctctcagcttggttcctttggatggtaattgtgttgactaggttcaggaagactgtgtggtgcgtatctctccctcataagaaactttagtttccccacgttttgagtggtggttccttataccacaatctatcttttctcgattccaccaacgttatgcgcttcccatgagttgttcaagacaatagtcgagcttctcttctttaggaatggaatagtacttaaagtacttattcatcttgagttcccattgtacataatctctctcacgtcctacaaactcaaaagattcaggaccaaaatactcataaccattgtctagaaataacctgagttttgtttggtaggttagggtgggttggatagtagtgggtctcgtcgagagccatgtttcagctcgcctactcttagattactgattcttgagtctctcttagctatgtaatcatatggttaatgtcacattgatgttctctgagtcacttcttaaggcatttcgtgtactactagtggatttttgtgaaagaacttgtgtctcggttttgcttgacatgagactttaggcagtcactatatcaaagtgtaatggtcgaccttatcttcactccttggaggacgttggcaatggtattcctttgatgttgcccctttatactccatgacttctctctgcttaatataattcgcttttcccgaaaagaaatatctcgagtcaatcgtcgatatttcgaaccatggctgcaaaaatcatcagtaaatttattgcatggtttacgatagcctttattggtattataggagtcaggcgcttctggttccggtacttcacgacaagatgcatcctcaaaatctgatttagagtactattcatgccatagtttttcacaactctcattgaaacacctctcctggttggtttcttccttctccacatagtattatgtcattgttgctctttttttttcgtggaattccttgcacaacaagagaatgatgtatcaaaagtaaataaacaaaataaggtaaagatgacaaaatatggaaactttttattttctaaaatcaatgcaaaactaaaattcgaaaatctaaaatatcaaaagagaaaacgaattttaatttttcttttgtagcttcatttgtgcggaacatcaaaaggtatttcaagaagtagatcaacaagtagttcaacgagtagatcaccaagtagttcagcaagtagttcagcgagtagtttagccggtctgtcaataagtacatcatctatatgaacttgtgatatctttgaatccactgtttggtaaattatccttgatgacttgatgttgcctcgttcaaaacctttctaggtaaacccattgggacaaaccctagataagagaaaaagagtgcaacggtcatattcccaaaatatggtgtctctgcttgttggtctttgactccactagaacaataatttgtattcttagggttaatttgctggtgaataattaatcataggccttgtgcttgattgagactccaattgggcaagagtcttccataatgctccttattaagtagttgatacatgtaccagctggtttgatttgaatgtccgcatcataccttcttctttgaaaacgtttcgacctcgaaactttaccatatacaccaagacaaagcaacttagctttcatgcaattttgggaggctagggtctttccttgacacggtcgtagtttgatgatgcatagtgcatcaggtggctctccatttagcaaaaaagataggatcactcttcttttttgattccggtgattttacttgttgtgttgcttgcttaaccccttctcggttgcgagctttaaaatccggcggttcctctttgattaaccaagagtttgaggctcttcttgtctctatgttaggtggtgttaacactaatggtgctggttcactctgggtttgacttcggttcatgagtttgttcatctctagtaaatcgggtttatggtcctccgttttacctgcaatattgttgacacttttggcaaagaacaagtgcgttataacagtcataggatcaatataaacatgtaaaacaattttggtttgaaccattcctttttcacaaagtgtaacacaaagtacattagaaagtgtatcacaaagtgtatctggtactcaatttagtttaagacaagaaataggtttcatcagtttatttaaagaacccaatttttctcccactcttgagggcttaacaagttcgtaatttcatcattcgatttattggcaacaaacgaaagtaatgtattacttacctgatgtagatcctcggtgaatgtatctttcaaaatcaacacggtttctttatttgaaggctggtccggtggttcttctataaacacgatgttgtttttgatgatttattcttccttagtgacagattttcatatcaaaagctcatgttattaatatgactttcctaagattgacactcttgaggttaagcaatgggtaggctttgcatccaaagcaattaggagattactaggatcaaaggatgtggggcgaatggtcacacgaaggttgtagaaaggcctttgatttaccaatcttgaactcgtcgttggatattacaacccaaagagaagaacaagagattgatctaacttaaaaaggttttttattgaaaagatagatgagttaacaaagaggaaatacaagagttttaaaaagagaagaagagaaggggaagagttagtcttagaacaagctccaagacaactcgaaaaagaaaaaatcataaataaaagtttgaaccaaaatagactcttgaccttccaaatttttgctcctcttattgggcgtgggccggaatgataatgggggatttggaagtattactcaagcctcataaaaacctactaatgaaaactcattgggataaaaccttagaagggaaaaagagtacccaagtaacacttagccaattaccaaacggtttgaatgatggattcttgcccaagtggttaagtagtccgctaacggcttggttgagaaatctagtcttcgaacgagtcataggactggttggttccgccaaagtttcctccactacaagctgctcttcggctacaaacagctttgttggttcaagttgcgagtcttgcctgacaatagtcatatcatgtcctccctcttgaaaaggatttgccctcaaatccgtttcatctataagaaaaggagataaatcagaaacattaaagctcgaacttatattatacttatttcgaagatcaatttgataagagttatcattgatccgttttgtaatggtaaacgacccgtcgattcttggcatttgtttgctattcggctgggaatcgttctttccttaagtgaatccatacttggtcaccctcttcaaagaccatgcgtcgccggcccttgtttgcttgttcaacatactttttcgttttctcttcaatagttttccgagcttcctcattgatttgttgcaccatttcggctttctttttcccatctaaatttgttctgacactcaaaggtagaggcattaaatccaaaggagaggtgagattaaacccataaataatttgaaataatgaaaacttagaagcggaatgaatggcatgattttatgcaaattctatattcggaaaaaattcttccccagtcctatggttctttttaatcagagtgcgcaaaagagagcctaaggttctattaaccacttccgtttgtccatcagtttgggggtgacaagtagtagagaataagagcttagttccaagtttagaccataatgttttccaaaaataactaagaaacttgttttccttatccaaaacaatggttctaggcatgtcatgcaaacgaacaatttccttaaagaacaaattagcaacatgagatgcatcatcgggtttatgacatgcaatgaaatgagtcatcttagagaacctatcaactaccacaaagattgaatcctttccggttttagtactaggcaaaccaagcacgaaatccattgaaatataagtccaaagaggagaagaaataggcaaaggcgtatacaaaccgttcgactggactttggacttagcctttttacatgtgacacaccttccacatatacgttcaacgtcccttaccatgtgaggccaatggaattgatccctctttacctcaagagttttgacgactccaaagtgtcccataagtgctcctccatgtgcttccctaacgaagaaatctcgaagagaacaattaggaacacacaagcgattcccataagagaggaacccgtgttgcatatagtagcgacctgaagcaaacttggcaaaagccttatatatgtatacctccgagataacccgtcgaccacgacattatccttacatttcttatactttatgacatacgaaaatgtctcaatgaactttacccacctcgcgtgcctcttgttaagtttacgttgagctttaagatgcttaagagactcgtgatcggtgtgtataacaaactccttctaccataagtcatgctgcgatgtttgtaaggccggataatttaatgtggcaccaccgagtttctcactaaagtaggctctgagcttcttctcctgcatcaaaacatctccaatacctatacctgaggcatcacattcaatttcaaatgttttaagaaaattctagtaaaataaaaatatgttagtaagcttctctttaagtgcttgaaaagttttctcttgagtttctttccatttgcaccccacatctttcttgattacttcgatgagggttcggctaaggtgctaaaatccttgacgaagcgcctattaaaaccggcaaggctgtgaaagctccaaacttctccaacggttttagggctaggccactccttgattgccttcactttctcctcgtccactttaacgccatctgcacttacaacaaaacctagaaaaacaagattatccgtgcaaaaggtgcacttcttaagattcggaaaaagctt

SEQ ID NO: 213 - DNA, 91688 bp, Arabidopsis thaliana
gaattctaactatcaatttgaactcgtaagttttgttatttttattttgttttttgtactagcaatcttttactttcttagaacgcacatagaactaaacagaacttccataagtcaatctctataaactctggaattatacagaaaaataacagaaactaacctaaaatagtgaaagagagtagagagatctaaaaatatcgcaagaagatcaatgaaagaaaatagtagtcaacggaaagtaatgcaattgattcggtgttctaaaataacaaaaaccaaaacaagaaattaataaacaaaaaaaacaattctttttttgcttattattatttttgggtgtctttgtcaatttgcttttccattttcatcttcatgcattgctttccttcgtcgtccttggaggggacgacgacggatctgtctttctgtctactgaaaatccaaatttcatcctctccatttatttaactttttcagatttagttttgtcaagaaaacacaaaatgtcttttcttgcgccttgtcaaattttggagctgaatattatttcggcccaagaattggcgcccgtggcacggtgtatgaagacatatgcaatcgcttggattgatccagagcgtaaattgacgactcgggtcgacaatacgggcggaacaagccctacatggaacgacaagtttgtgtttcgtctagatgaggaagcactctacgatgccacatcaatagttgttatagagatctatgcattgcattggttcaaagacattcatgttggaacggtacaagccttaataagtgaccttgtaagcccttcttcggctatgagattcgttaccctagaggttcttcgtgcctcgggccgcccccacggcctcctaaacattgcggtggggcttatcgataactcaggccaaagcatgcctcttttgtttgaagaagatttgttgtttcacaagaaaaacatatcttcaaaacccgtagggcttcgacggtcaaaaagtgatacaagctcaatggtggattcaccaaggaaggtgacacaatcccgtgtgagttctactacaaactcaggatttgataaagatgagttttcttctgactctcaaatggttgtgtatgagccccaaagaaaaacgccgaatacaatgaggcaaacaaagcaacaactcgtgtatgggacaccgatgaggccaaggaaaacgacagcatatacccccaaaaggaacacaatcgaatatggaacaccaatgaggtcaagaccaatcgttattacagaatctgacttaggtccttcagcctcagtagttgctgcccaaatagcaaaagagaaagcacttacagggaaagatgcggagagtactgtgataagtgttggtgaacgaagtgtcgagggtcttcgttctaagttagaaagatggcaagccaatttaccagtggttttagacgtggggtcaagttatcaaccaagttctgactacaaaacaaactctaactttaaccctaaatcaagttacaagcctaacgaaatcgtcccaagaaatcctcaaatgattggagctcccatccaaaagccaagtgggaggaacaagaaaagtggagataacggattgttttcatgttttggtaacatttgtggcattgagtgttctattgtttgtggtggctctagtggacaaaaagcagccaagaagaagaagaaaaagaagtgataaataacaaacatgattccttcaattctaaatgattcatttctcattatgtttctatttttcaagcttgtcgattttgctactcaataatccaaatttatatagtaagacatggggaaaaggtacattaattatttcattacattttttaatagtaaacatgaaaatttggtttaaatcgttatgatttcaagaatattaaaatgcttatctcaatcttttttcattaatcaaaaaggtgtacatgtagatttcttatttaaagaaacaatattagattactatgttaagtcctacataaagcgccaatttttttttttttttgatattactattgtcaatatatatttgtaattcgctttttgtcttgaaaaaactcaatgtaaaccacaccgctaatttaattacttggacaggttgtccaaataggttgaaaaagttttacagaggtctctaaacctaattttacatctaagaccacctccaatggtgtttctaatggggctcttagcctaaaaatcttttaaaaaagccaaaaattaaatcaaaactcaaaataaagttaaggaatgtttcttaattaagaggttttagagttgctaagaggtgctgacgtatcacatctgattggttcgacattttgtagtaacatttttggattccattaagcctaaaagaattgctttctgcagacgggaaaggggttatccagtatcgaaacagtcgttatctagcagcggatctccataccaaattgcagctccagtgagctagtagactccaaaagatcagtcttatttatcctggaaaagtttgttttaactgttctccaaatactaaatctttgaaacattatgatttgttgtctctagtttattgctcaattgatcgaatatcttctatatcattttttccatgagtctctttaagtgttttcagaatgtgtatatcaacaactaaaaaccaaacttcaattgtctctctctagcattcttttcaaaagttcgaaacaccaaacaccaaaaaccaaattttattttcaaaattttcagaaaaattgtcaaatgaatctttctatactttgtcatatattattgtcatgaatatttgttattcaaaatgtgtttatcaagaatgtatcaaaaacttgtatagtttgtcttctctatcttttttttcaagcaatcaaaactcaaacacgaacttttattttcaaaattttatttcttaaagattcctaccattagccatgaatatttctaagatatccgaagcaaatccttaactttatatttatcaaaatttacaattataaaattcttaaggattccctaaatttacctaccattggagatgttctaacactttgagctaaactattcgttttggtatatattttttcgatgttgttaaagtataaatgatgttaatttttgattttttttgaaaagcaacaaaaaattaaaagtaataaaataataatagtaaacaggaatgtcaagatagtagaacctaccttacggtttttagtctaattggtttgattcttagaaagtatcattcattgttaatcgatattttacaatctataccggttctagagcaaaagacagaagtaaaacgatggctgacagtgatccgagtgtgatggctactatcccacacggccacggagacaaaacatgtcgtgttctaattttatcatatgataaaacaaaaaaatcaaaactcataacacgtacaaatccataaccaaactttcctaaaatatccaattctttggtgctatattattagtttaggacctattataagtaagcaaaagtctttgacaatgtaattaattactattatttggcaataaaagagacacaatcatgaaagtcagctaaaattgagtttaatattgaaaaccacgcctcttaaaatatcgaaactcagattagagtgagggatatctcttgcgatatcaattactcgggatatcgttgtttgtagatggatcatgaaaaaaaagacgataaattctcttaataaagattagtaaaagcagttggctcgatcatactcttcatgaaagtcgttgcattacctcgtaaaccaacaagctgggggctaactgttgaggttggattccccacaagcaagaccgaaccaaacagtaagaacagtggtcgccttgtggacaaacagactaacggccctgagccaaacggatcacctcagggacttaaatcctagaaacgcagtccgagccgatcgagaaaacgctttgggaaccgcttgtatcgcctcgggagatagtcaaccaatttcaatgaagagtcatccagcatgtcccgagccagaatacaccggttgcccaaagcgacctctcgaacgaccaccgagccatgaaaaatgcccgaggcaaaaacttgtgcaaatccaataatgttcaaaagattatttccaggaaaacaagatgttggaactggatttccctccaaaaatccacctgcaaaaatatcaggccaccccaataagcccaccaagcccaccaagtaagaggacctgcacaactgatgagcccatgtacgtaaattggtatttgggcctgacaagcccggtcacctgatgaaaggagataagcgaataacaacctagaaactaatagggagatatttgcggagcggacctgatatctcggaactgacctgccgaatatctaggagaatctccgcggatctcggacagagctaccacgtgcgtagacctatatgaagaagcaagaaagacttggaagacacattcattcagcttaacattcacacttatacttttacacttgtaatctcctttcacattgtaaaacctctgttataatcaatacaaaagtccattcgttcttagcaatataaatctcaaagttcttgttaagatctatccctcctttctcataattctatttacaaatctctagtgtggatttcgaaacccacatttggcgccgtctgtggggacgaaaatagatccttccaacaccgaaactaacacatctattgtgaccaacgatcatggatctgaattcatccgattcaacgagatctggcgtaccagttcagatcccaaacgacaatgtcacggacaggcaccttccaacggatctccctcttggaatcgaggccgatgctatccatgacattgatgtggagaacatctcccaaaactcgaattcttctagatctgaccaaatcctccccccccctcgcaaaccagggacggggagcaaaacgtcacgatatagcctcctaacggagataacccggctaacccttctgagcaggtccctccgagatctgccaatgagctagccgagcttcgcacaatgatcctgaaactgatcaacataagcaaaaatcaagaaatccgcatcgcaacctcgccgcaatagtgggtcagcagaaacgtgactcttctcgcatggcgcaggaggtagagcgtgataccgcatgcaaggaaattcctccccacaaaaatgggatccttgcctagatccccatagatatgacatgaaccgtctccccaacagatcccactccaaggactcgtttagacttcgcctcgatagaggtctcacctcctctcaaccggcaggtcgcctttttacaggcacccgtgcacactctcgtcgaaaacccaataacagggactgagacaggtacaacgcctgctttcccaaggctaccgctcccacctgtgctaccactaggctactcgcccccgaggtacacatggacgagaaaccagacaaccgggagctcaacgcaacaacggacctctaccattaatccctcatccattccccggatacaagaaagtgacatccttaacggtccaaccaatcctcgagcaccaatcgaccttcgtaacgtcgtggatatggaaacattccgcaattacgcagctcaaacaaacgcgaacatggctcaaatgcactcacgaatgcatcttgcagtgagcgatgcttctgacatagatcgagtgagcgaagaaaccaggcgcaccccattcacggataggatctcccattgtcgcatctgagacgtcgggagaatccgttttccggagtacgacggaacgagcgacccaaaggctcatctgagagccttttgtctggctataacacgagcgtacctgacagacgaagaaaacaaaacaggtcactgccgtttcttcgcagagaaactcgtagatcacgccctcgaatggtttgctagtcttgaagggaactctattgataccttcgaccagctcaccgtcgcctttttaaaacagtactcgatacttatcgtaaacaggacgtctaaagccgacctttggggtctcacccaatgtcaaaacgaatctctgcgatcttagatcgaaaaattcaaagcaatcaaatcaaagattgtgaacctaaacgaggaggtagccatacccgcccttcgtaacagcttgtggttttcctcaaggtttcgcgaggaactcaccgttaggcaacctgtctctttagacgatgcccgacacaaacccctccacttcgccaaagccgaagaggagctcgccgttttggccctaagattcaaagaatttaaagcacaaaatacccttcaaaaatgaaaaccaaacccaagggcagcataccctattcgcaataaaagaggcagccaaggacgagagtccagaacttgacctcgaaaaatattgcaagtaccacaaaaagagaggacattccaccgaggaatgtcgcgccgttaaaaaactaatcccagccaggggcaaaactaaacaagatttgaactgcaaagccgaaacccctcctctcgccgaacaggaggaggaacaagctcccaagtgaaagaaacgggaccgaacaccagaaggaggtgactctcccccacctgcccggaaagaaacgggatctagtctttgcggaactcaatctaggaagcatgacagaaaagtcagtcactacacctcctcccgccgcgcaaaagaaaaacatgaggttcccattacgcctcccaaatttctgcagaaacgtaaccaagcacctctccccgaaacgcatcgatttcatcatgggaagatctcagctctgcaacgaccgatcaactcgatcaaaactcatcaaaagaaagcagattcctgcacaaaaggcaaaagcccgatgatgggatcacattttgggaaagtgaaatcactgacctcgataaacctcacgatgacgctctcgttatccgaatcgatgtaggcaactacgaactctcctgtataatggtcgatacgggaagctcagttgacgtactcttttacgacgccttcaaaagaacggggcacctcgactccaagttgcaaggcaggaaaactccacttaccgggttcgctggagatacgaccttttccataggaacaatccaactccccaccatcgcacgaggagtgagacaactcacaaactttctcgtggtcgataagaaagctcctttcaacgcgatattgggaagaccatggctacacgtcatgaaagccgtcccatcgacctaccaccaatgcattaaattcccttcttacaaggggatagcagtcgtgtacggcagccaacgcagctcccgaaaatgctacatgggtagctacgaggatatcaaaaaagctgatcccgtggtactaatgatagaggacgaactcgcggaaatgaaaacagtcagatcattggacccgtctcaacgtggaactcgaaaatcgctgataacgcaggtctgcatagacgaatcagatcctaaacgatgcgttggaataggtcacgacctcgatctaacggtacgagaagatctcataacctttctcaaggaaaacaaagatagcttcgcctggtcaagcgcaaacctccaaggaataagcctcgaggtaacctcacacgaacacaacgtcgatccgacctatcggcctataaagtagaaacgtcgcaagctaggtcccgaaagggctaaagctgtgaacgaagaggtcgaccgattgctcaaaatcggatcaataagggaagtaaaataccctaactcgctcgccaacccagtcgtcgttaaatagaaaaatgggaagtggagagtatgcatcgactttagggacctgaataaagcatgtcctaaagatagtttcccacttccgcatatcgaccgactggtcgaagccactgtagaacacgaaaaattgtccttcatggacgcattctacgggtacaaccaaatacttatgcgtcgagacggccaagaaaaaacagcttttattactgaccgaggcacctactactataaagtaatgccctttggtttgaaaaatgccggaactacctaccaacgattggtgaacagaatgttcgtcgaccagctcggtaaaacaatagaagtctacattgacgacatgctggtcaaatcagctcacgaaaaggaccacgtcccacaattaagagaatgcttcaaaattctaatcaaattcgaaatgaagctaaatcccgagaaatgttctttcgaagtccaatcaagagaattcctcgaatacctggtaaccgaaaggggcatcgaggctaatcctaagcagattgcagccttcatcgaaatgccgtcaccaaaaatggcacgagaggtccaacggctaaccggccgtatccccgcccttaacgggttcatatccaggtccgcaaacaaatgcgtccctttctatcagcccctccgaaagggtaaggagtttgactggaataaggattgcgaacaagccttcaagcaattgaaagcatacctgaccgaaccgcctatactcgcaaaacccgaaaaaggagaaccgttatacctctacacggtaatctccagaaccgcgataagcggtgtcctggtaagagaagatcacgaaggataaaaaccgatctattacgtgagtaaaacgttgatagacgctgaaacctgttatccagcaatggaaaaactggcactgaccgtagtcatgtcagttcgaaaactgagactatattttcaatcacaccccatagtggtcatgacgtcccaaccaatccgaaccattctgcatagtctgacccaatcaggacgacttgcgaaatgggccattgaactaagagagtacgatatagagtatcgcaccagaaccagcttgaaagcacaggtcctagccgactttgtaatcaagctcccgttagcagacctggatggaaccaactccaataagaaatggctcctccacgtcgacggctcctccaatcgacaaggatccggagtcggaatacaactcacctcccccactggggaagtcatcgaacaatcgttacaacttggattcaatgcatcaaacaacgagtctgagtacgaagccctcattgctggcattaagctagctcaagaaaaggggatccgcgaaatacacgcctacagcgactcccaactcgtcaccagccagttccatggggaatacgaagctaaagacgagcgcatggaagcgtacctcgaactggtcaaaaccttggcccagcagtttgaatcgttcaaactaactaggatccccagaggagaaaacacctcggcagacaccttggcagctctcgcttctacatcagatcctttcgtcaaaagaattattcccgtcgaaggcatagaacacacgagcatcgacctaacagtcaaacatgctgggatggaacccgaagcaccaccaccgcagctagagctctcgcggcagctgcggaggcaagtgcaacggaagaggagccagagttcaaaacccccgatttttttcctcacagtgttctcacttgcatctatcttttttattgtaagaatattttggaaattataatagatatgctcagaaaaacaagagattaagaatctatgctagaattttttttatttagttctctctcatatgactcaacttaataccgaaaatatcctctgtctcatatccacgggcgttaacaataaaattatcagataagcggtttagaaaactatcgatgatgattgtgagaaatgaggaggcaaaagtgacaccgtcaatgatgatttcatgtcacgtgtggtggactggtggtggtgatgatgataccaacatcgatgatttcaaaagcagtggtggtgttggtaggaaaattacgtcaaatggagacggtgatggaatggtggattggtggtggtgatgatgataccaacatcatgatttcacaagcagtggtggcgttaggtcggaaaattacgtctgattgagatggagatggaaagagttaatgattgaagattagacagtggcagcgaaaaaacataattatgttgttttctagatttaccttgttggtgaaaagaataaaaataaagcatgtttttgttattgttatcatgttaacatcgttatacacgttaatataaatattatctatatatcacattttttggcataaatattatcagtggtaatataaacattatcataccaattataaagttatcgcgatacaatatgatttcgaatgatatatttataaattgcttgatatatatggtgttatcgcgttaaacaaatagataatcatataactcatcatatattcttacttacatatttgatggaaatctaagtaaaacaaaacaaaaaacttcgataactaatttgttatatgtagaagagcatttttgtcaatttacataaattatggagagagaactaattatataaaaactatgcatagattcttaattttgaatttttctgagcatagatttttaattcacccaatatttttatacatgcaatgacatttgataaaaaaaaaatgaacaacacagattacaagtttaattcttggaaaatatcaatggataagctcagacgaaactatgcatagaagtgttttgcaatctttgattctcatttataaatatgaatctaagtgacccatataatctttcaagttgattatatggtttgaacaaaaaaatattgtattagtttcaatattaacatttcattttgaaaatgttaaacattcatgattcatacttaatgaaaaccataagatcatcattgatgtatttagggaaaaaacacattcgaattatatgatgataaaataggttcaaatgtagataattaacattctaatgattcaaaaaaatgaatccaaatgattttgagtagtgattgttgtatttttcgaaattgattatacattgcgaggaaattgcgaggtgtttgctagtacgcgtagcacttccctcgcaatatttacactaaaccctaaaatatttagaatttttagtcatgttcttattttgctgagggtcttactagaaataggagagactgaatcaaatataattattgaatcagatatgatttaattggttaaaactttgcgagggatttgctaagagctctcgcagttccctcgcaatgtaagctgcattttgattggtttaaaagacggttccttgcaatttcctagcaaggtttgcaactgatttgcgaggaaatatagtttgagcggagctcaaacctgtcgcctcaaaccctaaacctaattttttttcttcgattatcttcttctccgatctgtctcctcgccggcttctcttcttctccgatctactttcttcgccgccgcctctcttcttcttcgatctgattacgtcgccgcctctcttcttcttctctgccgcgtctcttattctccagcagccgccgcaactcttcttctccagcttcagccgcgagtcgatctgtttcttctccaaggtaacgtcttcttctccgatataacttcttctttccattccaacttccaccatccgatgtaacttcttcttcttctccgtcgcgtctcgtcttctccatcagccgtcgcgactcttcttctccaacagccgtcgcgactcttcttctccagcagcagccgcgactcgatctctttttcctccaaggtaacgttttcttctccgatctaactgcttctctccgatctaacttcttcttcatctccgatctgacattgttttccagatctaatctgttctagtttacggatctaaactctgggttttgtttgttttcttctccgatctaactgcttctctccgatctaacttcttcttcatctccgatctgacattgttttccagatctaatctgttctagtttacggatctaaactctgggttttgttttttttgcaagatgccatcgtcggagaatacttatccacgatataggtcacagcagcgagacccgttgcatgtcaattctcctgtcagtgctgggaatatttcaggggttcaaggttcacgccatccaccatcgcctccaacgccaaccactcagccttctgtcaatcattttgattctcaagctgagcgtctcaacaatctcacactggaggagcttcttgatagtcctggtcgtgctggcttgacaaggctagacccaaagcgtcctccgggaactctctcgtaaggttaaattcattgtcctagaacagcttaggttgtagtgccttagaactttgtagtaccttagagcgtaatggaattaggttgtagtgccttagaagtttcaacaaatagaacagcttggttgtacttagcattgtgatatcttagaagtttaaagacatagaaatccttatgtgtgggctggttggtcttcttgtaggtttgacgatgatgctgcagttgcagcaacagtccgcagcatctttgaaagagatttcaaagaacctcatgccaattggtcacaaacatcaaaggctacaatcgatcgatggtatgaaacgtttgcggtaagttctgtgctcttttgatgtttatgctagttttgtgtatggtttcatttctgatgttagcttctcttttgtagcaagtatataactgggaccgttcaattaacaaaagagtaagggttgtgtttgaagcaaagctaaagtctaggatgactgatcaagtgtcacggtggaagggaaattggaaggagaagggtgatgaagccaagccaaaatggattgatcctgatgtgtggaaaggtctagtactgttttggcaagatccaaagtcagaaaaaagagtaacaacagcagaaatgctaggtatcatgatccggatggcaaaggcatctataaacaccgttcaggccagacctcatacaaagctcgtgcaagaaaacgggtaagataagtattcttctctccttaccattacttaatctagaattacatacagacatcttgtttatctctttgtgtttcagtgtgagaagactggagaaaaaactcctgatttctttgagctgctagatgagacacacaaaaaagtggatggaagcttcatcgatgggaagtcagaggagatctacaagcaagtgacatctaggattgaagaggaagagtctcatataggttcaggggacaatccggagagcactagatcaagtggactttctgttcatgccaagaacaagatttttactgaggtaaattttatgtgctctttctgttgtctgaaatcttatactttgtgtagtgttgtgtttgaattgcttttatgtctgaaatcttattgtgttgtctgaaatcttattgtgtggtctaaaatcttattgacagcttattgtgttgtctgaaatcttgacaacttattcattatactttgtgtagtgttgtgtttgaattgcttttgtgtctgaaatcttattgtgttgtctgaaatcttattgtgttgtctgaaatcttattgacagcttattgtgttgtctgaaatcttgacagcttattcattatactttgtgtagtgttgtgtttgaattgctttctactgcaagtgtggttgtgttgtgtacttgatagtcactgttagcgttgtctagttgtgtttgaattcttttgtcttgtgtttaacttgttttctcacttgttttctgttgtgtccttgtgagtttttgtgacctttgcaggttgctccgagaaagaaaggaaggatttatggtgttggatctctgcagtttgaagcatcctcagcccatagtggtccaacacttcctagtgatgatccggttatactttctgagaagctggctgcagctgaagcttgcattcaaaatcaggctgagaagatcaagagcttcgatatcctctttgactatcttgctgagaaagatccacctttagctgccatgcttcgacgaggttcctcgacacagacaagaccggttagcgcaaatgaaccacctgtagctacagctccggaacagcaagccaatgagaagacagctgctgctgctgccctagctaaccttgcaacaggatcctctacatcatcagtattttgagaacattgtctttctcttttttccttgtaatctttttagaacatggtttcaaacattggcattgtagtatacattttagataatgataatttcagcttcttcttcttcttgtgtctttatttaagaagcaaaaataatctctaatcaaatcctaattaactaggtaattagagtctaattaaccaggtaattagagtctaattaaccactaatcaagccttaatatatcaggaaatcagttgcaaaatactagcaaatccatcgcaaaagaaaaaaatcgcaaatccctcgcaacagttgcgagggaagtactagaactgtagttgcgtgtgttgcaagggaattgcgactttttaccatttgcgagaagcgatttgcgaggaacttgatttcctcgcaagtccctcgcgtatggctgtttgcgagggattagcgagtaattcttccctcgcaaaacgactgttttcttgtagtgtaaaatccgttattatcattagctgataattcttactacaatatactcaggaagttagttatcagttttttacttgaaatgttactgcgtaacattcttgttagtgtggttccccacacagcccttgtttctgcgctattctagtatttatccgatatttcttttgaactcaggccgcttagatccatgttattccaataactattaacgttttgctcattcccacctcgtataatctttactggcagatgcacttcatctagatcgacccttatcgccatgaaagagtcatgtcttcattgtttcatatatcgatcgggtttgctcgtttctagtcagggcccatcatccactgtagccactagtacgttaactcaatatcgtctttaggacgcagggctaacttttcttttactgccataaccactttggcaaagccatcttgctctcgcagtcatactcctagtgcaaacctatccatctgcgagacgtgtttgaaaaaaccgttttcattttttttccttccctagggaccaatcttaccacgaacgccattttcacttgctggagttttcagcaataacatatttgttagtgttttcgttattcttaactatgaaaccctaaagtaaaaaaacactcttgttaacatgaacaataatataagtaatacccaaaacttttacttttacctttaagctttgatttctctatgtgtttatcttcctcttgcattaaagttgtcagaagctaaactatttagtgtgttagatctgagttgttgcagcaaagaggatatagtgctaataaatagaccaacgtctatattcgatatactgcaacctcatatatatcaattgtaatgatttaccgtatctttaaatttccaatgtcggcggggagatatcttccaagatatccttagcatttaatgctgtcacacctatgctataaattgttaacgtttttttggatttgtaggagctttttggtcataagttatgttgggaagagggaggtttaattacgtgatcttcatccatcgatacttaatattttcatcctctagacatagatattaatatagcccattattatttacaatcttcactctttccgttatctcgcatcataagataataaatcaagacgctaaaagtgtcatcttacaaaaatatagagaaattaaccatatttaattaacaaccgaagcaacacaaaagataacatatttagtaacagtttttaaaaacaataacattttcccacaatcactccatccatgttcggccgatttagtaacagtttttaaacattgaaaaaatcacaattgtaggcctcgttaattaccaaaacacacagttaccctagaatgtctttgaataacttgtcacctcgcgttggagcacgtcttcacatcgtctaatcacgaccatatttctcttggaagagctaagctaatatacaaagtgtttcatgggatcaagtttaatgttgggagactaatcttcaaccaagttatggatatggcaatacttcaagtcgatgattcaagatggttgatgttcccacaaataatttacggattgcttatgagtagaaagaactttatgtttactcaggtgaacaacttgtgaatccattgcattacttaaaggatgtcaggattgaatgtgcttatgctgcgagaaagaaaaccaaaacatcagccaagacgtatccaagtacttcgaaagctgctccgcgatctgcttcaaaacctgcatcacaacctactccaaaacatcaaggcattgaggttatagaacttggaagcatttgttgcctcaaattggtgtaaatgatctagaaggatcttacattgctctgttagacaaaacccatgcgctcatgacactgtcataagtggttcaacgtcttgtcgataacaaccccatgaccaagatgatgacttagaaagagatttttaatttgtgttctctcaagcagggggagagttcaaatattatgggggagtattatgtgttcttgatgtcaaattctggggaaatttgaaactttgcatccttgttgttcatattgcatttagaaagacatcgattgttaaacatttggttctaagaagtcatgttatgattctgcaacaagtttgtacaacattggaagattactaatgtaggtgcttgaaagctacaagataaaaggggggggggagattgaagatgcaacccgtgaagaagttcttgtactaattcaaagtagttcaagagaacaaagaaaggtgaagcaaaacaaatagaaattagcaagtcgttctatggcggttggcaatggatactagaagtttggagaagattccagaagactgaagagttttcttttacgagagagaaaaaagaaacaagaagaaaaatgacaatttcctaatccgtgaagaaacaaaaaaattgtccattcaaattagttttaggattggaattggcctgttgtatggccttagcttgtttagtataaatagaatgattagacttgaaagaaagcttagcacaaacaatagagagaattcctaacaattaagttttagctcgagagaaacaaagagctaaagacttaatgatggtttaggggttttagagagagttcttgctcttaatcgtgtgtgattgaagaacaagattctgagagaatagaaaatagtatttaaagaaaaaccttgtaagaacatattttccaatcaatcaaaagagtttaagaaaccatgtattccatcgtgttctagttcaacatattctatagctcttgtgtttttaataatggcttgactcaagactcttttaaggtgatgggttaattaaaaaccctaaacttaagtaaataagaggatttacattcattgattccaaaaaatcaagattaaacacatggaaatatctgaattaaaaatttatagtgaagaaaattcgtaaatcacacgattttgaaagtaagagaaacatactgaccttagaaagaatttttgttgttgttaggaagagttgaattaagaaagaggattagagaagccttggaggtatcgagaggaggttaaggagaaagaaacaaatcacaactaatttaattttaaaattattatatatctcgaaccggtagctaatttgattgtatctagaccggttttactaccggatcagattgggtctgttaaatactaccaaactgacatggaattaatcgtagaagaaaagatgcatggttgataataatcatattttcagaattcccgacttttctctctgacccgataatcgaggacctttccttgctcataaactctggcgtcggcgaagctcttgctggccggcatcgggacctctggttccttattttcatctactccctcaagatctcctttttactctgcttttggcgaatttctcaatcatgcttaacccccctcctttaacccttttaaccctttgttcgaggacgatttctttggggatagcgctgataggcggatctcgaatgttctcttacctaatcaatctctgtttacgattttcctgccgattatgcatcttgaagagccagtccttaccaattcctcatcttttgaagccgcaacggatgacaatgttcttatcactcatgaagctctacactacctaaagacttcaggtgcaaagaaaagatgctacatggcagtaaaaaaggatatgagcaaagcgtatgatcgtattgaatgggagttcattagattggttatgcaagcaatgggttttcaccaaacatggatacaatggataatgcaatgcatcactacggtttcctactctttccttttgaatggagcagctcaaggttctgttaccccaaagagaggaatccgacagggtgatcccctatccccctatcttttcatcttatgcagtgaagttttgactggtctatgcaggaaagcacagcagagtggaagattacatggtcttcgtgttgctaaaggtcgccttagagtgaaccacctattatttgctgatgacaccatgttttttagttgatcaaacccggatagctgcaaggccctccttcttattcttaaaaagtaagaagctgcatcgggacaaatgattaacaagaccaaatccacaatcaccttctcaactaaaacccctgaaagcattaacattgaagcacaagctatattaggtattcaaagtactggcggattgggaaaatacttaggcttgactgaaatgtttggaaggaaaaagagagatttgtttaaccaaatcattgacagaaaagacagagatcacttagctggtcctctcgcttcttgtcaactgccggaaaaaccactcttctaaaatttgtgttagctgcaatgccaacttacacgatgtcctgcttcaagctactggtgtctctctgcaaaaggatagaatcagcccttactcgattctggtgggattcaactgcggaaaagaaaaagatgtgttggatggcatggtcaaaaatgactaagtcaaagagagatggtggattagggtttaaggttattacaaactttaatgatgctttgttatctaaggttagctggcaaattcttacctctcccaattgcctcctagcaaaaatcctattgggaaagtattgtagtgcctctagttttccggattgctaagcaactggctcagcctctcatggttggagaggaatcctaataggccgcgatctcctaaaaacacatctgggaaagtccattggctcagggaaggatactttcgtgtggtctgaaccatgaatatctttcgcaaccccataacacctatgggaccccctgctgaacaagcacaattcatgaaggtttcagagctaatatgtcctaatacaaattcgtggaatagagaaaaacaaggctagatcttacctgcttatgaacaagacatcctcgcgctcagaacaagcaagctaggtgctccagatcaacatgtctggctcttgaccaagaccggcgagtatagtgctaaaacagggtaccttgctgccaattccagacacaaccagactaaagttcctccaggattgttagcaggcttcaattggaataaagatatctggaataaacaatgttcccctaagatcaaattctttctatggaaagcgatgaaaaacgccctccctgtgggcgaaaacctaaaagcaagagaaatcaaacctgatgcagtctgccctcattgtgatggagaggaaacctgtttacacactttgttccattgcccttttgcccagcaggtgtaggatcaagcacctttcaaatcctcttcctcaccaacccggatcttaaccttaagaactgagtttgaagcctctaatctcctgacttgtctcccaccggttggaattggacatggcgagctgtttccttggattctatgggcgatctggaccaatagaaacaagaaactctttgagcaaaaacaacaatcaagctcggagattctatcccaagcaattggcaatgcaaaagaatggatagatgctcaatcgtagcaaccaaaagtgcagagattaccatcgttacaattgggacaggttatccggctcaacaccatccaatgttttacagatgcggcgtggcgagctgattcaagagatgcaggattcggctggatctttgtagatcacaatgctcagactgaaacttcaaacagatcctcggcgaggaccatcacatctcctcaaatggcggaagctgttgttctcctccttacgatttaaaacgcgctggatcatgtattcacaaacctctcaaaagcttcagactctcaacagttagtcaaagctcttcaagggaagccccaaccaaaggagcttcgaggaattcttcacgatatcctcaatctctctcttaatttttcggaaattagcttcaatttcagtaagcgtgaaaccgatgctttatccaaggcagctttaagttcaattactcctgtaccggtttaccattaatgaaattcaaggtttttgacaacaaaaaaaaaagaaaaaaaaaagaggtggttaagtccttttgttccattgtacatatgtcattttcatatcatttttcttcaggacattgttcggtggtatgataagttacttcaacgtcaagatgacaaagaagagtttgagaaggccatgcattttttaaagcttcatagtagaggaaatatttgtttagattttatagttcatgtcccaaactgtaagcttttcagatgtggagacgaataaaaaaatactaattttggtgtggtttacatcgacaagaataaaaagatggtaaatgttaatagttgtgatttcttctcatgttagttaattaactacttcaacacttgtggctcctgacgatttaagtgctaaatacttagaacaacttaggagatcatgttcgttgtcatctctacttctaattttttctctttaatttgagtgagctctattttttttcaatctgttggggtttatttttgtaagaactatggtgtggtgttatatttttagacaaatatcatattgggtttataaggtatggattagggtttaggttcttgatattttctcttttattctgtaaccatataagtacgaacatcttggtatgtttggagtttacatgaccacctgcatgactgatggaagcacagacagtcatgtaaagttatatctttaactcacgatctaaccaaaaatattcgaacaatggaaaacctcattagatcacatttaaaattatttgtgacttacatacagtgtttatgtttatttgaaaggggttagggtatagtgttttacatttagaccaagataaatatcgggttgggtttaaaaagtatgagttagggtatagtgatatacgtgtagcgaagttaaatattgggttgtgtttacaaggtagagatagggtttagtgttatacatttagacaaaattgaaaaactaatttgggtttataaggtagggggttaggatttaaggtttaaaggcctcatgaatataaaagggggcctcattaaagggggtcaactgaccccctaaaattctatatttgcattgtaaccctttaaaattcatgatattatttgttttacttttgtttttaccctattaaaattacaaattcatatgtaatccttttaagttttatcgtatttttcttctattttgtggtttgatactatttcttacatgttttttacttttttgtttgattcacccataaacattgaaccatatatgttttgctttgtttttttttctaaatgaagtttttttgagttttttaattttttcagttactaattattttgaagttagactttcatactgtaaaaaatatttatgggtccgccgcataggcagacccaaaaaagattaaaggaggtcagctggtctctctagaattctatatttgcattgtaaccctttaaaattcatgatattatttatatttttttgtttttacccttttaaaattacaaattcatatgtaaaccttttaacttttatcgtatttttcttcttacatgttttttccttctttttttattcacccataaacattgaaccatctatatattgtttttttaatgaagtttttttgagttttttaattttttttagttacttattattttgaagttagattttgatactgtaaaaagtatttatgggtccgccgcataggcatacccaaagaagattaaaggaggtcagctggtctctctagaattctatatttgcaattgtaaccttttaaaattcttgatattatttatattttttgtttttacctatttaaaattacaaattcatatgtaagccttttaagtttaatcgtatttttcttctactttgtggtttgacactatttcttacatattttttgtttttattttgaagttatattttgatactgtaaaaaatatttatggttccgccgcataggcagatccaaagaagattaaaggagatcagctggtctttctataattctatatttgcattgtagccttttaaaatttatgatattattaatatttctattgttttaccctttaaaatcactaattcttatgtaaacatttaaagatttatcgtgtttttcttctactttttgttttgacactatttcttacatgttttcaaattttttgtttgattcactcataaacagtgaaccaaattttggtatttttaaaagaaatgaattttttttttgttttttaattacttattatttaagatataatttgatcctataaaaagtattttgggtccttgacttgaaatgtgaaattaacgggtgcaatgtgatagttaatatcctaaacattatatgacacatgcttttgatacgggtaaatagatataaatataagtgttgttatatccatataatatatattttttaatttctttaatgtctctaacttatcactctaaattatgattaattcaagaagatactgtttttgaaattttttgatcgaatttcaaaaattccggtatgcttgatctttgaaatttaaatttaattttgaaaaacaattcttggccgcgcaaggtgcgggttactcccctacttaatagtatagatattgatggtcattggtcaatattgtaaccttgcttgactatcactatatatagtgttcaacattcttcgttcattcgtttagtgctttattgaaatgtgaagttttttaccttttcaatatgttctatttttattatttcctaattttctttatttatgtatttgttgtttcctttaaacttttatggtattattgactttatcaaaatggtaaatgagtaaatttatattctcttgtgattgaccatactttttcctttatacttgtgagatttgatattcgttacattgggttttgcagtatatatcaaagcatcaatgaagattctaaagacaaatacgcccatataaggaaaaagaaagtagaagaaatggtgagagcttatactatagtctctatgtttttgttaacactgttggtgactagagtaacatcttcccaagttaatgctccgtgtacttggacagagatttctgaagaatatgattattgtggcgattctctcacgcgtggcgttccttgggtttctccattgaaagtttgttgtgatactataaaattgaacaagatgaaatgcatatgccaagtcgttacaaaaacgttttcgcaaaactttgacttttataagctctccaaactctctcatgcatgcggcgacctcttagtccctggatcttattgcggaggtaactatcactagactatgcatttttctcagttctcacaagcttatctaattcatttctattgatatttcagtttacaaagtcccgaaaggcgcttaattgagcaggaaaaacgcattgggatacttacattgcttcaatgagggtacattagtatgaataatgttctatagttgatttgtatttcgctaagaactatttttcgttataaatttgatttttaatcacattgattttacactatttttgttagttgttaatttcagtcgtataacttcaatagaagcaagaggacactcgaaaaaaaagacaagttacaagaaagtttgtgaaaacattacaacaatatatgtaaaaaagttttgccaaaaacattaaggacatgttacgataaagaaacacaaggtggctacgcaaaccgcaatttatcatatttggcttcaacgaaataactaccttcacaacaaccattggatcactgcctttggaaccttcaagctcgttgatcgtcaagtccgcaacatcatatccggaagacgacataggaagcgttggcgtctgctcatgctcctttggattagataacttgtatcccactttggctttattgtaatcttgttttttactttctttttttcccaagattactctactttaggtgttgcttctgtaatctcttcactttcatttctaatgatatttacaagcttaccaaaaaaataaaataaagaaacacaactctttggatcatgtgataaaaaaaatattggtttttcaacaatgttgagattgttattgattatttgccatagtgtttagagggtaaacaaaagaggaacatttaaacaatcactggtttttggtcatattgtttcttgattctgtctttacgttcataatgagtctcccactataagctatgtggcttacctcttctttgtccagtgcgtttaaaccagatatgcttgtctataaggttgagttaatttggtactagagtgagactaatgatggttgttggcccggtcttgtaatcaccataagttttgtaagaaaacagaacatgttataagatctatttctttatttatctgttgtttcaggttaagttggtgtgacgccaaaaacctttgtaacaagaaactattgcttctctattttgtacttaatcttcagctagggttctcggagacaacctcccgggaggagaaaccgaaagcgagcagcgttctgaatcaaaaaggctggtagatgtaccgcagacgcagaaggcgggatgggtccgattttgctaatcaactcttggaagctgtatttttcaggaagcatgtcaaagagatcataacctttgcaaatatgtttttgtatcctctgataatccaaaaactccttgcgtttgactctatctgcatgactataacctttcatcttgaaaacaaactcgttgagtcgtctgaaacagaagctgcaatgccaccctgcgtcggataatatcaagtccgtttgtcgtgagtgccggtattgagtccacttcctactatatatatgaacagaggctctccagctactgtaatcaaccggaaactcaaaggagtacatgtattccctcatctccaaatgcattacatctggtatcccatcacaccactgtagaaacttcacagtatgaggactcggaatctcgtctgcatctgacattatcaccgcatctccatccgatacaccagcttctctaagcaaccagttcatcgcaactcgctgttgcccctcaagcaaaaacggatcctcatacggctgccccgtagaccgtttcttcccaggaaacactccatgtacaatcttcccctccgcaaacgcaaatctctccttattggaatcgaagaaaagcggcttcgggatcccggtaaacgtagtgtttgactccaatatcacaaacttcgacacataaggctccaattcccgccatctgacttcaagaagatcaagctcattactgaaaatgatggcatcaaacactcgcctcggttctaaccgcggtgtccagccgtgaagctcacaaagatgtcccatggaaacattctccgcatagtaatgcggtatccgtttaaaaggcggtggcggtttatcccaaagcggacggaaaagatacgatatggtttggaaatttgttaagatacataacaaacatgtcaagaagagtataatcagagtaggaaacacaagtttaaccggcggtggtttacgcaacgatcgaatcgtcatctctatggttctcaaacttcaccaactcattttctttttcccctgcatcaaagaataaactaaactctatcaattaagcataaacctaaagcagattcttttctttggatcaaaacataaaaggttccaactttaaattcacatcaattccaaaaacgagaattgagttgtttaacgactaaacccttataacccaattgagaatcggaaacaacgaacacaaaacggagataacaaagtcataaaaatggtacctttttggagatttcaagtgtataagattaagaaatgagaacacacgaagggttgtgatatcttttttttgacaattcgattgattgatggaagaattttagctgaaagaatcagatttgggatttgtttgtgaaaagctgtaaaagagagagctttggaagaatgtaaaacgaccgctaaacctctctcgctaatctacgcctagccacagatctttatcgaaagaaaacaaaagttaaaacggaatataaatatactgtatcgaaactaataatagaataaggtcatgatgttttccagtttttaattgggttttgaagttcggtttttaaattttttggtggagattttagttttaatttttttttattaattgtagcttgtttcgtttttgaattttatctatagttttttttattataactatattttagttttctatttcaatttttattatttgttttgtgttgaaaatttactaaaaatattgataataaagaaaaagaatgaaaaaagaaaatgtcatgcaaatttgttggaaaactcgatagaattttgttggaaaaaagttatatacatgtttttttgaaattttttattggtttcatgtttcattagaaaatttggttgccaaaaattgtatttgaaggtttgagatgaagatggacgtcgatggtcatcttatctttttaaaatgattatgatatcacaagaccggtcgtaatgattttgattaaatcggtaccttaccaacttatgttatgtcttgcttcagattaccgaaaataatcacatcaaagctcacaagtactatcgcaaaattcttgtagacttcaaatggtgaatctaatgatatgcattggataacatgtgataaggtgtgttatagcaaatcagaaggggggctgggatttcgtaatgtagacgaattttttccggctcttctagctaaacaattttggtgtttaatcacggttccagatttactctttgcggattcttaaaggacaaaatttttggaaatccaactctttggataatataaaatcatattctccattctatgaatagagaagtatttgctcaactagatccctgattaataaatgacttactaaaagagtcggttgtggataatccatcttagtttgggaggatccgtggattccaactcaattctcgagactaacaataaaaaatagttcagctattgatcattctttaaaggtcaagagtcttatagactcacagacaaatttctggaatattaatcttttataaacgctttctgattcggaagatgtcacacgaataagtgctttgcacttgggtgtgtcaactaagaaagataggttaggttagcatttcacaaaatcaggaaaatatatagttaaatctggatattatacggcgcgattaaagactttggataataagtcttcttttattggcccagacatcaaagtcttaaaagcatactcatagaaagtatagtgcccgcccaagttacgtcacttcttgtgacaaattttagcgggatgggtaccagtaacaaacaatttacaataacgcggtataaactctgagataggatgtagtagatgtggtgctttagaagaaaaaattaaccacatgcttttcttatgccatcatgcgcgttagatttgggcactttcacagatacctacagtctgagggaaatttctttatgcatctatttatgcaaatttagattctttattttggcgcataccttcggaattagaatcatcttcatttccacggataatttggtatatttggaaagaaagaaaaaaaaaaaatctttaaaaatgtagataaagatcctctagaaatgttacacttagcagaaaaagagtcagactcgtggaagtcagctcaacttgagcttcacagtgaaactcatggttcttgtaatttagaaaatcataaccgagtgcggcatttccaattgacaacaattattctcaatattattgttttgtggatggatcttggaaagataacgacaagttttccggctaaggatggtattgtatatcatcaaatgtagggacgctaactatggaagttgcttatcttagaagacgtctatcctcattacatgtagaggtggaagctctcatctgagcgatgaagtgtatgattggtgccgacaacaaagatgtagtttttcttacagactgttcagatctggtggagatggtgtctttcccaaccgaatggccggctttctcagcgtatttggagtagttacagagaaacaaggataagttcacaaggttttctctatctttaatctctcgtggtgataacgttaaagtgaatatttaggcacaaaaattctgtacccaaccgtttcatattacatatgtaaacaacaatcattagtggctcgtttgagccctaatttcttttcggatgacaaaaaaacaaaagatcggtcgtaaaattttggtggcctaaaatatatctaaataatgtcaaattttatataacatctatcattaaaaactatcattaaaatatgaaaatatatcttttaaaagtcattgacattctaaaatttagtttttttggaagaagttaataatatcataatataagccaagttaaataaaatattaggagattttgttattaaaaaagaatttaaccaaaaagtaagaaaatggaagactcgtaaaagagagaaaaaaagaaaaagagaaacaagaaaattgtaaaatggaagactcgaaccacaaacctttgactcaaaaatgtgctacataaccaactaaccacaataatcttgaacatgtggacttaaaatttgttaacattcagtggcctaaaacaaatgcttttcctgcttattggtaggccgggcctcgataaacaagtcgaaaaattcatagaagctgatttagtcacatattcatacatttagtgtttttggcatatggtggctactgtacaaaatactataaagttttctccttcgggaatgaacaacgaggcgtctttcccgatcaaggtttccaacattggagaagcttttgcttgccgggcatcaggatatcatcttcttgattcttctttgtttcagattttcctctttgttactctcttttgaagcttttccctgaaggtggcaagatccttgcagagttctccaacagcatagagcttgggaagctcggacaaaaacacatgttccttcaactttctcaaactttctcgaactttctcccccaccttatgcttccaccatctttgacgaatatgacagcactcacggaaaacatctttaaagtttatcgctcaacacttctctcgctctgaaattatgtctaccccttaggaattctcacaatagagtttattgatggaaagatatcttcctcttggatcgccagatcggacatgcccagtggagacgttgacaccgcacatggaatctttcctcttggacacgattttctataccgaaaaagatacgacttcttgcttcgccatacccttggaacatgttctttgcttcctaccgccaaacttaattgcatctaagatagaatcttcgaaaaaatctctacaccatttgttgtttagccgccgctctcactttccattttggcgagcgaaagaaaaactacgttttcctttggtggggatccatgtctttttcatttttggtttgacgaaaatgttctttaattattagttccttttaaatactcagattttttaaatataatttcaataaacttaaaggtcttttacattaattttccattgcaaaaaaatataaaaactcagtaataagaagtttaataattgtttttgacactttatatatttaaatgtgacttaatctaaattctccagaaagtctctatcaagttaatgtatggttggttggcaacaacaagtcaaagtatattatttgttttttcttacgaatttctcttcgaccaaaaatcaattcctaattgaaggaaaaataaaaaaaatttatatgtgtttgtcgtgatagaaaatttcaaaaatttttatatatatcgctagggagtttcgccgcttcaaaccaatggatgacttggtttcttgtttcattctcactggagggctttttgtcttcgatttacttgccttcttcttcgtcattgcagagattcttcgaaaccaacttttctcaacaattctctaaagaaaccagaaatatgaagagtcgagaataaatctcttttctacggtttcagtggcatcactgtaattacatgagaaaattagtggcagaatcggggtaacaaaaaagccaacagtaaccacctgtagtacatttcatattgtaaatagttagtgtactactttcataattaagttctataaacgtactagtttgcaaacaaactcttttaaaactactttatttaataaatttaatcacttctatctttcatgaagtattttttgttggtgttgttgttgtcgtctgaaattttttgtcttaaattcgagggatagaaatagataatgaaagattctccataggtaaaaaaacttataaagcaaagcatttttcattaaaaaaaatatatccaaaagacttacgctagcaagtagcaacactacaaaatagttaattatattttaggttgtttagactttagagattgacatttacaagtgattagcatgtcaaattagttttaaatataatatctcatatttgtctctcacatgttggtctaaaacatttctagaaaactaactattttgtttattctctgtagatatttagtaacgggaggtacaaaagcgtgctacatagagtattggtgaattccacaaagcctaggatatcagtggcgtcgatatcccatttacagacttaatcgaccctaaaactatacttaaacttttaatgtaggtactaaaacatatcccaaatctaattggattgaatctcagaatcctcaaaatatataaatcctaattgaaagcttctaaattattctagatacatacctggactttgtagctcaacgcagcacgcaggaagagaataaagggcaacaatgtagagctcgtcggcggtggaggaacttcgtcagagaagagcaacgtaacgccaatttttttttccgtttcttctttgcttttaattttaattcaatttcaattttcttttaattattgataaaagagaaatgaatatgtagagtagaaaaggatttaagacgttttgttgtgtttaaaggggacatgatagacaatatctcacgcagagatctatctcccttttttaattctagaaaaatcttctttattctattaaaatgttgtaaaatatatctggtagaattataaagaaagatattaatctttttaaatcttaagaaatcagtaatttttatcttatattccctttgatcaatttctattaaattcctgggttcaataccccctagtaagatataattgttttcttttcttttcaccattattttatcttctttgttgaacttgatataactacatacaacttccttatttgcatttagttaaatattgtgttgatttacgtcttccccaatttgagtaattacgttcttcatgtttttcttctatccttcttcgttgatcccaatctaacttgatctattatgttgttttattttcaattttgggtataattagattgaaattagataactttctagaatttatttttaatctaattgatccggtttgtaggtttatgcaagggaataatggctcgaacaaagaacccaattgtatcgaatcttatagatctagagaaaatctttgaacaagaagaagcgccaccagaagtggattttgaagcaacaaatctgtgttcagacaactagtagaatttggtataactatgtttctttcttcactaagaaatttctgatactaaaaggtaaaactaagtataatttggttagatgctctaggtacatttacacactttgcgtaatgaactgctcttctagatgctaaatatcaagtttgataaagctttaaaagtgcagttcataaatttgcagtcatttggtttcactatcagtaagctaatgtggtgggagagattgagttgattctctttgatatgtgtacctcaatttcagattacaagaaataggagaagaacaacatgaagaggatatacaataaacagagaacccgaaaggggagaaaaaaaaaagaacgagaagtagaaatttttttaatagaggtttgtgacaatgtagaagaaacaagtgaaagaggcaataaaatggtgaaagaggcaataaagaagcaaacaagtgaaagaggcgataaagaagcaagaacacaaagatagggtctaccgttgtgtctatgagtcctattgtgatgaggcaaaatatgatttaattactttatgagtaggtttatgaaaacttcatgtattattttgatttttgtcaacatgatttggtttttttttttcttggtataactacgcagtttgttaaacttagtacaacttggttagtattgttatttgaagtatttctttaactaggtataacttggtacgtagttgtactacccagattttgttctctcatcctttttctcactctttagtagaaaaatgaaaaatttgacaattttcaaaatttcaaaaccttaaaaaaacgtgggtcaaattcaagtgggtgaaagcatgtcggtcaaactgcgccatcataaactacacgtggaggcgcaaaacaagtccaagtgacaggtggcgacacagattttcctagtttataagttattccgtatatacacagtttaacttttggggggttttgtgtttaattagatatacttagattaaaattaaacaaatttagttataccaaagattgttgttgttttaggtacattccttatagtttcatgcaaaaacatgtgtgaaaacattaattttgtgtattttgcaatggtatgatgatagtaattttaaagttatcttacaagtaaaaggtctttcttctataataaatgaattagatgaagactaatttttaaagtttgagtaactaatgatatttttcgatgagtagttttaataaccaacataagtggtataatttgtataagaaacaacattacatcaaattttgttgcaacttatgtagatttgttaaattagtcatagttctaccattacaaagcaagtttaatcaagctttacaaaaccagagaatagttaaaacacggattgagagacatacatagttctaccattacgtaatcaagtttaaccgagttttacaaaattagagagtaaacacgaaattagagacatatatagttctacctttacgaaatcaaatttaattgagttttacaaaatcagaaagtacagtaaaacacgagtacattaatttcacttttatcttggccacttccctagatgtcacttccttcgtcttggagacttctactattctcttcatccaatgtatatatatatgcaggaggtctaactttgaatataagaagaaaatataagaagaaaatggtaaagctcactttgaataactgaagaggaatgtcgacgagcttggtcgatttgattcgacgacaaaggattcgacgatggctgcaaaagggaggatcaattttgtcccgatgaagataaagagagatatgttttgattggttgattttgtttttaatttatgaattaaataaataagattgcattggtttggagagtaaactgtgatcggtttggtttgttgggtataaggtaaacatggatttttaaatttcattaagagtatgagagtaagtcatagtttaggagagtatttagattcatatttggagagtgaggagcttctcagatcattgtcccagttgctatgggaaagctagagtatccaacttcaagtccagactacattttgtaatttctctactcatcctttcgaatttctaaagtttggaactttatgggaaatttgacactttcttgtttccagttacgaggttccgagagaatttgattgttactctgttagatgttaatggaaaccaaatattatagaaaggtgtgttgtttttctaactctagagagcaaattgtttgtttagaaaagcaagaagagaccgtcttaccctttagtgttacattgtagcattctctatggcattgggtatttggcttgtcatattttgatgtcactttggggaatccttatactttttgactaagttctgaatctatatctgctctttgatagcctgaaacttctttgcataccttaacattcatcatgaactcaatctcttgaaaagttccatttggttctcattttgataacgaaacttttgtcttattttgatctcattttagtaatatttgatgtaaagggacaagtacatggaattgaacaagtgttcgccgacacatttggaagcaaaggcaagaagtcactcgcagttgttatggactcaagaccgtatagaaagggattatgccaaggtattgagtttcactttgacttctctgtgaaagctttgtgttgagtaaatgacaaaacaaaatcagtattgagtttgagttcttcgtctttcatttgtagtgcattatttcgtgagtcacaagacatgtttttagtatcttcatgaagacactttgtttttaagtatatgtcgtgttctgagtttgtcttttatgtgtattaaaatgaatactttgtcatatttaccatgtctatgccatgtttactttgtccatgaatctcttttagtgtttcaaaatgtgtttatcaacaactaaaaaccaaacttcaattgtctcttttctatcattcttttcaaaagttcaagacactaaacaccatattttattttcaaaatttttgaacttaaggacccaaccattggacccaataattgtttcgagcccttatcatgtttcttaactttgaaattatcataatttcaaaaatttgtaagagtccctcatggtcccttaccattgggcttgctctaaatttttaaggtgatttcaacttttaacgtcggaaacatcaattagttagatattaaacataaaattttttatatgatatattagttgaagtatattaatataaactatttaaatcgttacaaagaagtcaaattatggacatagaacccacatgtatacgagactgggcgagtattggacctatcaaaaaaaattttttataacaaaaacaaaatagcacttttattgttcatattgtttgacagaagcctcaaagttactgttggagctggatttccctccaggaatccacctgcgaaaatatcaggccagtccaataagcccaccaagcccaccaagtaagagcacatgcgcaactgatgagcccacatatgcaaatgggtatttgggcctaacaagcccgatcacctgatgaagggagataagcgaataacaacctaggaactgactgggagatattcgcagaacggacctgatatctcagaactgacctgccgaatatccaggagaatctccgcggatctcggacgaagccaccacgtgcgtagacctatataaagaagcaaggatgacttggaagacatatacattcagcttaacattcacacttatacttttacacttgtaatctcctttcacattggaaaagctctgttataattaatacaaaagtccattcgttcttagcaatataaatctcaaagttcttgtgaagatctagccttcctttctcaaaattctatttacaaatatctagtgtggatttcagaacccacagttactatcatttttatttttgctctgaacatgaataaattaaagaaactgaaacaacttaaaaaaactataacttcaatccttgatctcacagaattgtcaaagtcacctcaacttcctaaggtttggccgctactgattgaacatgtttgggtccataccattgcttacattttttaatctattaagatgaagtaccatcacgaagttccgctagtttctccaacgattcaagtcgaatcatgatttccttcttttcgttcatcatcattgttttatcattctgcatgtgcataacaacaatataattcaccaaattccttatgggaaccttttagacatggcaagcttatggttgcttatgtaatatatatgtctcacctccaaaaacgtgatcttttcagacattaaagtattatcgatctcaagaaagtttattttgtgttccaagtcaataatgtactacgactgactctgctttgaaagggctgctgataccttgttcgccaagatactgaaaaagcattcatatttgtagatgtcacacaaaccctacattgtataatatttagtcacgtaatttcacttaccttctcactttcctaggatcagatgctatctctttaagtttggtactctccgcaatctcattcaattcatcatcagtataatcagtgctaccaaactcgaggttgaaagcatttcctctccatcaaccaaactagaagaggaaaagttactcggagaaggaggcaccttctctaagtcactgagacaactatccaatgaaacactctctgttattctcctcacacccaaaagaggcaatgaagggttcttcttaaccttaatggaagagtctctactcttcaaaggagctaatggagaaaggctatggtaatgaactgcgacgggatgacaacggagaattgctcaatgggggcaagaaggagtatacagacaatgcttccggcccttagttcccaatcccaaatcataggttgaaacctcagcacccacatatcttgactttggtcaatttgttgtttaccaaataaactttaagcatctaaaatgatactacaccaaactaaccgactaaaaatatgtattgtatttgaatctaaattataattctatttaaaattttcaaaaattgagtactaaaagttatttaacgaaagcttctaaatactcagggaattaactaattacacactacagaaataattcaattatattttatcataaggagttttacacagtatatacaaaagtaattccaataaaactgttgactcaaatagaagaaattgttaaagaatttaatgaagagtggaagtaaccatgttgtttcccaaatcaagatcaccttatcttgatttaggttccatctgataccaattcagatcaaagccgacttgttctaatacttattcaaatcaggatcgttattgataataggtttttaagatcaattaatcttaaagcactatcatgtcgttgtagtactgaaggttgtcaatccaaatgggtgtgatgctaacaatcaagatgcaatcagagttcacagagtcaagccaaacaataacaggttttggggtttctagcagtcctaagtgaacatgcaggaaacataaattcaaacagaataatcaaaacactcgaccaacacagctttttaccaagcacttggtgtggtcgagtaacagacagaaaatataacaggagtactcgactacacagtctgtcaccagacaacaaggtggtcgagtatcaaagtgataatcggcgagaaatgcaaaaactaaacaacagctaacaagaagcagtaaacgatagtagtgtaaacatttaaatcaattggatgagaaattcccgaggatggggtaattgagtatttagtttcctcaatctacaggtgattgacatgctcaataaactatccctagacaacaagttcaataaccaagtctaagtgccaccgcaatagaggccctcaagttaaactagtctcagactcaatcaccattgacgagagctaacctaacaggcattatgaatcaacaagttaaagccaaaacgctccctgtaaccaatactttggtacagagtcacgaatctctggaattagtggttcagacatttcctcgaacaccttttgggtgcagaaatgtctaggctcaaattcgagttggtcagaaagcaatagacattaagaacaactaatccagaagggatctataaatcaaactcaaccacttaacagaccgaggattctaaactactctaacccatcctcagaaaacctagtcactacttagacatcattgtagaaaacataaacaatgacatgaatgaaaacatcataacaacaaagtaatagtaagatgataacaggatgaacaacttagtaaaataaacgaaaagcgaatactgaatagattaagagaaatccggattacaaaagcgaagaacacacaaactgtctacggaataaaaacttgttctcgaaaatataaagtacaagctacttatagcgaaatgttctgaaaccctaatactcaacacaacacagtattgggacggattaagaacggtactcgacccaggtggttgagtgattggtcgagtgattagctggagtcttcttctcttccttatgctcgagtgtcttgttgagtgcagatttgagaagactctgaagctggcagtcgagtaggatgtcgagtggtggatgatggtggaactcgacttggtggtagagtgattggccgagtgaatgatgattgtgggactcgaccatgtaatcgagtggtggaggcagctactcgacctgggggtcgacgggtgtgttgtagaggatgtggacgagtacatcaggaactccaggatgacggtactcgagctcgtggtcgagtataatgatttaatcaggtccatttcttccaattagctctccagcagctccaaatcacctgaaaacaacacaaatgtgcaatatgcatgcaaaactaatctaaacatgcaaagcgatgacaaatgatgagaaatggtataaaacagtggtgatatgatgttaaagtgatgacaaatggatgctcaaaacgagtaaaatgcatagttatcagttctatccataagtagtcggtgaatgatttacaaagtagtttaacaacaaaacaacttgaaagattaaagaacgacatttctttattatatatttagaaactactcaaaactaaatctctctctcaagaacttaggtctttggaacatctctccaaagccttttacttatgtcttatggaacaacactccatagactcttctcatatagaaattagctacccctaagcaattacacatgagatctctctcgactctcatgtcatatctcgtgaggtctctctcgactctcatgagatctctccttaactcacatcttgatctttctctcttatgtgtgtttgagctgccttcagcttcgtcttatgagatttcactttatttgagctacccttcttcttcttcataagaatcatatatataaaaggacaaagcgcctcataagcctattgtgaataggaagatttacaaatcttgtccaatttgacattagttgaactttttttctcttgaatttccttttgaattcctttcttgtatctctactagcatcttctagaaggagataatttgctcctcaagtaagttggaattatccttcatgagtcccttaagacaaatggtttgtttagcaacttccgtggttgtcataaactctacttcacatgtgggatgttggtttgtacccaacaatttccccttcaaaccaaggaccaagactttgggccttctctttagcgaaaccttgacacccttaactcaacaccttcttattcgagaagtccatgtgattagtgatgaaccaaaatagaagaatgtactgaagtaattcgaccgtcatcaacattgatattgtgactacttccactatattcgatctattgcttattctcagcttttaatatcatcaaatttgacatcttcaaatttgagtgtatcttagtatccattagcattccttaagtataatcctctctctactccttgaattacttcatgtactagtgcatgttatactttaacggcaagtactccttaaacataactctcttgttctgctccttgaattacgtcttgcactacctcatgtatcaatgagcagtattccttgagcatatacctcttattatgaaccttaaatgacttcttgtaatatttactgtactatttcaacgagaagtattccttgagcacaaaccttttgtttagctccttgaatgacttacttcttatactagctcaacgactactacagaacaccaaaatttcatgacccaacttggtttgatattctctaaaatccagcttggttttaagaatctgtagaaccccacttggttcttgtatctttagaacctcgcttggttccaatccaaataccataacccaacttggtttgatattctctaaaacccgacttgcttttaacgtctctagaacccgtctttattctagcatctttagaacccgccttggttccaatccaaatatcataacccggcttggttttagcatctctagaatccgacttgattctagcatctttagaacccggttttgttccaagattgaccaatcatccaccttcttgagatgcggcctgttgatcacacttcttgacccatcatctaactttcttagatgtggtcccgtgatctttgaatgttgttgggcttctccccacatatcattcaaaatcttcattagatgcctagagactccttctcaatgcaacatcaaatgtttattagattcctagagattcctcatgtatgtaacatccattgagctctcttgaggtaaactctcctcctctatcgatgtgaaaggttttaatagacaagtcgacatgcttttctacaaactcttgaaaccttttggaccgatctaaatcttcaatcaatatgtcaacaagaaaccatcttgttcttgttgattgatttgaactcctcttcacatgatttcctcaattgaagcatgtcttttagactcttggcttgtaagtttttgatagttgacgtctctcacattcaacataaacttgctggaacaattcgaaatttgtttcgggttgtataacatagtcttcaaggtaccgcaactgactcacttgtcaacccgaccttctcagttgtggtactccttgaactccttcaccaacctcatccttgaggtttttttgagtgatatcctccatgacatcatcttcttcatgtattcttgaatcaacttcaatatgacctaaccaagcattccatgtctttctagctttagtagcaagtcattagcacgtctttcggcaagtcctttagcatgttcttctatttctccccatctcatatgaaacatacatggatccttgcttaatccgctttttgtttcattctcgggtagtctttaaacctccactctttctttctcgtcatacagttgtgatcttcggttactcctccttgagtttgctagttgatctttgctagacccgtgcctctaccgaaactgtcaccaccattacttcctctgccataactaccatagttaaagcttcctctaaactctcatagcctccatgcttagggtttgtcaaggagcattagttttccttgatcttcactttgggtttcttcctcgacacgatcttcatattccttaagggtttgaagccttgcctccttcacccagtctcctccgtggtgtttggacttgatggcttcccaaagcttcctctattataacattatctgccataacggctgatataagtcaaattgccttaagaccactctctcaaatatgagatcgattgtagcacttaagggtcgaattccacaaagctctcagatcacacaatagaccaaggttttgaattaagctaagtaagatagtaatgaaaataaaaagaaacaaaaggaagcaatagcagattgtgaggttgtaagacaagaaagtaaaaacgtcagacttagggtattctcaggaaactattggttagtagatctaatattagctaggttgttatcgaaccattcttaaactcaaactctaattatggaataaccggtgggcgtgccgcgaaactccctatatctatagctaagaataaccggagaagccgagagattattaacctaaatatgcattcttaacgagttcggttgttcaccttagtagataggccgattcttattacacacctataaaccaggctcatcaaataatagatccaactacagatacctatggcgggcatatctattgtctgaattcaagttctaggtgatcaatctagatctagcattaagaacaattaaagatgaagaattccacagataacctagcagggggcaatctattcgaccatatgaatccctaatgagaaatcctaaacctaacaagtggattactaagacataatcaaagaaacacaaatcatagtctgaataagaaatcaataatagcaagagaaagagtaaagaagatcttctccaaagggagtctccacagggttttgctcccaaaatacaaaaaagatgaggagaatagcctctccaagcttaggtctaaacaatgaccttaaaaactatatatatatgacctaaaacacgtgatgggccttctttagaaataggagaaagttctgggccgaatttggaaatgttcaaaaacatcaataagttgcgtttcgaaattgctgttaggtattggtgtcgctcgacaccaggggtggtgtcgttcgacacctacgtgctttttcgtctccggatttcttcagcagcataaattctctgttttcctccagaatgctccattatctccaaatgaatcccaaacatgtaaagacctaaaaaagactagaaaagactctagaaataacaaaaggactctaaaacctatacctaaaacatagttaaaaacagtaaaaatagggatatatcaactctcccagacttagcttttgcttgccctcaagcaaaacacaaaagccgaacccgtggaagatgtttgaaaacacaggaactcccaacattctctagtctattgccatgattattttaaccaaatcgatatgcctagtagttctaatcaaatcctaaccaacatgtacttctttgcaagcttacacaacattctagattccatacctaagttccacaactatatccaccaggctttcatcgctgggtctcatcaaacaaactaacattcaagcttgactcattcctgtactataccatgataaatcgaccattctttttttatttttttctttggtgttctttctctctcccagacttattctttttagagagtaaacaaaggggaactcgcatactggatcgacaccctcggcatatttccaacctttgtaattgatcattccaaataatgtataataatgggttcataggaaacattcctacccctatacactatctgaaaatcgtctcaatctctcattatatttttctttttataaggggagaggaacacattctttttatcacatttgtctcaatatcaggtatgaacaaggagtcaaaatctatgaatactaaccgtttgaaaaggtaaaaggaagagcagtgagattagctccagccttagtggttgagttggaaactaggatatcctcaaatttgttggtttgccatctagattttccaatagtcggattgagtcgaatctgcagcactcatcaatcaagcaataaacaagagaaatatagatcatgattcctaactaaactaagcaaaaacattttttttgtttttttttttaaactcaaaaacgaaaaataataagaatcaaaaataaaaccaatattagtaagaacctcccccagacttaaacgacactgttcccagtgacattcaaatccgaagaaggtgggaaaaataaataaaaaataaaaaaaaaagaaataaagggaaaagaaaaatcaaaccagtgggttgcctcccactaagcgcttgtttatagtcaatagcttgactttgatggaatatggggatcaggtggatcagatggtggcagtaaatatcgcggagaaagacctctcatcatccatactggtgtagaagcaattagtgtatgaggtctatctaggaagagaggagcatcaacagggtagaactcaggtatgggtgggatactcctttttcttgcataatcatcaacagaaagaacaagcgctcgacgagaaactcgtggcttgcttaaccgtaaaacagtctttggaaattttaaagtcttattgatgatatctggaggtttaggaggaggagatgagtaccttagccgtttaggaggtggatgaagtatgagaggtgcattgtgtgacgtgacagtagtgcttgaactgatagcagtgatcccagcttgaaaagtagctatcggacatgactcttcctcaaccagagatgtctgtcgatcgacgcgagtggtggtgtcgatcgacacttgtgctacaactcgactttcctttgcatgttgacaattcagcgctgcaatctgcatccagtgtcaatcgacactaggtgagtgtcggtcgacactactatctggtatcgatcctactctgtcaatcttggtcgattctgctctgtcaaacatcggcacttcctcaggttggtactggtgtcgatcgacacccaggtggtgtcggtcgacactatcaatgtgtgtcgagcgattttggagatcaatgtcgagcttgctcgattctgcttcgtcacagcctgatgtctcgtatatatgcgatggtgtcgatcgacaccaagggttggtgtcgttcgacactacctctgcaactacaaaatcgtcactctcctcaatcttcactaactcatactcactttccattgaagcagaatgccaggaagtagtgaggctgctctcattccatctagggataggtctctctaagatcctctgttgaccttccagaatctgttccagcaatgattctatcttgcttttaggtgtgggtggaggggggggcttggtaagaagcaagatcatagttccttgtgaagctgaaactattgctattctgaagcggttgctggaactgagaattctgagtgtagctagttggaccattcccataggaacctctgtagccttgttggtgatcatatctctgattcggaaaacctctgctactaacataatcgacatcatccacaaattgattgtggaccgcgttaagtttagccatgatcccagcaatcttactctcgttcatgtttctcgtttggtcctggttctatgattagacaaacacctgaaacacacaagaaaaagaaaagagaaagactaagtaaaaaaaataaaaataaatacttagaaaaaattctaatcctaatctaatggtgaatcgtagagaaccccggcaacgacgccaaatttgatataggtcaaattgccttaagaccactctctcaaataagagatcgattgtagcacttaagggtcgaattccacaaagctctgggatcacacaatagaccaaggttttgaattaggctaagtaagatagtaatgaaaataaaaagaaacaaaaggaagcaatagcagattgtgaggttgtaagacaagaaagtaaaaacatcaggcttagggtattctcttgaaactattggttagtagatctaataatagctaggttgttatcgaaccattcttaaactcaaactctaattatggaataaccggtgggcgtgccgcgaaactccttatatctatagctaagaataaccggagaagccgagagattattaacctaaatatgcattcttaacgagtttggttgttcaccttagtagataggccgattcttattacacacctataaaccaggctcatcaaataatagatccaactacagatacctatggcgggcatatctattgtctggattcaagttctaggtgatcaatctagatctagcattaagaacaattaaagatgaagaattctacagataacctagcagggggcaatctattaaaccatatgaatccctaatgagaaatcctaaacctaacaagtggattactcagacataatcaaagaaacacaattcatagtctgaataagaaatcaataatagcaagagaaagagtaaagaagatcttctccaaagggagtctccacagggttttgctcccaaagtacaaaagagatgaggagaatagcctctccaagcttaggtctaaacaatgaccttaaaaactatatatatgacctaaaacacgtgatgggccttctttagaaataggagaaagttctgggccgaatttggaaatcttcaaaacatcaataagttgtgtttcgaaattgccgttaggtattggtgtcgctcgacacctacgtgcatttttcgtctccggatttcttcagcagcataaattctttgttttcctccagaatgctccattatctccaaatgaatcccaaatatgtaaagacctgaaaaagactagaaaagactctagaaataacaaaaggactctaaaacctatacctaaaacatagttaaaaacagtaaaaatagggatatatcaacggcctctgaattcctatagcctccaggcttagggttcgaggttctttattctcagttgtggattctcgcccgccgttaccaccgtccttggatcgagtcttcaacttaagttctaataccaattcaaataaagatcaccttatcttgacttagttaccatcttataccaattcagataaaagctgacttgctctaatactgattcaaatcaggatcgtcatatctagaattagtcgctgaatgatttacaaggtagttcaacaacaaaagaacttgaaagatgaaagaacgacttttctttaatatagatttagaaattactaaaaactaaatctttctcaagaacttaaatctttggaacatctctcaaaagcctcttacttaggtcttatggaacaactctccatagacttttctcatatagaagttagctaccccataagcctattactcctgaggtctctctcaactctcatgagatctcttcttaactcacatcttgagctttctctcttatgtgtgtttgacctgccttcagcttcttcttatgagctctctctttattcgagctgcccttcttcttcttcttcttcttcttcttcttcttcataaaggccatatatataacaggaccaagcacctccttagcctattgtgtataggaagacttactataggagctcaaaaaccgaattgagaaacaagtacaaattttattaaataacgataataattataaattacaatagcagtaattaaggacaagaagtaaatcacggaggcaagatatgatatatttgatatctagtgtttttggttgttttaaaacccctttttctcttagtttttgttgctttgcattcatattttggcatatagtattggatttgcatttgcatttggttttcttaggtacatgagtggagtttaaagttttggaagtaaaatggagcaaatggagcaaacaaaggagctaaaagaatgcaaagtgaccaaagtggagaagctagcaggacaatagaccaagtggtcgattccgtggtcgattggtcaggaccagagctacggaggaatatgaatctaccaaagtggtcgattgcgtggtcgattgcctggtcgattggtcaggaccagagctacggaggaatttgaatctaccaaagttgtcgattgcgtggtcgattggtcaaggattaatgttgcggacgatattgaatctaccaagtgatctattgcttggtcgattgccttcctaaatcgggtcaaaacctggtttgttccgggttgatccggtttattttctcattactataaatactcttaacctagttttagagaaagaaagcttttgttttggagatcaaaacttctctttaaggttctttataagtttttgtatgaatgttgagttcttaagtttctatatcaagtatttcttttaaatttctcatctattctctaatgattatggctttacaaagatcaaaccaattcttttgtatgatcatgatcatgagtgagtagtctcctagagttctttggttagggttagattaggatggtttagatgttgggatatggagtttagggctagattacttaagattcttacttattggttgcttttaaggctagatcaatcttgatcatgttgatttagatactaggaatttcattcccggaaggtgttcgatgaaattcccgaaccaaaatctttaagtgcttttcataccttacctttggaaattgttgattagggtgattgattgattgtaaagggattaatatcatggaaatgtattagtcttgtttagtgttctatggcctaaggatcattgcttgttagaagttatttgttgctccataatccatctctttatcatttctaattgattaccttaacccgagaattcgtctttacttatcactaagtcatttgttaatttcccgctttgtttactttcgaaacttgttagtcttttgtttcttgctttcttttatcttgttttgcattgtttgcttgataatgcattgttactaagattaggaacactcaaagtcaccttattagcttagattaagaaattttgtgtattcttggtgagttgattaattgtaaattgtggttcgataattaattgaaataaatgctacatcaatttggcgccgttgccggtttgcaatagttattagccattaggatttcatatttgcttgagactaagccttttactttagttactaatcctttatacttgaatctttgctcttgttttaaaggtgtatgaacctacgaagtcacggccgagcaaacttagtagaagagattcacgacatccgcttgtttgaaagagaaaacgctagagcaagaagagaacgagaacgacttgaacaccttgctcggttatgcgtcatgaatgaacccggagttgggggccataatggaaatggccaagctaatagggatggtcatatgccacaacatcaaccaagtgctcatcaaccaattggagcctttgatgaaccaaacatccgtggaaatagaaacggtattcaagctcctccggttgagaacaacaactttgagattaaatcaagcctcatcaacatggttcaaacctctaagttccatggtttatcaatggaggaccctttggatcatctagaacaatttgatatgttgtgtagcacggtgaaaatcaatgggatctcggaagatgcattcaaacttagactcttcccgttttctcttggagatcgagctcgtatttgggagaagaatctacctcaacgctccatcacctcttgggaccaatgcaaaagagccttcctctcaaagttcttctccacaacaagaacggcaaggttgagaaatgagatatctagcttcactcaaaggagtaatgaaagtttttgtgaagcttgggaaaggttcaagggatacaaaatgcaatgccctcatcatggtttctctaaggagtctatactaagtaccttgtatagaggagttctccttaaatttcgcttgttgttggatacaacaagcaattgaaacttcttgggccaagatattgatgttggtttgtctttggtagagaatctagctcaaagtgatggtaattatggtgaagattatgaccgcactccaagagaaagtaatgagatgagcgatctacactaagatttggtagagaatctagctcaaagtgatacaaacgctcttcttagacaaattctagaagggcaaggaagaggagcaatcgatcttgccacacaaatgaaaggaatgcacaccaaggttgataacatttatggtgagctcaatgccaaaatagagcgtttaaatgtccatgtttatagcccatcctcatccacttccaagcatccaatgggaactttaccgggtaaatccgaaactaatcataaggagttttgcaatgctatcttcataaacgattttgatgtggttgaaaatatgagctatacacaatcaagagaagatggtagaattgatgagaatgaaaaggcaatagaagagatctctaaacttctatatggttctaatgttgagaacttagtggttgctagtgatgagaaggccaagaagagtacgaatggaaacgatgtggtaacaaagagtgttgaaaagaatgcggcatcaaaagttgagtctcctccttatgaacctccacttccgtttcccgggcgagttcttaccaaagctaaaaagaaagttttctcaagtttcaaatccaacatgagtagagttggagcgcctttgccttgtgtggaaaacttgtctcaagttcctcttcattttcagttcattcaagctattctagaaaaccgagagaaagtggaagagatcatgagagcctttgattcaccaatagcaccataaacggaaccaaaatctattatcaagcttgaagatccgggtaaattcaccataccttgctcacttggtgatttacaacttgatgatgccttatgtgattcgggtgcaagcgtgaatgtgatgtcacttgcgatggtaaagagtctagcgattaaagatatgaaccaccacacctcctccatcatgtttggagatgcttcttcaacaactcctcttggtttgattgaagactatccactcaaagttggtgattgcatagtcccaacggatttcatgagagtggagatgaaagacacacccacaaggttcctctcattctaggaactccatttctcaacaccgtgggagcaaacatcgacttcccaaacaagagagttactcttctccacgtgaatggtaaggtctcatatccaatcaagcctttctccacaaagttttgtggaacaatcactaatgaagaagtgaaaacaaagaaagagcctaaaagtttgaaggatcaacttgagatcaaagttgtgaatgtgaagaatagagaggctttaatggttgaacagaaaatcttggatggtgaatgtctacactttttgtttgatgagcaagaagaaagtactgaaaagaaggagttgagtaaagctaagttgggttttgagaagaacaagaggatgatgaaaacaacccaccctcccacccttgacaattcaccaaatcctacctcttctatgactttaacacctttgaggtataatgatggaattttagagtatagagtcaagtgcaagggtcgatccaaccctttttcatcggttaaagagattctcacaccggagttcaaagaaaaaggttcaaaaagtgttgaagaattgatgaaagaggtcctcacacttgcattcaagggctctacaaggagtttcacaactcctcctatcactctactccctaaggttcacaactagggccaaggtatggtcctatctatcttttgtatatactattttctttcattttgtctttgttttctgttagtttttttttccacggaattatcttcacaccgagacggtgtgaaataagtttgggggagagactaaccatctaatgttgtgttttgttttgattttatttctttgagtcttgcatagtcaataattaagttttgagaaaaatcaaaaatattttgaaaattttgaaaaatccaaaaaacaatcatgtaggtttgcatattatttttctcttttaggattgagtctagtagcatctagtttacatttgcatatgcataggggataatgatttaattaccttgtagaaattcaagtttaggattgaacttaaagcccttgatcacagttaatcgttgcttgatcatctttgaaaaaatggaaaacccatgcttagacttttgcgtttctcgaaagcaatttctacttgtgtgaagcttacatgacttttgaaatatctctatgaatttggacttaatttgatattgatttctcgcttatggatcctaaatgcattctcatggtagtctaaaagactcattcgggttatcttatacgttttgccaatcttttgttaacccgaatggccattctcacctttagaatggttttccctacccttaaccttaaaaccttttgtttcaagcctatgtattatttgtgagtgaggcctcttgtatgaaaatgctatagattttgaaatcttcaaagtattgagaacgacaaggttttagctcttgtttttagctagcttttggaacatctttggactagctattaggttgggaatgaaagatttaagtggttagattgaatacttgggattgggtttggaaaaaagaaaaaaaaaagaatgaatgaaaagaaatgtgtgatcaatggttttataggagtccctaggaaataagttataaataagaaagctctaaatctctaagtgtaaagagaaagtttaatatcaagctagttccccaaaagaaaagaagcttgcaaagctataagtatttgagaacaaagataaacttagaaaaaagattggaaaagagcaaagtgttaaaagaataagtcttccctaggtgactaacaaaagaggatttatcttgaggattgtggttcaaaaagaccaaagtttctaatgattggggttgaaaagaagaagaaaaaaagtttgcaagaagggtagaaataggagtttacatctaagacgggtagaacaacaagagctagactttgtatgcataaattgttcttggtcttagatggatttcatgattgtctagcattactttttttttaaagaaacccaccaaaatgtaaatcttttgaaaccacctccaaaagccttcaccaaaaccgattgagaatgatttatcttccatttgcgagaccgcgccaaacacttaaatgaatgttaaagagatgtttcaacttgattgtaagtctttgctaatagttggagatttaaaatagagctatgcactaagaagagtatggagaagtacaaaagagtatgatgattgattcaagcaaatttgaactatctttaaggactttgagttgaatccttcgtttgatattttgtggctatgaatccccaccttcaaacctctttctcttcttatctcttagttcttgcttgaggactagcaagagataagtttgggggagttgatatctagtgtttttggttgttttaaaacccctttttctcttagtttttgttgctttgcattcatattttggcatatagtattgcatttgcatttgcatttggttttcttaggtacatgagtggagtttaaagttttggaagtaaaatggagcaaatggagcaaacaaaggagctaaaagaatgcaaagtgaccaaagaggagaagctagcaggacaatagaccaagtggtcgattccgtggtcgattggtcaggaccagagctacggaggaatatgaatctaccaaagtggtcgattgcgtggtcgattagtcaggaccagagctatggaggaatttgaatctaccaaggttgtcgattgcgtggtcgattggtcaaggagtattgttgcggacgatattgaatctaccaagtgatctattgcttggtcgattgccttcctaaatcgggtcaaaactcggtttgttccgggttgatccggtttattttctcattactataaatactcttaacctagttttagagaaagaaagcttttgttttggagatcaaaacttctctttaaggttctttatcttaagtttttgtatgaatgttgagttcttaagtttctatatcaagtatttcttttaaatttctcatctattctctaatgattatggctttacaaagatcaaaccaattcttttgtatgatcatgatcatgagtgagtagtctcctagagttctttggttagggttagattaggatggtttagatgttgggttatggagtttagggctagattacttaagattcttacttattggttgcttttaaggctagatcaatcttgatcatgttgatttagatactaggaatttcatgcccggaaggtgttcgatgaaattcccgaaccaaaatctttaagtgcttttcataccttacctttggaaattgttgattagggtgattgattgattgtaaagggattaatatcatggaaatgtattagtcttgtttagtgttctatggcctaaggatcattgcttgttagaagttgtttgttgctccataatccatctctttatcatttctaattgattaccttaacccgagaattcgtctttacttatcactaagtaatttgttaatttcccgttttgtttagtttcgaaacttgttagtcttttgtttcttgctttcttttatcttgttttgcattgtttgcttgataatgcattgttactaagattaggaacactcaaagtcaccttattagcttagattaagaaattttgtgtattcttggtgagttgattaattgtaaattgtggttcgataattaattgaaataaatgctacatcaatttggcgccgttgccggtttgcaatagttattagccattaggatttcatatttgcttgagactaagccttttactttagttactaatcctttatacttgaatctttgctcttgttttaaaggtgtatgaacctacgaagtcacggccgagcaaacttagtagaagagattcacgacatccgcctgtttgaaagagaaaacgctagagcaagaagagaacaagaacgacttgaacaccttgctcggttaggcgtcatgaatgaacccggagttgggggccataatggaaatggccaagctaatagggatggtcatatgccacaacatcaaccaagagctcatcaaccaattggagcctttgatgaaccaaacatccgtggaaatagaaacggtattcaagctcctccggttgagaacaacaactttgagattaaatcaagcctcatcaacatggttcaaacctctaagttccatggtttatcaatggaggaccctttggatcatctagaccaatttgatatgttgtgtagcacggtgaaaatcaatgggatctcggaagatgcattcaaacttagactcttcccgttttctcttggagatcgagctcgtatttgggagaagaatctacctcaagctccatcacctcttgggaccaatgcaaaagagcattcctctcaaagttcttctccacaacaagaacggcaaggttgagaaatgagatatctagcttcactcaaaggagtaatgaaagtttttgtgaagcttgggaaaggttcaagggatacaaaatgcaatgccctcatcatggtttctctaaggagtctatactaagtaccttgtatagaggagttctccttaaatttcgcttgttgttggatacagcaagcaatggaaacttcttgggccaagatattgatgttggtttgtctttggtagagaatctagctcaaagtgatggtaattatggtgaagattatgaccgcactccaagagaaagtaatgagatgagcgatctacactaagatttggtagagaatctagctcaaagtgatacaaacgctcttcttagacaaattctagaagggcaaggaagaggagcaatcgatcttgccacacaaatgaaaggaatgcacaccaaggttgataacatttatggtgagctcaatgccaaaatagagcgtttaaatgtccatgtttatagcccatcctcatccacttccaagcatccaatgggaactttaccgggtaaatccgaaactaatcataaggagttttgcaatgctatcttcataaacgattttgatgtggttgaaaatatgagctatacacaatcaagagaagatggtagaattgatgagaatgaaaaggcaatagaagagatctctaaacttctatatggttctaatgttgagaacttagtggttgctagtgatgagaaggccaagaagagtacgaatggaaacgatgtggtaacaaagagtgttgaaaagaatgcggcatcaaaagttgagtctcctccttatgaacctccacttccgtttcccgggcgagttcttaccaaagctaaaaagaaagttttctcaagttttaaatccaacatgagtagagttggagcgcctttgccttgtgtggaaaacttgtctcaagttcctcttcattttcaacctgcagcccgacaacctgcagcccggctcagcccggttcggttcggttcgatccggtttgaccaaagtgtcccactttacacccttatttctcattcaatagaactccttttttgacatatgagtataccagtttgtagtactctttaccagcttttcaatgcactaatgacccgacaattctgttcaccggaatttggccggaaagtcaccggaaaagttttgtcaaaaactttccaacaatcctccacatgaatagaaataagtctaaacatatgacgactttactaatcctaaggactgacccaactagctagactagacagaacttcgagagtataaacgaaaactaactgtatctgagttggtggcgtttttcagctttgaacctactcattgttagtacctatcgagtttactcggccagatggtgaacatgatgtcttgaaccatccggagtttgatgcaaacttagacagcaggtataagacagcttcatttgcagtcaccttatgtggtatcctattgaggatgtagttagtggtaagcaaagcttccccccacatgttctgggctaacccagattcatgcaacagtgcattcatcatttctttcatagttcgattcttttgttccgcaactccgttagattctggtgaatagggagcaattgtttggtgtataatgcctttttctctacaaaatgcattgaatagctcattatattctcctcctctatcacttcgaactattttaatagttctctgaagctgattttctacttcgagtgtaaattctttgaattttagcagagcttcatctttgctatgcaatagatatacataacaatatcttgtgcaatcatctatgaaggtaacaaagtatttcttaccacatctagtttgcacatattttaaatcacataagtctatgtgaattaaacctagaggttcagtcgttctttcaactcgtggtgagggagttttgtgagtttttcctgtacgcatacttcacatttttcttggttatttttgaatttcagaattaaattcagttttgcattttttacattgttttataattgacatgtcctaaacgttcatgccaagtagtaaacgactcaaccaagtaagcaataggatttccattcatttcaacaacagaagcagaagctacatttttcggaaagactgtcattacagatattttgaccagtccaccttaacaaaaccctttcccagatacaccccatgtttcttaagaactagcttatcagactcaaagttaacagcaaagccattgttgcttagcaccgttccagagatgagattcttccgcatgtcaggtacatgcttcccgttttgcagagtaagctcacgtcccgaagtcagcttcagaaccactttgcccttaccttcaatcttagatatcgccgtgttgcccatgaagagttgttcgtttgacttgttcttcacataggtggagaacatggtcctatctgtacagatgtgtgtggttacaccagtgtcgtagtaccactccacttggttgtcgtccaccatgttacattcagtgaccattgcaaccatatcctcttcagttaggtttgcctagctcttaacatccgtggctttgctcttgaaaacatcagccttgtgtccaatcttgccacaatgatgacacttttctttgaacttccgctcaggattgttcttcttgaagtttgttgtcgatgaaaccttcaagttcttctgaggaatagagaacccttttccgttgcctttcagtttggacttatgctcagctacattaacatcatgcccttgattctaagcacccgcgtgagccccacgattgttcccttcaatcatcaaccttcggacgatatcatcagaagtaattgccttacgtttgaagttaagatacttgaaatctgaccagcccggtggtagcttctcgatcaagcaattcgtcttgaaaacgttatagatcgacatcccttccaactcgatctcttgaaagataagttgaagagcctccacctgttccatgattggtttggagtccaccatcttgaaattcagaaacttcgcagttgagaatctttgcattccagactcatcagtcttgtacttgttctctaaagttaaccacaatgttttggaagacttggccttgctatagaggtcaaacaaatcattcaccaaacggttcaggattagacctttgcaacaatagtcaccttgagcccaggtatccatacctccaaccgtatacacatctgtggtacattgcagaactattggtggatcctctttgaggtacctttccatgtttatgctgaccaaatagtagcgcatcttgtcttgccacgttttgaacccggatttttcatcaaacaagtctggcatcatcccttgggaagcggagggtcgtatggtagtgttggttgaaccattaccgaacagatttcggcgcacgctcatgtctcttactccaagaacacggcgatcaaaactcgagtttagggtggtatggtaggttgatttcccagaggccgaaaaggcgagtgacgcggcgatcgccgaggctaccgaggcgaaactggcgagagaaagggccgagaaagaggcctttgtcaacaaggagattgccatcagggtggccgagcgcaaccaaaagatggactctaaggttgttcgctgcaggcgactgctcaccgaagcgagaggacttagggacagcgaagtggctcgggctgcgcaaacggcgaggcgagaaacatcggagaccttcaccgccaagctcaaggtggccgaggagaaaatgtcgctcttcgaggatgctaacgatcagttgtgatcgcgggctaatgcacagctgatcaaggtgcttgaagatggcggatccttggcgaccgagaagaaacacgttgaagattggctcaaggatttcgccaatgcggaggtgaatctcgttcgtctcacatctgaataaaaggaagagctcaaagcccttgctcccgagccggctcctctaagccctagaggtcatagattggtcagactctcgcggatgaagtaggggtcacagatcagtctggatcgtatttgccttacgcagggactctcctcactgaacagcctgagtagatacccgtggcgtttttctttagatttttgcgcctggacggctttatccgtatttctgtagaacctatgcctgaatggctttatccacttattattgtagaacttatgtttgggatttttttttttgcttgaatgtttaaaaacttattcgttcccgaagcgttttattgactagggccagtgtgaaagaacttgcttttgagtgaaacttctcggttgcgaatatatccgattcacttcttaaccagcatttagaaacgacctggggtaccggtgttagagtataaccgggtttttgaagataaaagaattctgctcagaagtaatttgatagattttatctcgtacttatatagcgcgctgtagccgagcaggcgtaaaagatactatgagccgtcgctcatcgtattagccgaagcgtttaaaaaggtgaaaatgatttttatttatgccgaagtcggaaacttacaagataaataatagataggagtatggatatacggacccacttcccccttttttaataggaggggtagctgaactcgtccgaagacgagctgcctacgtacccttttcagggatcaagccacctcgtagttcaagtttagtcacctcaaatttagttatagtatttccttaggtgcattgcattccaagatcttggaatggctttcgccgggtcggatgactttagagatctggtatggtccttcccagttcgccccgagtttctcagcgttcgtctcgacggtgttttgaaagactttttggagaactcggtctccttcatgaaatcttcgatgtcggacatttgaattgtaggatcgagcagtttcattctggtagttttatattcgcactagggctgaatctcttcgttcatcgaccagatctagctcgtcaagcatcctttgagtattatatgtttcatgctcgggagacatgctccaccgtagacttcgtaccgtcattttggctggaatcacacattcgttccgtagactaatgcgaaatggggtttcttatgtggctcgacgtggcgtcgttcgatgtgaccatagaacaccttcgagttcgtcgacccacgagcccttttttgcggtgagccgtttcttcaagccgtcgaggatcgtcttgtttgcggcatcggcttgaccgttcccttggagatatcgtggtgtcgacttgctaagacggattccccacttatcgcaaaaaccttggaagcgggttgatatgaactgcgagccattgtctgtaacgatctcgtaagggaccccgtgacgacataggatgtgtttccacatgaagctttcgacttgagcttccttgatgctggcatatgattcggcctctctcaatttagagaagtaatcggttaagacgagaactaacttcttttgcttcgaggcgtgcatagggccgattatgtccatcgaccaacgcattaatggatatggtgaggcgattgatgacaggagctcggccggtagatggatcgttggcgcgttcctttggcatttttcgcaatccttgatcatcgttggccagaaataaccgaggcgttttatcttgatggctagggctcttcccccagaattatttccacacgagcctccgtgaacttctttcatgactttgcgagctgcttctttttccacgcaagtcattaagggtccggataaccgccacttgaagagtttctcctcgactagaacgaaacgcgcagcctcagctttcagcttccgagcttcccacttatccaagcgcacttttcttttggatatgaagtttctgatgggttctatccattctgaatcgcaacccaggctcgggctgttatctgatgcatcttcgtaacctgcgacgacctgtatggggaaggcatgttccactttgtcgagctcgatgcttggcttttcgataaactccactgggatgactctcctcatgttcaggtcggatgttgaggccagagcagctaaggcgtcggccgacgtattttcccctcggggaatcctcgtcaacttgaactcgtgaaactgcttcgcgtgatcttgtacaagagccagataggcttccattcgtttgtcccaagtcgtgtactcttcgttgaactgattcgcgacgagctgagagtcgtagaaagcttagatttttgcaatcttcagcccccgagctagattaaactcgaccacgagtgcttcgtatttgaccacgttgttggttgcctcgaaattcaatctgaaagactgctcgagaacctcgcccgtgggggaggtgagacggatgcccacgcccgaactttgttttgatgacgagccgtccacgtgcagtagacaagttatatcgagcgaatctctcaagcttcctttgtaggtagttcgacgataaagtcaccgaggacctgggattttgcacatgttttgttccgatactcaatgtcatactcgctgagctcaattgcccacttagccagatgacccgattggctgggactatgcaagacagcgcggagcggcatgtatcccattaccacgatggagtgggattagaaatagggtcgcaatttttgagctgacattacgactgctaaggcgagtttttccatttgcaggtagcgagattctgcgccggtaaatatttgtaagacataaaagatcagcttctgttcgcctctgtcttcttggattaaaactccgctgaccgcagtatccgatacgacgacatacaaatagagtgattctccgattacaggtttcacgaggatcagtggggtcgccaggtacgagttcctggaaagcctcctcgcatcgggttgtccattcgaactttttgtttccccgaagcacgtcgtaaaaggccaagcacttgtcggtggatcgggagatgaatcggttaaaggttgtgactcttccagttagacgctgcatttcgcgtttgttttgaggcgatgccattcccaataacgcctcgatttgcttcggatttgcctcgatgctgcgatgcgtgactaaatatccgaggaattcaccggatcttactcagaagcgatatttggccggattaagcttgacgttgtagaggttaagctgctggaaacacccgtgtaaatgggctacgtgttcttcctcttccatggattttaccaacatatcgtcgatgtacacttccattgttttctcgatctgtaatgtaaagatcttgttgacaaaatgctggtgagttgccctggggttcttaagtccgaatggcatcactcgctaacaaacaattccttgctctgtgtagaaagtggttttctcttggtcctcggagttcatcatgatttggttgtatccagcgaaagcgtccatgaacgatagcaatttgtcccctgaggttgattccacgaggcgaccgatatgcgacattgggaaactgtcctttgggcaggctttgttcaggtcggtgaagtcgatgcatactctccacttgccgtttttctttttcaccacgacagggtttgcgagccactcgggatattttgccttagtgatggagccgatccttagcaatttttctacttcggctttcacagcttccgctcgctcccgacctaactttctcctcttctgtttaacaggtttaaacgttggatcaacgttgagctcgtgcgcgacgatttcgacacttactccaggcaagtcttccggggaccagacaaaggtgctgacgtccatgtactgcccataggttgtgccaaatgcaggcgaaggatctacgagaggaatcgggccattaatgacggcgacgagggaggagaagtgtttgaatgaatggatgccctcgtttttgtgggtaaaatgtgagtgccccaagtgtaggaacccttgaccgatggtccgtaagatcatctaggaagaatatagttaactttttagctaattatagaatcggctgagtcattgcgaaattttgtatgtaaatatgttacggcttaaaattttttaaatagtatataagactaagtttaaaatttggtacttataacttatatgaaccttttgaatgtatgataagttaagtattttcttgcttgtgtatggtcgaccattatatgagtgagaaatcacttgtataagaatcggatgattatgtttgagttcgaaaccccatcggaactacctcagcaacgtccgaccaaatgaagaatcggagaaaagaaattgaacttggatggctcgagacaagtctaaatcgggcatatttcagggaaacatgcaaaagaaaggaagctcggttcgaggagcaggcaattgtataatctggacaaggaaattcaaagcccttgtaaaaatgttgggagaattcgtggaagttgagaatgaccgaaggttagaattcgaggacgaattctattaaggaggggagaatgtagtgacccgcgtaagggcatcgggcacggccaaaggaccgaatgagaaaattttgtctgaatgcaaagccaattgaccaagtgtgtccaaacggtgccaaaacattaaagggcaagaatgggcacgaatgggcaaagatggaagttaggcgtgccgcggtgaagtttgcctcaccggccgcggaaccgacattagtaggacaccccactcgcggtgccttgcggctaaagtcaccaaccttggagacgaagtcaactgagtcttggagccgaagttgatggggcggtcgagtgacacccgtcgccacctttcaccacgttgtcgtccgagacacctatcgcttgtgtgcgcagcagctgtacgaatatgtggcagcgggtggtgctgcatggatgaccttggggggattataaatagagctctctccgcccaatttttttttgtgaaggaaagagagagacttaaaggctgtccgattaaaaacttgagcgaaactaagaaaaacttgcccgaatcgataaaaccttgcccgcgatcgaggaaacattgtctgagactagaacattgttgcttgttatcaagaaaacatgaccgtgagtaagggatcatcgaccgtgctcgagaagttctgcccgagacccagaaaactttctgaactaccgaatccgtgagttgtggtcgaattgtgtgtttgtttgcatgttttctagagctagtctttagattatatgcatgcttactcacttagacttaactaatcggaattcgacttaagttagaacttgaatcttaaagtaaatatgggaatttgacgaacttgatgatactatcactaaggaatggaacggactggtgcatgactaggctaaatgaatatggacttaactaagtttacttgatgaattgagatatgatttgggggcgttacactcaggcctccaccgttttcacttaactaggaacttagctacaaacttcgcctcgaaactaggacacctggagatatgatgaccgtagcttttgtgcaactcgcagtattcctgctcgtttcctgcgggttggtccttcgtccaagtataagattctcgtctatgacctcggccgcagcctcgtcatcgacctcggccgcagcctcgtcatcgacctcggccgcagcctcgtccttgacctcggggtgtatcggtgtgataattgtgggctccaaagaagttttgtaccttgtggtgtacgaacgtcccgcctagagcaccctttttgtggctcgaagcgctaggttaggacttttcgccatgaggcgtttgcttcggcggctcctgcctattcgacagcagttccaattcttcttcatgggaaacataatccgaggctcagtgcaaagcgtcccagattgtttgtggtttggacatatttaactcctttcgcaattcgaacttgtaccaccgcgccttctttagagcagagagagttgcgacatcattcattcccttgactctagctagggtgaatcggaactttgtgaggaaatccctaaatgactcgttcggctgttgagacaacaactaaaggtcgacatcagacgtgcccagatcgattagcaccgagtattgattgaggaagagcgtcgatagctcctgaaaactgtcgacaaaatttgattcgagtcttgagaaccaatctaaggctggtcctttcaaatgctcaacaaactggtgacagagaccggcgtctctttcctcaggcctgaacttggcttgggccacataaattatgaaagacttcaaatgcccgttcgggtcggatgacccgttgaagtactcgatccttaactttcctggttctaaaattatcacgttggagatcttgcgagtgaaaggagtgttgtggaactcttctagaatgcgatcgatgtttagggctgaggagactgcgttatgcatctgagacctcatgagcttcatatcggtttccgccttggctaaggagagcttgatagtgtttatttcttgctccctagcatattcatcagcctatcgaacgttttcttctgaatcctcaccgttagagactttgatctggtcggcctcggcagcttcagctcgtggaataggaaattgcgggttggttcctccatttgatttgtcgcgttatggtctcccaaaactgccagttctgctcagttttctccgattgccggcgcggtccggcggaaaggcctcgtcttgttgccaggcatcttgaacacgagtcgcgtttgattgaggtccactgctgctcgtcgatcgtgaagatgctgtgcgccgaatcaggtagtcttgacctgtcctagggaggtagccgccttgagctactgtgccaaagaccggttcgcctattcctgatcgtccacctttttctggagttgtgccatcatgtttctcaattctgctaggactgcgggagtggtggcctcaggagcgttcgtctggattggaggaattaagtttccctctgcgtcaacgattgtagcggggatctggttattggtcattgttgattgatcggctggttctgtgttctctgagtaagagaaatctctacccatccttctagcgccaaattgtaagagtcgaaactaatcgaaattgttttagggttccttcaaagaacggatctttacgagactctcaaagaacaacagaattgtttgattactgtagacggtgttctttatattattattgaagtgatgatgatttgatcgtacaagtgtttagaaaagtaaaaaataggtgttttgccaaagtcagagcgttttgatagcataaagttgagagcgtttttgtgtgtgtccttttgttgtcccttgaggcgctttatataggaccttggtaaaccgcctctcgcgatattctcggaatatttcatgttatctacgagtcggcaataggggatcttttctacatggaaatcttccttattcttcgggagtttcaggaaacttccatattcgataatatccccggagattctttgatatccttcaccggatttctcggaaatgatatcttgacctttcgctgaattcgtacaagtattctcctcgggtggatattccaccttgggctcggaccgaatgtcacgctttccagactgagcccaaacgatccccgagatagttaaactcggctcgggtgtgttttctggaataacatttgagccaagtatcgtttatcctaggtgttcccttgggtctcgatatttcatcgcacccggctcggggtgtgtttcctggagtaaccgaaaccggaatagcgttgagcctaacttccgaagcactgatggtgtctctccgattggctcgggtacttgggtgatatccgaccccaacagtttgccccccaacttgttgtctttgaccagaatgatggcacaactccagaagaaggtggacgatcaggaacagacaaaccggtctttgccacagtagctcgaggtggctacctcccaaggacaggtcatgagtacctgctttagcgcacgacatcttcacgatcgacgagcagcaacggacctcaatccaacgcggctcgtgttcaacacgcctggcaacacgacgaggcctttccgccggaccgcgctagcaatcgaagaaaaccgagcagaaccggcagtttggaagaccataatgcgacaaatcaaatggaggaaaccgacccgcaatttcctattccccgagctgaagctgccgaggccgactagatcgaaatctctgacggtgaggattcagaagaaaacgttcaatgggctgaggaatttgctagggagcaagaaataaacgctatcaagctctccctagccaaggcggaaaccgagatgaagctcatgaggtctcagatgcataacgcagtctcctcggccccaaacatcaatcgtattctagaagagtcccacaacactcctttcactcgcaagatctccaacgcgataattttagacccaagaaagttaaggatcgagtatttcaacgggtcattcgacccaaaggggcatttgaagtctttcataatttctgtggcccgagccaagttcaggcgtgaggaaagggacgctagtctctgtcacctgttcgttgagcatttgaaaggaccagccctagattggttctcaagactcgaaggaaattctgttgacagtttttaggagctatcgacgctcttcctcaagcaatactcggtgctaatcgatccggacacgtctgatgccgacctgtggtcgctgtctcaacagccgaatgagccacttagggatttcctcacaaagttccgatccaccctagccaaagtcaagggaatcaatgacgtcgcggctctctctgctctgaagaaggcgctgtggtacaagtccgaattccaaaaaatgttaaatcgagtccataccagaatcggtgatctgtgtcttttcaaggtctttcgcaaggcgcaaagctacctcatcaggagtctcaacacttgtggtgttgccaacaatcttgttgttgttgttgatcttagtcattttgttcacaaaaaaagatctgattagtatattaaccaaaaaattcaggtaactaaattataccgaattagttttgcaaactcgcttaagaagcgttcgcagaaacttgtttcgcgtttcacaaactcactcaagtatgagcgttcctggaaactagagaagtttatataagaaactgtccacaacaatcgctacgtagcatttgcgaagcagtttagaaagaggagaaagaaagaagtaagaacgttcttctataaaccttccgcgtaagcacccaaagatgatagaaaaaacaatttttagaagattttgaaatctttttttaaaaattcgaaaaattctcaatccgtctagagcgataaggtaaaagcggatttattgaattaagattgtaggagctcaaaaaccgaattgagaaacaagtacaaattttattaaatattgataataattataaattacaatagcagtaattaaggtttagaagtaaatcacggaggcaagatatgacatctttttccttaattcaataaatcggccgtaagtgctttttggacatcacgatttatgaatcccaggatacaaccgatcacgaactaatacctgagcacacaagtattagactcaagcgaactagatctacaatatactctcaaaactactaaactaagaacttacttttaagaagcaagagagaggagagactttagaatttagagtgttttatgtttaagagcttaagaaataatgagaggttgggtctctttatatagtagagggagataggattttgcagaatattctcagaatatgcatgacatattttgagactatcctgagaatattttgaaactatcaggagaatattttgagactatcctgagaatatttctttaatattcaactcaggaagcccaataactcacaagcatgacggtccgcaagcccgacagcccttgagccgacgacggaacgtcctgacaacccgcagcccggttcggttcggtttggtccggtttggcccaagtgtcccattttacattcttatttctcattcaatagaactccgtttttgacgtatgagtataccattttgtattactctttaccagctttcccatgcactaatgacctgacaattccgttcagccgtttggccggaatttggccggaaagtcaacggaaaagttttgtcaaaaaagtttcaacacttacaacttttgttcaacttgatattatttgtattttctttactcttgaattttctttcttcaattcctttcttgtatctcttgcatcttttagaaagagataatttactcctcaagtaagttgatattgtcgaacattttctagtggaagttttataggcttaccgagaaaaacaattacgtccattttcatacatttgtagttagctattattgtcttgttgatgtccattgcattagtttgagtaataaaaaaagcacatcctattattttgagtaataaaaaactaattcatagcttctccaactcattacataaatcagccctgttcctctcaacatagttcaaaatgattttttttcaatcctactagatattaatctgccgtacaccacaagcctttatttctctttaaacaaaaattgaatttttgtttttaagatgatctataagtatatgttgttatcaacggtagtatagagtttatatatttataatgtggtcgaaatttttaaatttaaattgtatttgttttgttaatttttattttatttttaaagattgtataattatattttgattgttaattctaggattttacccgttgtataccattccgtattattatcaacctaaactagtcgactctagatttcgccgtattataaaatttaaaatatttataatatttaaaacttcataaaaaatttaatttttgaaacaattataatattcactttaataaaggttaaatattataaaattttgaaagtttttaaaagtttccattctttgaaatagagaagcgcactaaaccaaacacttttaatttttggacatctgataactcaagtttcttgttcattcgtattcaaaatcattttagtcttttttattatataatatgctcttaaccattgctcaattcttttaagcaatgtggacattgtacacattattttttcatcgattaaataatatatgtttgtttcaaacttttaatatcacattatatacagaaaaatataacttttattaattatatgtattttacataaatttaaaataaatgaaatataagatcaaataaaagtgaaagaacaatcatatatttaaattaggtagagaggttttaaaaaattagttaaggtaaataaataatatggttagtttagagatattatatatatgttaaatttcattattacataattaaattcttttcgaattatttgttttggtagaaaatggttaattttttcaagaattaatgttatctagaattcgagcacaataaaaccaggtaacctgacccattaaagttattcatgatccaaacagaattaaactgtgtaaaatccgatctatcctactatattatttgggaagtatattttaaatgtaaccttattttttgtaagtaattacataggtatgccattagaaataaaatttaaagaagaaattaattcatctcttgaaaaataaaaagtcaaatactaatttaattaaaaaacgaaatatattattaattttcaaaaaaataaccaattaaaatcaacaaatcagatttgatatctaaattatcatattaattttttattaattattatagttcacctctcatctttatatgattctatttttgcgaaaaaataatatcatcgttataaaaaagtaattagagttttttcgcatatgctataatttgaatttttaaaaacgaatataaactgttcaatacatgaaaaatattataacgggtcaaaaatagatttaagaaaattttctactgagtactgggtcataatttgaatatttatattcaagttcatacatattattttaaaaatttataatcttatatactacaataattaataacatattaaattttcttatgtgtatgatgtgattcaatttttaatacaagctggaaaatcgtagaattgacgggtttaaatcgattttaatacaagatggtatactacaggtgaaactttaaaattaacaatcaaaatacaagtgtataattttaaatactaaacaatataaataatatcaacaaaacatatacaactcgcagtttactatacatttaaaatcaaataaaataatgtcatatatttataatcatctttacaataaaagtttttagtttaactaaaatataagtctacatgcgctatactgcaagttaaaattataaataagcagattaacatcacgatgtctggaccttctcacatacacacctatcaaaaacttaaaacctttcaaaacctcttggtatattcaaattatgattcttcattcatgaaatcattattccaagggttttgggatgtcttatgaaatgattttggcagaagaggatgtaaatttttttgaataaaaagtagtcagcaaaacatatgtttttttggagtttttagataattaaatcagagaatagggttggacatatgagtaacccattcgagttcgggtagaacccgttcggatttgggattaatgggtatatgatttactacctaatagaataattctaaatattcggttctcgttcgggtcggatccagttgggtttgggtcagtttggataaaaagtttcagaccctaaaaatacccaaaaaaatagaaacgggaaacttgtatgtagatagggggtctccaaacaaaaaaaaacttttaaatttgttaagttttaataaatgtaattatatttgaatatattttactaaattttgacaaacataacaaataatttttgaatagtttagttgttttggatatttaggtccaaaattaattgacatatttagatttataattataatcttagataattagataatattacgattaaatataattaatattttagatattaaattaatgtttgggtttttgaatactctttttgggtaacgggcaatttccggaccaatcggatatccactggattactaaaactttacccaataaggaaatttcctaaaattttaaccgccctaacccggttttttggttcgggtattggattggttatcaggtccgtttttttgtcagctctatcaaagataatctaatataggccccaattaggtccacaaatataaccaaaatactatagaaagactaattctaagttaggccaaaaatatcctctaatacaaaggaaacatgtttcttaccaaaacaacctctatacaaattttacacatttacttaaaactacatatgttgtatttattataaaaataacatttttaaacaaagtcaatctaatgcagcattatatgcaaatagtaaaaacattgaaaaatattatggcatcacttttatactatactatactaattcttatgtaattcaaacaaaatatacaatttaatttatacaaaatattaatgcccgtgctgtatagcacgggttatgatctagtcttaattaaatcattagcgaaagaaattcaaacattaaagacaaaaagcgctgtaaaaacgttatatagattgacgcagtgtaatcgatagaaaaactttaactcgttgatttctgtaaataaccgagagaaggggttgttgttagttcgttgattcacttgaatggccgtaaaagatagacttgagaatcattgattaaatgaataaccgataaacaagagaaatgctccaaatttaaatcaataatcggatgcctccttacaagcataagagacagtgtcggtggggagagttgtgtctagatgcgctgcataaggtctttctgggttggagaagatttgtctctgaatctggaatgtcattatcgccacgaaagttggagagaaaattgacattaaacacatttgatgtcttgaggtgaggtgcaagttgaatgcggtacatgttagcattgacacactcgatgacttcaatggggccaatctttctagaaagaagtttcttgtattcatgtgatggcataagatccatcgtcaacactacccacaccatgtcgcctggttcaaaaattacctcacgtcgtttcaaatcagcttgttttgtagcgaactgcaaaaagctcccattgatcacgagtttgttgatgtcttttctctaatgcttcaacaaactccattgtgtggccatgaatatgccgtggatcaggagaacttgttaaatcaagaggactgctataaacaacttcaaacgggctgaatccggaattcctattagttgcatggttatgagcgaattcagcttgatacaagccagcttcccaagctcgaatgttatctccaacaaaccagcgttagatattaccaaaagcccgatttgtaactttggtttgttcattattttgcggatgatatgtcatactcatataaggactcgtatgtaattccaaaaagaatgccaaaaatgacttcagaagcttgtatcccgatccgatacgatagatgtgggaagaccatgaaatcggtaaatctcttggaaaaaacagttgagctatatgcaccacatatgttgtcttctttcaaggcacaaaatgagtcatcttagataaacgatccacaacaagaaatatagagttgttacctagttcagtttaaggaagtcccaaagtaaaatctatactccaatatgtcgtgggttgggtgagaaccagtctcgagaggtataaaacggcattaaaagctgttccttttgccaactgacacgcctgacaacgctccacaaatctctcaacatcacgttgaagtgtagaccaaaaatatgaagcaaaaacaagttggcgagtccggtcacgaccaacaagttaaagaaacccatccgcgagcaaaatgtcggaacaagaaccatctttaacttcgccaaagattggactaaaaatgtgtttgtttcataaagatccgagaaagacgcaaaacctcgaacaacaacgtgcattatagtcaacaaagaatgacgcctactcaatgcgtcggctacgcgattcaaattgcccgacttatggttaatagaaaatgtgaattgatgtagatatgctatccacaaagcaggtagatgagaccttgacttggctatctgatgcggacatccaaaccaaaccaaatcgggagcacaccaaactagccggtacatgtatcataccaattaataaggagcattatgcacgactcttgtccaattggagtctcaacaagcataaggcctagggttaattattcaccagcaaattaaccctaagaagtcaaatgatggttcaagtggagtcaaagaccaacgagccgagtcaccatattgtggaaatatgactgttgcattctttttctcttatctagtgtttgtcagaatgggtttacctagaaaggcttttaacgagacaacatcaagtcatcaaggaatcatttacaaaataattgattcgaagatatcacaagtacatataggtgatgaacttgttgacagaccggctcaactactcgctaatctacttgctgaaccacttgctaatctacacgctgaactaccttttgttgtaccataccaaatgaagctatacacaaggaaatcttacttattgtacattttgatgtgtctcaaagctttgtttggcagcctagagagtttctagatcacttagatgcttcactacaagctctaagatacaccaaaccacacttgatcaggcagatcaattaggagcaataattaccaaatttggacctgtttgtcatcattgtctcatggcactttccccttttgtttgagcgtctacttaagacattccagagcatcaagaatcgtccatggcgtcacaaatttctccccaagttgacaagatacaaggcacatctcacttgccttatttggacagatcctacaataatttccaacgaccatatttcattaaatattgcgatttgtttcttgttttagtgtagtagaatggtttatttgagcctatttaagctcattatttcgttcattgtaaaggacccttgatcatttaaaaagtatacaaacgttttctagtcaaagttgagtctttgtcagttgtttgtagttctttgtgagtgagtcactaagtactttagtaatctacggattaaatttgttgagttattcaacatctttaattagttcattgatagagtgtgccgattaccccactgattgagcgagtcaatcacccttctatccatctattccccttgaatgggtcccacacgagagaagtgatcgccatcgtgtcagatcaccaccttcattagcccaccttccgggtggcaagcttgaaactcttgatcatcaactgatctaaagttggatttgctccaattcttgcatcatcttggtatccgaaattcaaaaggtcctatccccaaggttgtatctcttcaacctatatcttttacgatttctattttgttatcaatttgataaccaactaaaaatttgtttcttgctttgttattgtttatttgcttcaagatctttatttaaaaaaaaaacatttttcttcagtttattatttatttttgatttattaaaaaacccacaaaaatcatattttgttgaatttttgaacttttatttttataaaactagtaaacaaaaataaaaattcgtttcacatttgatattttagatgaattttgtttttattttggcattgattttagaaaataaaaagtttcatattttgtcctctttaccttattttgttcatttaattttgatacagatttctcttatttgtgcaaagaataccacgaaaacaaaagagcaacaatgacatatttctctatgtacagaaggaagaaatcaaccaggagatgtgtttcaatgagagttatgaagaactatggcatgaatagtactctaaatcagattttgaggatgaatcttgccatgaagtaccggaaccagaaccgcctgactcatataataccaataaaggctattgtaaaccatgcaataaatttaatgatgatttttgcagccatagtttgaaatatcaattgactcgagatatttcttttcaggaaaagcgaattatattaagcagagagaagtcatggctgccaacgtcctccaaggagtgaagagaaggtcgaccatcacactttgttgcctcacgtcaagcaaaaccgagacacaagttctttcacacatatccacgagtagtaccggaagtgactaaagaagtgactcagagaacatcaatgtggcgtaaaccatatccatggtagacgtgattacctagctaagagagactcaaggattagtaattaattaggaggtgagctgaaacatggcactcgacaagacccactactatccaaccccacccgaacctaccaaacaaaactaaggttatttctagaaaatggttataagtattttggacctgaatcttttgattttgcaagacatgagaaggggaagaattagtctacaatgggaactcaaaatggataagtactttaagtactattccattcctaaagaataaaagctccactattctcttgaacaactcatgggaagggcaaaacgttggtggaatcgagaagaaaaaggttgactgtggtataaggaaccatctctcaaaacgtggggcattaaacgcaccacacagtcttccccaacctagtcaacacacttactatccaaaggaaccaagccgagaaaactgtacaaatctatgtgttggttccaatcaaattgcgaatcaagatcccactaagaagaatgagatcgttacatgtgcaaaagaaaacacaagccccgtaccggtacttgaactatatgttgaaccgcatgctggactaaagaaaggtgagtcctatgattctttaaaataaaatgaaccaacatgttatagatgtcataagaagggaaattttgctgcaacttgctctaaaagacaagtagtagattccatatcactagaggtgaaattgaatgcatctagctccaatgattgtctcgtaaattcaagtttagaaattttcaattctagattaatgcacttgtcttttccaaaggttaataatgcgggtatataccataacatggatgacacatctaaagaagtaggccacaaagcaataatttcgaaagaagttgagaattgaataagtcttgaggagcaactttcggaaacaacatcatcacaaggttgccgaaacaagatgtatctattagctaagttttagatataggtttttgaatctttttgttatttctagagtctttttaaagtcttttcaagtattctatggattgggacaagaatggagataagaagacattttgcagcaaaagctgaagaaaacaagccaaaggacgaattcactttcagatcaagtcgagagtgtcgatcggcagccttttggtatcgaccgacaccagttgtggcccagaaaagtctatgacggtttagagttcgaagatatggaaatttgccctagcagacttttttattttcattaatagtcattgcacgttttaggtcatatatattttaaggtcaatgtttagacctaacaagcgttatctaagaagttcttttctagcaacaagttgttctttaagttattcatatccatgttttcagagtttcatcaaagatttcaataacagtgaagagatcttttctaactattttctctctattgattttgtttatgccttcttattcatacatgttgtttgtttcatccatcatgtctaagtagtttgcttgttagggttagggtttctcattagggatatagatgatttagtagattgcctacttgctaggttatttgtaggattattcatctttacttgttcttaatgctagttctagagtagctaagtagaatttgatcataaataatatgtatacccataataggtatctatttgttgagtcaacgtttataggtgtgcaataagaatcagcctatctacttaggtgaacttatcgaatttgtttagcatgcatgtcttaaattagggattcactggcacatcgctagggatctttagctttaggcatagtcaacagcactacacatcaccggttactctataattagggtttgagttcaggaacggttcgatcgcatctagctatttctagatctactatcatctatttcctgagaataccctagacctaacgtttttattatcttttcttacaaccaatcaatctaatatttgcttacttgctctctttttacttttctattatcatttagcttaatcttgacacttatgccttttgtgtgaacaaaagagctttgtagaattcgacccttaagtaccaacgacgatctctggtttgagggagtaaactgaaggcaattttacctacactatcgaccagccatcaaagcatgtatggtacaagcatgtaaaacaccagctgatcttgcctctaagatcactcacatgaaagctaagttgataccgaataccacttatggtacacaactaagcaaaacttactatgtagtttgatattggcattatcttatattcgaaacaagttttaagcatcttatttatatcatctcaatttcaagtataatgcacttgattttgtctttgagtgctagtgatggtacaagttccaaggagaaatgtgatgataaaaaagaagccacaacaatgttactctcggatcaaagcaaacaagaaattgatttcggtttaacacataaaaaggttcaaagtaacttaattaattatgtttatgaacgttccatgactgccttagtacacttgtcttgtgccaaaattgttgaaacacatgtagatcctaaggaggcacatacggatccacattaccgatcaacaatgaataatatttggcaacaatatctcatatgactattgtcgggcaagactcggaacttgaaccaacagagcagcttgtagcggaggaggagcttgtagccgaggggcagcttgtagcggaggagcagcttgtagcggagtaagctttggcggaaccaaccagtcctatgactcgttcgaagactagacttctcaaccaagctgttaaaggaatacttaaccacttgggcaaacatccaaacgaagtcattcaaaccgtttggaactcgatagcagcccaagacgattgggaatgggctatgtgttacttgggtactctttttcccttctaaggttttgtcccaatgagttttccttagtaggtttttaatgaggcttgagtaacacttccaaatcccccattatcattccggcccaagcccaataagaggagcaagaatttggaaggtcaagggtctatttttgttcacactttcatttatgattttttcttttccgagttgtcttggaacttgttccaagctaattcttccccttctcttcttctctatttaaactcttgtattttcctttgttaactcatctatcgtttcaatcaaaaacctttttaagttagatcaatctcttgttcttctctttggtgtgtaatatccaactatgagttcaagatcggtaaatcaaaggcctttccgcaacctttgtgtgaccattccccccacatcctttgatcctcataatctcccgattgctttggatgcaaagccatccactgttcaacctcaagagtgtcgatcttaggaaagtcatattaggtggtattagagcacattatagtacaagaaaacacggtttttacgactacatctggcgattgtataagtagtcgtaacatttagcgactattaaatgactattcagcgacagatctacgactaaaataaaaggaacgttcaatagtcgctaaatgacgactgtaataaatagtcgtccaaatagtcgtcaggtaacgactacgttacgactataagtaagtcggagaattaagagttgctaataagtcgttaaaattgtaacaataatcaacgaatttttatagtgttataattttgtgtatactaagtaaaattagatatgctaaagttagactgttagttttgtaattgtcaagatacaagtaaaaattctaacatatttcagtttaaagctttattttaaaaatgcattctttaaacaattgtacaaatatatatatcactctaattaattaattaaaagggataaagatcaatgaatatatagtgattgaacattattttggtatgaagggttaatcacataaataattaaaacctatgactttgtgtaaaaatgcactatctttaattaaaaaattgtacaaagtatatattacactctaattaaataattaaaaagggatatatattaatggatatatagtgatggaacattgtttttggtatgaagggttaatcacataaataactttgttttggatatacaccaaagttatgaaaacctatgattattaaaaaacattaatatacattgcgactgattaacgactaataagcgactacaatcaaaaaattgtgctgaattaaaacccgagaaaattatcgcgggccaaaattaacgaggcccaaacaaagcccaatatttgtgttgattagcgactgatgaagaaccctaattcatttgtcttccgcctctctctctctctctctctctctctctctctctctctctctctctctctctctctctctctctctctctctctctctctctctctctctctctctcgtttcttcgattcaccctaatgaatcttcatctctctctttcgtttcttcaatccttcctctaaatcttcatcaattgttctccttctgctttcttcttcttcgaatctctcggatctctctcacattgaatcgtctcctctagggtttgcaaacaagttcgatttgatgcctctagctaagcgaggaaggaagagaaaaatggaacccaatgttactcagagagctggagcctctactcccactacggggaatagaataaagcctctacctcctcaatacaactttacaccggcggacaacaatcctccacctcagtcatcccaagagcgagtccgggttcaaccccaacaagcaaggtcattcactccccgagtctctgactatccacctccgcaagcccttttctagaactcctctaatcgtgaagtccgtgtacctcttttatcagaagaagtccaaaacgaggcatctaatcgaccgattccacaacaagatcctccaagttctccacttcagaactctcatgcaagtcatccatcttctcaaggcaacaacctccacgaacctgtggctgatgtgttaccggaactccgggaggatagtttcagagctctaaatgatgtgcttcaagtgcctggccgtgaggcgtggaccaccgtgctttctcccacaccgatgccaaaaacaacttggtaagttcttagatgtgtcttggttagttgtctggttttgagtctcatgtgtattggtttgttgtgtgagtgtattgagtgtagtcgtgcgagtgtctagtatagatgtgtcttgtgtattgattgtattgattagaatccgaatgtgagtgtgtgagtgtgtgagtgttagtgtattgagtgtctagtattaagtgtcttgtgtattgattgtattgattagattccgagtttgagtgtctgagtagtgtataattgatctctggttttgattgttttgattagagtctgaatgtgagtgtgtgagtgttagtgtattgagtgtctagtattaagtgtattgattgtattgattgtattagatgtgtcttaagtgtttgttttgatgtgtgaattagatgtgtcttgtgtattaattagttgttttgatgtgtgacttagatgtgtattgtgttttgatgtgtggatcaatcttgttgcataattaactcatgattcttgtctttgattatgtggactgagtaatgagtatatgtcatataatttgtatgacatggctggttttgatgtattgattagagtttgatgccaaacacaacttattaagtgtcttcttttgacttagatgtgtcttgtgttttgatgagtgaatgtgtctttgtcttaagcgtgtgtttttatgtttgaattagatgtgtcttaagtgtcttaagtgtttgttatgattagttgtatgtggttttgagtcttaagtgtttgttatgattagttgtctgtggttttgagtcttaagtgtttgttatgattagttgtctgtggttttgaatctcatgtgtattggttttgattgtattaagtgtcttctgtattgcttgcaggtttactcgggacacaaattcaagcctgttaaggaagattactaaagtatggacaaataaatttgatggtctgttctatagctgatcatgtgttcctcgggatagacgagaaaaatactttctcgagtttacggtatagttttccttcctcttgccttaagagtattaagttaagctgctttgttttcactaacatcctctcttttttatttgtagaaaacacaccattgggatcctttgataacaggtacagttcaatggtattttgaagaaatctttaaacgaaggatgaaagacatggttagcatgataaggactagtcgagagtcccctaaatggatcatcgattctcatatctggaaagcgacgtgtgagtattgggatactgaagaagcaatagcgaggagtcagatatattccaaggctcgcttgtctgaccgtaatgggctcggtcctcacatccatttgtcagggccaaagtcatatcaaaacatcaaacatgaactggttattaacttctatttctttttttttttaatgtgtttgtgtcttaagttcatatgttgtattaagcctttttcatttttaacatcatagtaaaaagagttaggaaggacggtgagtgttggtgaggttttcatcaagactcataccaaaccagatggtacttatgtcaataaaaaggcagagcaaattgttaaaaattatgagaataagctgcaagagaagttgtcggaaatggaggcagagacttcaaatatttcagatggggaatctcgggagctcacaatagaggaccatattgtcatctttctggaggtaaagattacattttcacttgcatattgtctgcattttctcaagctctttattaatggtttggctatttttttcataggccacatagacagattcaagagggaactattatggagttggaagcctcaaagataatcttccggatctagtcactggaaagggcaaacatgcagcatactctacctcctttgtgtcattgcaagagcaactgaaagaagctcaacagaagatcgaaaagcaggctgctcataatgctcgacgtgaggcagagcaagcccgagctgtggctgaacggaaagacaagctggagcacttggccttggtggaaaagtatttgcgccaaactgatccagtctttctcaactttatggctactcattcatctgaagcaaccacaaccgatcctatctaatcttcaccatcttagtcttaagttccctacttcataactctcatgaattcctcaaaccttttagttgtatgtcaaattactagaatcttgtatttggtatgttttggatattgagtttggtgtttttgaatcttttcaggtttttagtttgttttgaatcatgattttgtcttgttttttatgtgttttggaatgaatttggatacaaacaaaatcagacaaactatttttttttttttgctgaaatggttgtcgcttaactgtcgttaattggtcactatttagtcgctaaattgtcgcaaaatagtctatacacgagtcgatatacatgtgattcaattgtaacttagtcgtaactcagtcgtcatattatacgactatgttacgacaaatcttacgacatcgggaattagtcgtatcgtagtcgttatttagcgactaatgttacgactatttgggttagcgactatggatttccgacatcgagaattagtcgtaacatagtcgtaactactcttttaacggctactttgcgactaatattgcagtcgtaaaaactgtgttttcttgtagtatacactctgaagttgagtattttatcctttcatcacttcatcaattcaattcatttcatcatctcgtttcattttctcatctgtccgtttatctttgctgtcacattattttaatttttatagataattggcttgggataaaattgcgaaatcaattggatctgaatcgaggacgagactagtattttataaaattgtttctggaatttttgagcatgattggttgatttattttgttcgatctagtgtgcctgttattaggaaaacgtttgatattctccttgaactagtgactcgtttagtgttgtttgttggtaggaaacggtgacaaccgaatcaagctcgaagaagagtgttaataaccaagccatcatcgatgctatcactttacgattggagaatataatagatgtcaagcttaagccaatcaacgatcaacttaaagcaaaagggaaagcacccgatgaacaagttgtaatctcggaaggagagcaatctcaaagggagatgaaaagtcaaaccaacgacccaaagaaagacctagttgacccaagagctcaagaatattacagcagccacggtcactcatctcaccggagtaaccggagaccaagacatgcgagagaagaaagatatcttatggttttgaatcttggtggctatcagatgaagcttccacctttccatgggaagaatgatctggatgcctatttggaattggaaaagaaaatggaactcgtattcaattgtcaaaactatgccgacgttaaccgcatgaaggttgctgccactgaattctacgactatgctattagttggtgggatcaaatcgtcactacaagaaggcgtaatggagagtatcctattgagaaatggcaagggttgaagcttctcatgaggcgtaggtttgtgccaagacactatcatcgtgaactccattccaagttttggaagctcgtccaaggtactcgatccgtggaagactattacaaagagatggaaactttgatgttgcgggtcaatataaaggaggatcgtgaggcgactatgtcatggttcttgggaggattaaattgagaaattcatggtcatgtcgagatggaacattatgaagaattggaggaaatgctacacaaggctatcctagtggaacaacaagttaagaggaaaggatcatcccggccagcctatgatagatcatcccggccgacctatgactttaaccggccaagttatcctagagaagcccaaccagccttcgttcctaaaggcgggcctaaaacatttccgactatccaagggcaatacaaaaccaggcccgatagcgccaccactactaaaactcgtgatcttcgatgcttcaagtgccatggatgtgggcactatgctaatgaatgtatcaacaagagagtgatggtcataagggaaaatgtcgagttgaaatccgaagacgagttcgtgccagaacctgattcttcgtccgatgagtgtattgctaagccggctaatgggaagctcttgatgtcgaggaaagtttctaaggatccggaagagaagcaagacgtgagctcatcctcggatgagtatgaagaacagctcgtagaactttacgtggcaaaaaggactttaagcattcaaacccgaaccgaagaagaagagcaaagagagaacctacttcattcgcgatacattgtcaatgagaaagtttgtagcttgatcatcgatggaggaagctgtacgaatgtggcgagtgaaacaatggtccaaaaactcgatttgaagccgcaaaagcatcctaagccgtacaagttacaatggcttaacgatgatggagaaatgagtgtcaagaatcaagtggttgttcctttagtaattggaagctaccatgatcaaattctttgggatgtgctgccgatggacgctggacatatccttttaggccgaccatggctgtcggatcggagagtgattcatgatggcttcacaaatcggtactcattcttgttcataggcaagaaaacgactctgattccatgaacaccacaagaggtatatgagaatcaaattcaactatcggccaaggaaaccaaagactataaggatgtgtttcctgaagacagcctaacggcctaccacctatccgagaaatcgaacatcaaatagactttgtctcgcaatacttaccaaccgtccagcatatcataccaatccggtggaaaccaaagagttgcaatgacaagtcgacaaactcatggctaaggggcatatccacgagggcatgagtccatgtgcggttctggtcctacttgtgccaaagaaagacgggaggttgcgtatgttcgttgattgccgggcaatcaataatattacggtgaagtatcgccaccctattcctatacttgatgagttgcatggttcatgcattttctctaagatagatttaaaaagtggttatcatcaaattaggatgaaaaaacgagacgagtggaaaacaacatttaaaacaaaacatgggttgtacgaatggttagttatgccatttgggttgacaaatgcacctagtacattcatgcgcttaatgaaccacctccttagagcattcataagtcaatttgttctggtttatttcgatgatattttggtttctagcaagagcatgactgagcatattgatcatctagaatcggatatgaaagtccttagaaaagagaagctttttccgaatcttaagaagtgcaccttttgcacggataatcttgtttttctaggttttgttgtaagtgcagatggcgttaaagtggacgaggagaaagtgaaggcaatcaaggagtggcctaccctaaaaccgttggagaagtttggagctttcacagccttgccggttttaataggcgcttcgtcaaggattttagcaccttagccgaaccctcatcgaagtaatcaagaaagatgtggggtgcaaatggaaagaaactcaagagaaaacttttcaagcacttaaagagaagcttactaacatatttttattttactagaattttcttaaaacatttgaaattgaatgtgatgcctcaggtataggtattggagatgttttgatgcaggagaagaagctcagagcctactttagtgagaaactcggtggtgccacattaaattatccggccttacaaacatcgcagcatgacttatggtagaaggagtttgttatacacaccgatcacgagtctcttaagcatcttaaagctcaacgtaaacttaacaagaggcacgcgaggtgggtaaagttcattgagacattttcgtatgtcataaagtataagaaatgtaaggataatgtcgtggtcgacgggttatctcggaggtatacatatataaggcttttgccaagtttgcttcaggtcgctactatatgcaacacgggttcctctcttatgggaatcgcttgtgtgttcctaattgttctcttcgagatttcttcgttagggaagcacatggaggagcacttatgggacactttggagtcgtcaaaactcttgaggtaaagagggatcaattccattggcctcacatggtaagggacgttgaacgtatatgtggaaggtgtgtcacatgtaaaaaggctaagtccaaagtccagtcgaacggtttgtatacgcctttgcctatttcttctcctctttggacttatatttcaatggatttcgtgcttggtttgcctagtactaaaaccggaaaggattcaatctttgtggtagttgataggttctctaagatgactcatttcattgcatgtcataaacccgatgatgcatctcatgttgctaatttgttctttaaggaaattgttcgtttgcatgacatgcctagaaccattgttttggataaggaaaacaagtttcttagttatttttggaaaacattatggtctaaacttggaactaagctcttattctctactacttgtcacccccaaactgatggacaaacggaagtggttaatagaaccttaggctctcttttgcgcactctgattaaaaagaaccataggactggggaagaattttttccgaatatagaatttgcataaaatcatgccattcattccgcttctaagttttcattatttcaaattatttatgggtttaatctcacctctcctttggatttaatgcctctacctttgagtgtcagaacaaatttagatgggaaaaagaaagccgaaatggtgcaacaaatcaatgaggaagctcggaaaactattgaagagaaaacgaaaaagtatgttgaacaagcaaacaagggccggcgacgcatggtctttgaagagggtgaccaagtatggattcacttaaggaaagaacgattcccagccgaatagcaaacaaatgccaagaatcgacgggtcgtttaccattacaaaacggatcaatgataactcttatcaaattgatcttcgaaataagtataatataagttcgagctttaatgtttctgatttatctccttttcttatagatgaaacggatttgagggcaaatccttttcaagagggaggacatgatatgactattgtcaggcaagactcgcaacttgaaccaacaaagctgtttgtagccgaagagcagcttgtagtggaggaaactttggcggaaccaaccagtcctatgactcgttcgaagactagatttctcaaccaagccgttagcggactacttaaccacttgggcaagaatccatcattcaaaccgtttggtaattggctaagtgttacttgggtactctttttcccttctaaggttttatcccaatgagttttcattagtaggtttttatgaggcttgagtaatacttccaaatcccccattatcattccggcccacgcccaataagaggagcaaaaatttggaaggtcaagagtctattttggttcaaacttttatttatgattttttctttttcgagttgtcttggagcttgttctaagactaactcttccccttctcttcttctctttttaaaactcttgtatttcctctttgttaactcatctatcttttcaataaaaaacctttttaagttagatcaatctcttgttcttctctttgggttgtaatatccaacgacgagttcaagattggtaaatcaaaggcctttctacaaccttcgtgtgaccattcgccccacatcctttgatcctagtaatctcctaattgctttggatgcaaagcctacccattgcttaacctcaagagtgtcaatcttaggaaagtcatattaataacatgagcttttgatatgaaaatctgtcactaaggaagaataaatcatcaaaaacaacatcgtgtttatagaagaaccaccggaccagccttcaaataaagaaaccgtgttgattttgaaagatacattcaccgaggatctacatcaggtaagtaatacattactttcgtttgttgccaataaatcgaatgatgaaattacgaacttgttaagccctcaagagtgggagaaaaattgggttctttaaataaactgatgaaacctatttcttgtcttaaactaaattgagtaccagatacactttgtgatacactttctaatgtactttgtgttacactttgtgaaaaaggaatggttcaaaccaaaattgttttacatgtttatattgatcctatgactgttataacgcacttgttctttgccaaaagtgtcaacaatattgcaggtaaaacggaggaccataaacccgatttactagagatgaacaaactcatgaaccgaagtcaaacccagagtgaaccagcaccattagtgttaacaccacctaacatagagacaagaagagcctcaaactcttggttaatcaaagaggaaccgccggattttaaagctcgcaaccgagaaggggttaagcaagcaacacaacaagtaaaatcaccggaatcaaaaaagaagagtgatcctatcttttttgctaaatggagagccacctgatgcactatgcatcatcaaactacgaccgtgtcaaggaaagaccctagcctcccaaaattgcatgaaagctaagttgctttgtcttggtgtatatggtaaagtttcgaggtcgaaacgttttcaaagaagaaggtatgatgcggacattcaaatcaaaccagctggtacatgtatcaactacttaataaggagcattatggaagactcttgcccaattggagtctcaatcaagcacaaggcctatgattaattattcaccagcaaattaaccctaagaatacaaattattgttctagtggagtcaaagaccaacaagcagagacaccatattttgggaatatgaccgttgcactctttttctcttatctagggtttgtcccaatgggtttacctagaaaggttttgaacgaggcaacatcaagtcatcaaggataatttaccaaacagtggattcaaagatatcacaagttcatatagatgatgtacttattgacagaccggctaaactactcgctgaactacttgctgaactacttggtgatctactcgttgaactacttgttgatctacttcttgaaataccttttgatgttccgcacaaatgaagctacaaaagaaaaattaaaattcgttttctcttttgatattttagattttcgaattttagttttgcattgattttagaaaataaaaagtttccatattttgtcatctttaccttattttgtttatttacttttgatacatcattctcttgttgtgcaaggaattc

SEQ ID NO: 214 - DNA, 55345 bp, Arabidopsis thaliana
gaattcgggtttttactcgatacgctttgtaaatacggttacacgaaaatggccgttggtgtttttaatgaaaggaaggaagagtttggttctgatgagaaggtttacactattttgatcgctggttggtgtaagcttaggaggattgatatggcggagaagtttttggtagagatgattgagtctgggattgagcctaatgttgttacgtataatgtattgcttaacgggatttgtaggacggcgagtttgcatccggaagagagatttgagaggaatgtgagaaatgcagagaaggtgttcgatgaaatgcgtcagagagggattgagcccgatgttacgagtttttctatcgtgcttcatatgtatagccgagctcataaagctgagttgacgttggataagatgaaattgatgaaagcgaaagggattagcccgacgattgaaacgtatacatcggttgttaaatgtttgtgttcttgtgggaggttagaggaagcggaggagttgcttgaaacaatggtggagagcgggattagcccgtcttccgcgacgtacaattgtttttttaaagagtacaaaggaaggaaagatgctaatggagcgatgaatctgtataggaagatgaagaatggattgtgtaagccaagtacgcagacgtataatgttttgttaggtacgtttatcaatttggggaagatggagactgtgaaagagatatgggatgatcttaaagcaagtgaaacgggtccggatttggactcgtacacatcgttggttcatgggttgtgtagtaaggagaaatggaaggaggcttgtggatactttgtggagatgatagagagaggtttcttaccacaaaagctaacttttgagactttgtataaaggattaatacagtctaataagatgaggacttggaggaggttgaagaagaaactcgacgaggaatctataaccttcgggtctgagtttcagagatatccttttgagccttacaagagatgagttagtaaagttgtaatgaagcaactggcaaaaaaaatgtaaggcattaagtcaaagttttgtttttcataaattagtaacacatgtaacgtttggacagagccaaggtcaaaagttttagagcatttccatccatgggttcttaagaatattgaaaaatctcttaaaacaaaataagaattaaaaaaaacaaaacaaaaagagctcttaaaagaagaaaatagttcttagataaaaacttttagatatattctttcattttttaagaaccctttcatattcaattattcttttgtatatcaaaaatgtttagaattttagataagaatcccttgttggagttggttataggaaataaataaatacggaaaagctttctctctcttctctctctcaaaattttcaaagagaaaaagctaaagacttttatggccgtccagattttttctggctttgcctgccaatagggattatcatctggcaactaccagctctttccggtgttggccagctcttgtctggcatcattcgactttcatagcgatgatatctggttttgctgtcggcacttctttgctgctttttgtttttttataaattagttttttttgaataaaagttgcggttaaacctcatcggatatgcgtagtagtggtggtgtttgtggcaattctccactcaaaagggtcttacctatccttgggtttacggtttatggaaaataattaggcgatttgcaatttagttgaagattcaatgcaatttctcaacttattactattgcttttagctgtttcgttttattaaagcttcgattgatttagttaacagaagtagaatagttggatatcttatctcttttacgttgttttgcgatgaatctcaaaaaaaaaaaaatgatgattcaagcaagtgattgagattaatggttccatattagatctttacttctgttttgtagttatcggagaattacagaagaatttatactcgattcattcgatgttagtttcaagctccggtggaatcgatggcttcaacggcgaaagaggatgacgaaaatcttttgtctcctcattttccacgcgttatcgatgtcgtgtcttgagatcttttatttcgatccaatctttttcttaagcgatgcaaatggttgggctcgtattgggccttattagtttcgtttttacaattaaacgagattaaatgtcggtttaaggttaaaccttaaagaatatgtacctaataaaaataaaatactaatattatctatgaaaaaaacgttaaagtgattattaaaataaaatttatgataatatattattagtgtttatatgtcggtttgagtttattaaaacgaggttacgatttaatgttacaattataaacaatttaatgttaataagcaaatgttagagtttagatttttacaattaaatgaggttaaatgttggtttctggtattaaggaataatttagattttccaattaaacaaggttatatgtcacatgactagggtttagattttacaattaaacaaagtaatatttcagattgagtttataaaggaggattaagctttagattttacaattaaccgagattatatatttatttaggtttaataaaaagtggttagtctttatattttacaattaaatatggttaaatgattgttttcgttttataaaagtgattttttttgtcaaacataaagagtgattaagtattatattttatctacatgtacatttgtggtagattttttggtcaaaaatcctaatactatttactaataacatacaagtcctcacaaatcctatctcaaccaaatattttattcctaagaacttacaattcgttagtttgcattacataatttaattaactatttcctttattacatattagtccctacaaaatctatctaaaaaagatttttgtctaaatttatatctttaattaaatcttatctttattaaactacattcaattaattactaatttctttaaatctgtttatctacattaaatacaaatatatgacttttctttcacttttatttgttcttatatctaatttcttaaattttataaaaagaaatatagttaataaaatattagattttttccagcatatgatgtaattaaaaaaatttaaaacagacttatattactcaatcgatgaagaaaaaaaaataagtgaaaaaggtcccacattgcttaagatattgcgaaaatggttcagactcttactataaaaagaaccaaaatgattttgaatatgaatgaactagaagcatgatttattaggcatccaaaattaaaagtattatccggcatactctgattctttattttagaaaaacttgaatctttaaaaaaggtcaaatttttattaatatttaaactttattaaaagttaaatattacaagttttaaaactttcaaaatttaaactttataaaacgtttaattatttataacttaaaacttttatgaagttaatattataaatatatatataaatatattaatacaagacggtatactacatgtgaaatcctagagataacaatcacaattataacgtttggatagaaattattttttttgaaatttcaaaaattacaaattatttaaaatttataaaaaaatgacaaaatgatgtataatttcacgggacggtgttatatagtggaacgagtttggatcgatattcatatgagatggcatactatgggtcaaatcctagaattaacaattaaaatataattttaaaaattaaacaaaactaacaatattaacaaaacaaatataacttaaaatttcaaaatttatagttataaaaatcatcccaaggtgtatcacacataaaaaaacaatagcatataactatagatcatcttaacaacaaaaattcaatcttttgataaaaatataggttgtggaccccaacatttcttttaaagggatcaattagcattaattgtggatgtcggattcagacactcaagtatttatttatttagtgggaaggattattcttgaggacaaatatactataaaatagataaatgattatagaaaaaactatgagtattgtaaaagaatgtgtatagctaatttacaccaagaaatgcgtgtgtctttacatggtcttagacccacaatttatacccaaagaatacatttaatacctatttactcacaatcattctactttaaatatatctgtttttagtctttgaattaactatttgaacgtttaaaccgagtccactccgagccttctggacctcagctctcgccccattcggtttctccaatttgagtaatcctgacttcgatgctgccttcatctcgcaaaccaacatctcgcccatactctcacctcgaggatgcttatgggccctccctcttatgagcttcttctacttgtgccgcaatctttggctggatccgaactcatgatgcgggatccgacaccaacaattagccccccaagtctttcgaattgttactccagttcagaaggctttaatgttctaaggacaaagattgtgccaaatgactctccgatttcccgcctaaattacgtaatcgagttgatttcagaatctccttcaattactcgcgtgacacttgtcgcaattatgaccgtatattatttatttacaattaaagcagggaaactcttccacgacttccaaggcggttccgtcatcatcactggctcgcatctcccgaacaaggatgagaattggcatcacccgtggtttttagtcaaaaagagccctgcctcgatcggaaacctcccggacttgctctcctcgaagtggaatactaagcccggtagttgttaggtcatgcatatgaacttcattttatttcttatcttatctgaccaacttctattttttaattcgcagctttcatcgcaccaaccctttcgaccgtcgaattcagcgaattcttcaagattgtcattgaaggagaaaccctttggaactcctttactctcgaccggttcatagaggccaaccacaaacttaggatgagcccccctggacatctcctccagctgctactgccccctcccttacctaaagggaatctgctcgggccatcgcagctcgacgcaagaccctgtccaagtcgattgtggaggcttgcgaagtgaacaaatcattcctccaatccacggtcgacaagaaggaatatagcagaaccttgctagtcgacggtggcagtgccgatgggacaagatccgccggtgcttatagacccactcctcaccgtgaaggccatagcggtcggtcgtctcacaaggaacgatcacctcgccgtgactcacctcggcccacctctcgaactggactaagcagcgaaccacttgctgacctgattcagaagaagagagacagatcaacccgcagcagctcctcccccaaacaagacaagacgagagcccaactgatcgctttcctcggccatcgccgccaccccgctatatgggtcctcctcctccagtcaccgtatcccttcatccggatcaagaggtgaaaaggccgagcggagtgctaacccccggcgggaagaagctgaggtccgagatgctggaactaaggctgttttagttcctcacaccaagtcgctcacgggttagaaattaccttctattttatattattacatttttttatcatttctacttattgagttagcgctcctcgactggttcaacgttctctaacagcgatggaaacagtgggaaacgtttatcgatgtttaaaaacccgaaaagacaccatcctgccagccttcgatagatgacgttctgcaattcgcgagcgattcctactccatgccaaccactcatctcgggttagttccctttacccacaatggatcttttaatctttgatccttcacttagacgttaatcccttctcggtattacctggttcaagtgaatagcgaactcaacgacatgattgagtactacgaaaggctgctgctagacagggaaaaggaggtgatgacgtggaaagataagtcatcgtccctcgagtctgatctccgctcttcaaatgacgctaggcagaaactggaggatcaactggacaatctctcctccgaactcatgaagtccaatggtgagctgtaggagcagtaccagaggtatgacaagatccaagaagaactctcaacttcttaggacaaactttcggaatctgaatccagtgcctacgaattgtccaactagctgtccgaattgcagctcaagtacaaagcggtggccaactatcgggatgctgagttagcgaggtcgacatcaaaggccacgaaggaagtgaaaggtcgcaggatggagatggaatcagacatcaaggagtacgagagcaatctcctccttttggacaaaacccatgaagatgacttctccgaggaacgagagagggacgagttgaagaccgtcctggaagagaagcgaaatcgtttagctgcccttccttcctcatcgttcaaccctcaacagtttgaggagttcttcaccgaatcgcctcctttgagcgaatctggtttacactgggctggtacattccaactctctttttttttaaaaccaattcacagcgaattactcttgtatttttcttaatccgagataattgccttggtgttagcgatcacgtggaacccaaaatacctatcgcgccggcgtcaattccggaggcggtagtcactccgcctcaaattcctccatccacgaactcggagacagtggtcatcgagaacgacgatggttcagactccggggttcctagcgagcagcctactactggcgagccggatgagactgagacaactgacgcagatcctgagccagctcaaaccgaacccgaggtgcccgagaacatgtagtggttgtgtccacttagtagggattgtcccttaaactaaaaatttattattgttttacgagttattttacctgccggtgttctctttcctcacgcctgctttcacttcccctcgaaagacaaaaaggaggcgtacgattttatggataaggtaaatcctctctctttctctttttcgggacaaattctactcgtttttaaccagttcgtattctaggtcgtcgacaagtatcgccgcttatgcgatgaaaggcaacgtttgggcctcaagaggcaaacgctcgagacccgaattgcccgtatcgagaggaaggtaagggctatggagaacgaccattttcaatgggagtggaggaacttcgactgtgtggcgaagatccagcatatgctccggatgtaccttcgtgctcgaggccaagtccctggtactgtaaaagctccggtcaaagtgatcccgtctaacagtgaagacggggacgacgaagaggaggacagcaacccttggaagcgcgtgaagaatgaacccgacgtggacgttaaaaatgaggtgtccatttcgaaccccgaaccggcgatgaaggaccctgttcccgagccccttccctaaatgttctctgagactcaaaactcttttttattattttcgcatggacttacctattgggcttcggcccattttatttaaggaaactttccaactttccttgattcatcaaatattcgttttggagatactctttgaatgcagggcgaacaaggcgacgtgaatgcttccgcgaatcactccggctttacatagaatcgcatctttgaaagctaagaaacctccctatagatttcctctctagggttttcttcattcctcactaacaataccgttcttttctttcgcgcttatggccttcaacctccgatgctcggaatccatgccaaacttttcgaggattgggatgatcgaggaggacattccgaacgtaccagacagaggatgctccccactttgcaacttcagatcccagatccgagctccgtgtgcgttaatcaaggacctttcgagcagagatcaggacatcgcgatgtcctttatcaaagctctcgcggctcaacaaaaaaaagatcaacggaaaagaagaaacttcgaaagaagatcaaccaaatgctgcagagagtcaccgtgatattaagggagttacacaccctcaactctcaccccggagactggatcgaactcgggatcgcagaatttgcccgcatcccggattgtatgatgcccattcttgacatcgccagtcaaggggtcgaggtgttttacaagacgaggaggatttcctagttcgaagtgtgtctaagacttcggcatcttttccttgtttttctttttgaataaatttagctttgcttcctgctttgtatgttcgcatagtcgaactccctgtgttcattcgttcgtataatcgaactctttttcaacatgaataaaacaaattttattaatagctgaactcgtttccgagctgcctacgtacccatttcgggatcaagccccaccgtagttcatacaaaaaaatgcgttttttttttaaacataaaatttcttcaagttcaccacattccaaggacgttagactggtctgttgataataggtttttcagtcaattatcctaaaacaccaatcatgtcgttgtagtattttaggttgtcaatccaaatgggtgtgatgctaacaatcaagatgtgatcagaagtcactaagtcaagccaagcaataacaggttttggtgtgttctagcaatcctaagtgaacaagcaggaaacagaaaatcaaacagaaacagtaaaacactcgaccaacacagctctttgcagagccctgggtgaggtcgagtgacaggtcgagtaacagacagaaaatgaaacaaagatactcgactgcacagtctgttgccagacaactgggtggtcgagtatcaggtcgagtaacagtaaagaattgcagaaactaagcaacaggtgacaggatgcagtaaacagcagtagagtaaacaataaaatcaatcagacaaagaattcctaaggatggggtaattgagtagtttcgtttcctcagtttacaggtgattgacatgctcaacaaattaaccctagacaacaagttcgttaaccaaatctaagtgccaccgcaacagagactctcaagctaacctagtcccagactcaatcaccattgacgagagctaacctaacaggcattacgaatcaacaagttaaagccaaaacgctccctgcaaccaataccttggtacagggtcacgaatctctggaattagtggttcaggcatttcatcgaacaccttttgggtgcggaaatgtctgggctcaaattccagttgatcagaaagcaataggcattaagaacaactaatccagaagggatctatcaatcaatactcaatcacctagcatactgagaattctacactactctaacccatcctcagaaacctattcactactcagacatcatgacagaaagcataaacgttgaacaggttgaagacatgataacagcagtatgataacagaatgaataacagtaaacgaaaatcaagaacagaaactgaatattgaatactgaatagataaagagaaatccggattacaaaaagtctagaacacaaggtctgcggaaataaaaactaggtaaaaaaacacctgctgcgaaaatgagaagtacatgctacttatagccaaatatcccgaaaccctaatactcaaaacgacgaagtatttggacgggttaagaactgtactcgaccaacgtggtcgagtgagagctcgagtgaatagctggaatcttcttttcttccttgtgctcgagtgtctggttgagtgcggaatgaagaaggctctgaagcttgtcatcgagtatgcagtcgagtggtgtgatggagttactcgacctctaggtagagtgaggaggtcgagtgaagtgatcgagtgaccgtctggtgatggagatgatggcactcgacctcggggtcgagtggtgaggtgaagtggtgatgtgctctactcgacctggttgtcgagtggtctcttgagatcttgaagctcctactcgacctcttggtcgagtggtttgtcatgatcaggtctacttcttccagatagctcgtcaacagctccaaatcacctgaaatcaacgcaaatatgcaacatgcatgcaaaactatcctaaacatgcaaagtgatgacaaatgatgtgaaatggtataaaacagtgatgatatgatgctaaagtgatgacaaatggatgctcaagacatgcaaaatacacacttatcaactcccccaaacttagtctttgcttgccctcaagcaaacaatcaagaacaagctggaggtgaggtttgaaagcggggactcagagccaaagcactagataaaccagatgaaatcaatgtccaagttgaaagttctaagctgcaagatcgaattctacttaaaaacgttagccatgcctcattaatcaatcaatccgactcatatgctcgacctacataagttttcaaatccaccaatccctttaacattcattagttctggaacgtgaatcaagcaatgcatcatcaaagaactcatttggctaaggtaaaaggtcaagagacaaagatggtcccttacagaataggctttagtaacaggggatctctcaaaaaatgattaagctttagtagaatgctaaaggtaagtcccaatctatgcatacagagataagatcccatctacccagagtacatcaaatgaagctctaatggtaatcccatctccaatcccaatacaagaactaaactctaccctttgcattcatgaatcttttaagccctttttctaatcattcttttcttttctcttaactctaggcgaagcttcaacactttgatatatctagcggatttggatttggcttttgcccatcttcaatagctaacaagaactctttcttttctttacaaatcccaaaacctttactagactttttctgcttttttagcttacttcacctagagtcctttaccttttctcatcaatgaatcaacctccccctttttttttcttttaaacacatcccaacccaaagtataagcacccacctagtcctatctagtccgaaaaatgcgaactagaactacatgagacactatctctgtcgttacgaacctaacactttctaccaagcttaatcggaataagacctcacaaacactcacaagtgatatagggcttgaaagaaagtctaggtttgggtttgggttaactgctctaataaggagagtcagctacttggattaacaagagtgatcaaaatgaataagagaatccaagtattttagggtatccatgagttcaaatttgatgcagacatgataattaaagatcagattcaggttcaaattgatagggaatggtatcagatcatgacagtgtggtcgagtagagcaatctaggcatggttcagttttatttcaaattcattgactacgcaacagacaactagcaacgagggcactgagtttatcaggtgaatcaaaatgcttacaaggctatctcatcatcatcccctatgcatatgcaacaatcctaaatgaaacactctagactcgatcctaaatgtgatgcaactacatgaacatttttttttttttgtagaatcattttctgaaatttttcaaaattttttttttttttcggtttttctatgccttagatgaatgcagactcaaaattatacacaatgcaacacacacttcctgagccctcccccaaacttaaatcacacagtccactgtgtgaataaacttggaagagagtactcaagacaaatccaatcacagaaacaaaaaaggaagaaacaaatcacaacagacggtataatacaatggtgaagtgaggcgcttacctcagtcgaagaatgaacgtagttgctcgtcaatggctgcctgcgattgctcccaggccatagacgaacctccttgttctgtatcagctccagcagatgggtactcgacctcatcagctctgtggcggccagcaccgctctgaggaaactcgacatctctccttctgctgcggccagcaccacggtcgagtgatctcctcgagtgaatgaggcgtgatctgctgctagatcgagtgagtgtagccttccttcttctcttgtgttcccgggattcgaatgacgaatgcctagcctggacatgtgggactctctgctcgctaagctcaggcctgtgcgcaggtgcattaattctcctcgatggcatttccataggaggttgtacctgtggaatagcagtggtggaggaagagcaactcagcttgtctgtcagaagcttgaaacacttggcgatcagcctgtcctgcttcttgcaccacttctgcaatttactgtaattcttatgagcttcagtcaagctcttgctctgcctcgctggaggtacatgttcagcaaagtgatacatgctagtgtcgaactttactgctccatcttcatccatcccatccgaagcagcttcttcaagaagatcgtcctcatctaatggtggagcgttctcatagtagaggcgtccaatctcaggcctaaaatcaatgttatctccctcgattatccgtgtgacctcagggctagggagaaggatgttagctctcctgtctgtagagtgctcaaacctgaacctgtggaaatcgtcaaccattgcaaactccaggaattggcagtgacgtaggtgctcgatatccattgctcgtggctcgagtccagcagaaatgagtgggactccacaagctatcagaataggtgtcaccacgccacctatgcacagagcgcctcgtgctctcttgcggttattgctgaccgcccagtttttgtatccacacagatggatcagaagaagtatagagagaggtgtgtcattgacttcaccctggagggacatgccatttttagtttggcggagagttcctttgagggccattgcgatcatctccatatcagagttagtgacagtccctgtaatctctcgggagtagagtacgttggctacagaacgctggaagtacctgatgacagggctgcgtatctgattgctctttgacctggaagcattcaacggtacagagctgccgatggtgatccacaagtctttcaactcttctctttcatactttggcttagatcccgttccactgggaaaatcaaacaatccttccaatcgcttgattgataacctgtactcatgaccatacacagaaaatcgcaagaatcccaatccttcacaatccaactcatcagaggtcataccttggtagagctctacttgtagtgtggagaggaattgtattgtctcatcttcatatgctacatacggataagccatcaaagtgtccagatgacaactttggtacaggtgctgaacatcttccaacaatccgagttgtgcaagtgaggtcgagcaaggatacctcgtgctacagaactcattcagcttgaaaagcctaacatattcctcagcaggcaatatgtcgggcttgtgcagaagtttggtagctctgcgagtctgttcaggcatgtactcgtcctccagatcttcgtctataagctcatacctctctctcatcgctctctttcctcgggctatctcagctttccttctgaaactttcgtattctctctgttctctctctggccttgaagatgacgattctgtctcatccatgttgtagtcaggatcaacagaagaactgccactgtaattgctcatgattctcctgtagggatttagaactcaaagctcaaatgtcaataggttagtctcaaagatagcaatgaaacaaaattattgtcaataggcaatgaaacagattgaaaaggtcgagtacaattccgtactcgagtaacctgagctgttcctgagcttagatgaaatggatcgagtatcttctcagaggtcgagttgtggtgcttcagtgggtcgagtgaatcgtagagatagagtgaatcgtgaaagctagtggtcgagtagcttctctgaagttggaaggctctactgagttcacgaacaagaagccgagtataatattgcaggggtcgagtgctttcaggaggtcgagtgatttcttgaagtcggctaggacggcgtcggtcgagtgcctctacgagaccgggaagcgaggtcgatcggtttcttttgaaagagatgacggttgatgcgaatgaattggtcgagtatatggaaggaatcgagtgaagtggtttggtcggttgacggagtggatgggctggtgacggcgcgagggagtggtcgagtgaatttctcagtggtcgagtagctctttgggcggcgatttgtggtgtagggagattagagtgtcggcggtgaaatgaaaagtggaaggtcgagtggatttggagtggtcgagtagcgcttcaaaatgagtggtctaggttgagttttagattctctctccagcttatcctcagcgcgtggtccacacactgttgattgagaaaatttctttgcagaaaacctactgtaaactgtaggagatttctgcaggtctctgtagcttctattggtcgagtaaaatgatgatttaaaaatttttgggttttaaacatcacatatgctcgaccaatgtacacgagtgcagggtctcaggtgcaacagaaaattttcaaaattttgtactccaacgggctgtacactcgatctccaggtcttcgacagagtaaaagttttaaatttttactctatctccgcgttgttctcttgtctctgaaaaccacaaacacaactaaaacaaatcaaaaatatcaagaaggtaaaaattatttacaaggatagtcatgggacttcctcccaagtgagcttgtttaaagtcattagcttgactcctttactcctttaatcatcaagaagctcctggagatgaaccgatgtcacctctggaaggatttggtccgctaagtatttcttgagcctttgaccatttactgtaaaatctccactcttaccagctagagtgactgctccataaggacggacctcagtgatgcagaaggggccagaccatctggatttaagttttcctggaaagagtttcaagcgagagttgaatagcagcacctgatcaccaacctggaaatccttagtgatgatcttcttgtcatggaaaagcttggttctctccttgtagattttagaactttcataagcttctagacggatctcatcgaggtcactgagttggatcaatcgcttctcctcagcagtttttatgtcaaagttcagaagttttaccgcccacattgctttgtactcgagctcaacgggtagatgacataattttccatagagaagattgaaaggagttgtacctatgggggtcttgaaagctgtcctgtaagcccataatgcatcatctagctttgcagaccagtctttccttgtaatcccaacagtcttttccagaattgtttttatctccctattggagatctcaacctgctttaccccatgcttcttcaagaggttctcaaaaaccttgttgatgaaatgctttccgccatcactgattactaccctgggaactccaaatcttgggaagattatggttttgaacaacttcagcacaacttttgcatcgttggtaggactagcaatagcttcgacccactttgatacgtagtctacggcgaccagtatatatttattaccgtatgaagatgggaatggacccataaaatcaatcccccatacatcaaagatctcaacttccaagattggattctgaggcatctcatttcttctattgatgttgccttttctctggcatgaatcacactttgaaacaaactcctgagcatccttaaacattgttggccaccaaaagcctgcttgaagaatcttggacactgtcttgaacgtcgcgaagtgaccaccatatgctgagccatggcaatgcagcaggataccttccgcttcatcttctgagacacatctcctgtagatcttatctttacagagagtgtaaagataaggctcatcccagtagtaatggtgtatgtctctgaaaaacttcttcctttcataacttgtcaggttgggaggctctaccccgcatgccaagtaattgacgtgatcagcataccatggagattctccttcaacagcactcagttggtggaactctttcccactgtagctttttccgaagaactctacaaccatgagctgttcttctggcattgaatcgtctatcggaagtggttcttcaattctcatcctcgacagatggtccgctgcgccattttcaatgcctttcttatctactatctccatgtcaaactcttgcaataaaagtatccatcttaacagtcttggtttagtatccttcttggcatacagatgcctcaaagctcatggtctgtgtagacagttacctttgatccaaccaaatagcttctgaacttctcaaatgcgaatacaacagctagaagctccttctcagttgttgcatatcttccctgagcgtcatccaacgttcggctggcgtaatatatgacatgaagcttcttgtctattttctggcctagaacagctcctactgcgtaatctgatgcatcacacatgatttcaaatggataatcccaattaggcgctcgaacaaccggagcagataccaaagcgtccttgatggtttgaaaggatttgaggcagtcatcatcgaattcaaattcggtttccttgcacaatagtctggttaacggtctggctatcttggagaagtctttaatgaatcttctatagaatccagcatgaccaaggaagcttctgatgtccttcaccgtttttggtggctgcagctgcatcatcacttcaacttttcctttgtcaacctctatacccttctctgatatcttgtggtccaatactatgccttccttcaccatgaaatgacacttttcccaattgagaacaagattcgtctcttcgcacctagtcaataccctgccaagattcaacaaacatgaggagaaagaggggccatagaccgaaaaatcgtccatgaaaacctccaccatctcctcgattaagtctgaaaatatagaggtcatacacctctgaaatgttgcaggagcattgcataaaccaaatggcattcttttataggcaaaagttccataaggacacgtgaaagtggttttttcttgatcattagggtgaattggtatttgaaagaaaccactgtatccatcaagaaagcaataatatggatgattagccaaacgttcaagcatttggtcaatgaatggtaaaggaaaatgatctttcctagatgcagcgttcaacttcctataatctatgcacattctatgaccagttatagttctagtagggatcagttcatctttttcatttttgacaacagtcattccaccctttttagggacgcaatgcactggagaaacccaagtactatcagagatagggtagatgacaccagcatcaagcagtttcaaaatttcttttttcactacttctttcaaattgggatttaacctcctctgtggttcaatgctggaataggattcgttttcaagatggatcctatggttgcataaactaggtgaaattcccttaatgtcggataacgaataaccaattgctctcctatactttctaagctcagataatagcaggttcacttcatcactatttaactcagcattaatgatcacagggtaagtagagtttggaccaaggaacgcgtaccttagaccttttggaagcggtttgagatcaacctttggtgccttaagttcagaccagtcatctgaagttggaatgatcggctccctaggttcgtcggtagacaaggtcgagtggttgcttgagtacgtcctcgagagtgcaggttgaactcgagttgacccttcttcgcttattaccattacctctgttgctggtccattcaattcctcaaagggttccgattcttccatcgctttatgggagtctaacagcttctggtatcccaatgtttccaaatgcagaaacccatcttcaccacttttggttaaagcactgttaagatgatcttcttctgccagctcttccagtaactcatcagctaactgatccatttcttcgatccaaaagagttgcccttctatggtaggcttcttcatcgcgtctttgacatcaaaggtcattctaaagtctttgccaaggttcagatcaatcttccctttcttgacatcaatcatagctcctgcagtggctaagaaatgtctccctagaatcaacgggtccttgggctcttcatccatctccaggactacaaagtcagttggtatctccacagcaccgatcctgattgggaggttttcgagcaaaccatgaggaatccttactgatctgtcagctaggatgagggatatattgcaggacttgtattgagtgaaccccaatcttttggcgacagatagcggcatgagactgactgatgctcctaaatcgcataggcatctgttgaaagccaatggacctaaagagcacggtagagtgaacgaaccaggatcactaagcttcttaggaatgatcttcttctgtatgatagcgctgcattcatgactcaataccaccatcccttgcacttcttgaattctctccacaatcaagtctttcagaaacttgtgagagtctgggattagcgctagggcgtcaacaagaggtatccgcaactcaacctccttaatgttcttggcaaacatagctctatatttgtctgccaacgctttcttgtgacggccaggaatggaagctgcggtttgtagggaggagggacaaagaccttttctttgtttttgacagcaactggccttggagcagttggtgatgctgctgggatgacaggtcgagtggtcggtcgagtaatgctgtcgagtggttgctcgagtggctggtcgagtggtttgtcagcttgatctttctcgagacttaaatcctccccatcttgatcttcactgtcctcagtgaccgtgttgggttcctccctagttggaagtgcttttccactacgcaaggtgatagcatgagcatattcttttggattctgaactgctttgcctggtagttggcttgtctgttttggagctgaagaagatgcagaatgtccctctaagtaacggactttggtattcagtgtttccatcttgacattgagatcattgtagctacagtccagcttgttatgtaactcagatatcttttttgccatctccatggagccagaggcttgcccgtgaagtagctgttgtagcatttgtttcatatcagcgtcagcagcagcaggaccttggctttgctgaggtgcaaaccctggtggtggtggttgctggtaatttccctggaattgctgcttaggaacgaaaccttggttgtagggaacaaaaggtttgttctgactttgttgttgctgtggaggatacacctgatcctgagggttagcaacgttggtgctgcggtaggaaaggttggggttgttggttttgaagttgttgtatcctttgtagccaccctggttgttgttgatgtagcttacttcttccaactggttaccctccccatcttggacttgatattgctcgtcatcaacaaggaagtgcacatgcttctgctggctaagaagaatcctgtccagcttgtcattcagcgctttgatctccttcctgtgtttgtcattagagtcagctgttcctctgacggtcctatcacagtcttcgttgtaatttccatctgattgagcaaggttctcaaccaattcccagccttcttcaacatccttgttctgaaaattcccattgctggcggtattcagaagcattctgatgcgtggtaggactcctctgtaaagagtgctgagcagagaagctttagtaaagccatgatgagggcattggttggtgtaacccttgaaacgctcccatgcttcacagaagctttcaccagtcttctgtgagaaaccagaaatctcatttctgagtcttgcagttctggcattggagaagaacttcgacagaaaaaccttcttacaatcatcccaggtggtgattgagtcatggggcagattcttctcccagatatgtgctttgtcacccaaggaaaatgggaacaaacggagcttgaatccgtcttcactgacaccattgatcttcgttaggttgcagagcctatcgaattcatcaaggtggtcgagtggatcctccattggcaaaccatggaatttgttcccctgaatcatcgagatgagaccactcttaatctcgaagttgttattctggatagcaggaggtgcgattcccttcctctgacggtgatcacgtggtgcatctccagcaccaatgttggcatggccattttgctgattctgttcttcagccataacgagtggttgctgaggtacagggttgactgtggttctcctttttctgatttcgcgggctatgcggttgatattgtcgttgaaaaggaggttctggttgcctgttgatcgagttcgcatacagtagaggtgtacctggatcaagaagacaacaagaaaaacacacagttagtaactaaaaagaaaattgaaaaagaacttgatctaagcaagtctgaaatctcaaatgtaacaaacaaacacccaattggcaacggcgccaaattgataataggtttttcagtcaattatcctaaaacaccaatcatgtcgttgtagtattttaggttgtcaatccaaatgggtgtgatgctaacaatcaagatgtgatcagaagtcactaagtcaagccaagcaataacaggttttggtgtgttctagcaatcctaagtgaacaagcaggaaacagaaaatcaaacagaaacagtaaaacactcgaccaacacagctctttgcagacccctgggtgaggtcgagtgacaggtcgagtaacagacagaaaatgaaacaaagatactcgactgcacagtctgttgccagacaactgggtggtcgagtatcaggtcgagtaacagtaaagaattgtagaaactaagcaacaggtgacaggatgcagtaaacagtagtagagtaaacaataaaatcaatcagacaaagaattcctaaggatggggtaattgagtagtttcgtttcctcagtttacaggtgattgacatgctcaacaaattaaccctagacaacaagttcgttaaccaaatctaagtgccaccgcaacagagactctcaagctaacctagtcccagactcaatcaccattgacgagagctaacctaacaggcattacgaatcaacaagttaaagccaaaacgctccctgcaaccaataccttggtacagggtcacgaatctctggaattagtggttcaggcatttcatcgaacaccttttgggcgcggaaatgtctgggctcaaattccagttgatcagaaagcaataggcattaagaacaactaatccagaagggatctatcaatcaatactcaatcacctagcatactgagaattctacactactctaacccatcctcagaaacctattcactactcagacatcatgacagaaagcataaacgttgaacaggttgaagacatgataacaacagtatgataccagaatgaataacagtaaacgaaaatcaagaacagaaactgaatattgaatactgaatagataaagagaaatccggattacaaaaagtctagaacacaaggtctgcggaaataaaaactaggtaaaaaaacacctgctgcgaaaatgagaagtacatgctacttatagccaaatatcccgaaaccctaatactcaaaacgacgaagtatttggacgggttaagaactgtactcgaccaacgtggtcgagtgagagctcgagtgaatagctggagtcttcttttcttccttgtgctcgagtgtctggttgagtgcggaatgaagaaggctctgaagcttgtcatcgagtatgcagtcgagtggtgtgatggagttactcgacctctaggtagagtgaggaggtcgagtggttgtctgatgatggaggtgaagacactcgacctcaaggtcgagtgaagtgatcgagtgaccgtctggtgatggagatgatggcactcgacctcggggtcgagtggtgaggtgaagtggtgatgtgctctactcgacctggttgtcgagtggtctcttgagatcttgaagctcctactcgacctcttggtcgagtggtttgtcatgatcaggtctgcttcttccagatagctcgtcaacagctccaaatcacctgaaatcaacgcaaatatgcaacatgcatgcaaaactatcttaaacatgcaaagtgatgacaaatgatgtgaaatggtataaaacagtgatgatatgatgctaaagtgatgacaaatggatgctcaagacatgcaaaatacacacttatcatctgtcctctaaatctttcaatctgtaaacaccatttcggaccacttcggtaacaatataaggaccttcccaattaatgccaagttttcctgctccttcctctttcttgttatcgaacacacgtttcaaaacataaacgcccacaaagaaaggtctgcttttgacttttgaattgtaataccgagctgctgcatgttgataattttgaattcggatcaaggcctgatctcgcctctcgttgatgatatccagcgaatcgtcgagcattgcagaattctcgttttcatttaaaggagcttccgttcgacgaagtcctggtacattgagctcggctggtacaactgcctccatcccgtacaccaatggaaacgaggtttctccggtcgagcgcctaggagttgtgcgatatgcccataagactggctgaagttcatcataccagccccttttcaaatgacttagacgtttcttaagattgcttagaattgtcttgtttgcggcttcggcttgaccgttctcttgtggataccgcggagtggaataactaaccttaatcccccagtccgagcaaaatgcttcaaactcgtgtgagataaattgtggtccgttgtcagtaactatttcgtatggaacgccatgcctgcatatgatgttcttccaaatgaaagtctttaccgccgaatctttaatgtttacatacgcttcagcttcaatccacttcgaaaaataatcagttagaaccagtaaatattgtacacctcgggtcgacctatgtaacggtccaatgatatccattgaccatctcatgaaagggtatggggcggagatcgaagagaataactccgaaggttggtgaatgagtggtgcatggagttggcaacgtttgcatcgttgagcatacttaacgtagtctgtgatcatagtaggccagtaatatcccattctcttgatcttgaaagccattgcccttcccgaggaatgacttccacacaaatcttcatgtacttcgctcataacgatctcgacttcgggcccaaaaatgcaaagtaagtagggatcacttacacctcgtctatacaaagaattctttgatagacaaaatttcgcgctaacgattctcattttcctagcttgccatctgttctttgggagctcgcctgtaacgatgtaatgctttattggctccctccaatcagccccccaatctttagccagaatttggtcgatttcgtgaaatactcgagcttctgattcaggatgttcatttggcgctagtatatcttcttcaacccacggttcggtttcagcttcgactgtggtatcgggagtgatttcttctactggttcgagcccaatatctttctgcacagtaggcttaggtacagttgtttcttttgactttcgccttttgataggtggtaattcaatagcaggttcgccgcaatctcgggctgcagctcgggatcttgtgatgacgaatgtctcctttttgtccataatactcctttccgaaatacactctactggaatgattcttttgacttcatgatcggatgttgatgtcagggctgcgagtgcatctgcggtattgttttctccctgcggtatgcgaatgagttcgaatttcctaaagtttctagccaagtctttgaccacctcaagatatgcctccattcgtgagtcttttgcttcataatcaccattaaactggttaacaaccagttgggaatcacagtaggcgaccacttcatcggccctaactccttgtgccaacctaagtccagcaattaatgcttcgtactctgcttcattactagatgcggtgaataacaatcgaaatgactactcaaggatttccgaagtgggagattctaacttgattcccaccccggatccatgttctgatgacgatccatcaacatgcaacttccaagtctgattttgcggctggtcttgccctccgggtaccggtaattccgttaaaaaatcggctaggacttgagctttcatggcgactcggttcttgtactctatatcatattcacttaactccaccgcccatttcgctaatctaccggactggttcggggtatggagaatagtccgaagtggctgatttgataacacttcgattggatgggattgaaaatatggacgaagtttcctagctgaggttactactgcaagtgcaagcttctccatcatcgtatacctggtctcaggacccgtcatggatttacttatgtagtaaattggtttttgttctccccggtcttctcggattaagactccgctaaccgcatggttcgaaactgagacatatagatacagtttttcgtctacttccggtttggacaatacaggtggagaagttagatacgcctttagctgtccgaacgcttcctcacacttctcatcccaaagaaattccttgttaccctttaagatttgatagaagggtaaagatttatcggtcgatctcgaaataaaacgattcaatgctgcaattcgaccggtgaatcgttgtacttccttgaaattcttcggagatggcatgttgagaaaagcgctgatttgatttgggtttgcctcaattcctctttcgtgacaatgtagccgagaaattccccggatgggactccaaacgtgcacttcgccggattcaacttcatctgatattggttaagaatcgcgaaacattcttccagatgttttacgttgtcttccttttttaatgatatgactagcatatcatcgatgtagacttccattgtttttccgagatattcgttgaacatcttgttgaccagccgttgataagttgctcctgcgtttttcaaccccaatggcataactttgtaacaatagatgcccctattcttgataaatgacgttttctcttgatcttccggattcatcatgatttggttatatcccgagaagacatccataaaggacaacaactcatttccggcggttgattccacaagacgatctatgtgtgaaagtgggaaactatcttttggacaagctttgttgagatctgtaaagttaatgcacactctatcctttccattcttctttttgaccacaacggtgtttgctaaccaattcggatattgtacctcccttatagatccaatctttaggagtttatccacttcgtcgttcactgcttttgctctctccgctccgagttttcttcttttttgttttaccggtttgaaactcgggtctacgtttagctcgtgacaaattatatttgggtctatgccgggcttatctgctgccgaccaagcaaatgatttcttgttcctttttaacagctcaactaaggcttccttcactttgcccgataaagtagctccaattcgaattttttgatctggtttgtctgcttctagaattacttcgaccacgacatcatctactttctgcccgctaggaaatctcgggatcacacctttctttgcgggtttcgttaattgctattgaatttttaatcggtggccagctaaataacaagttctcgaagcttcttgatctccccgaattgtttccactccgctcgaagttaggaatttgaggcattggtgataagtagaagggaccgctttcatttgataaatccatggagttccaagaatgatgttataggccgctggtttatcgaaaacgacaaaatccacaatattcgagatctttccagccaaaactggtagcttgatagttccgagagacattgctgattcacttgtaaaagccactaagggtgatggaggtcctaccacggctgccctgcttatccccattctttccaaagtgctaagaaaaattagatctaccgaactgccaatatcaatgaggatccttgacacttcgaagttggctacatccaacgtaattaagagtgcatcatcgtgaggtctttcgagatgttgtgtctccttttcttcgaacaatatcgaagtgccctgaaagtctacttcttcacttaagcttgatttcaaatgaacattgcgcctatgcttcttgattgcactgatggaatcacggcaaagtttagatcctccaaaaattacattgattttatcctttgaagctcttggttcctcttcgccagccggtcttgatcttttagagttttgagcctctggattatcccttgactcatgatattgcttgatgaagttctccatgttgaattttgaaaggtctccgctggcccataattctgcgagatgcctcttcaggacactgcagtctttggtcagatgtccagtgactctgtgtatatcgcaatacgagctttcatctcagacccaggtgtttgaccttcctttcccctgaaactgctttccgacgttgttattgaatggttgtgaactaaacttccttggtccctgattttcccggggttcaaacttcttgggcggaaaagtgaccgctggttttgcttgcttatttctttttgcaaaactttctttttcatcctcgacttccatccaattattcgctcgaaatagtgcgtcttgaatagtatcacgtttgtgaagtattagatcttccttaaacctcaaataatgcaataatccctttcgcaaagccgacagagccgactgttgtgagatccttgggagctttgaaagcacgttttaaatttggtgatgaaagcccgaagtgtctcattcggcctttgagacaaattccagagatcggtatccgaaatgctcttatccatcagaattgagtattgttttaaaaatactgccgatagttcgttgaaattactgatcgatcctagttccaactaagtgaaccacatcagggcttgcccagacagattttcagagaaaagtttttaatatcctgcgtttagatcaactcgaccagcggctattagaaaagctgcgagatagcctttcggatcttccaaaccattatatggttctaagttgagttttcgagaatctctgattctcaaactcgcaattcgcagggtgaacggtgttcgcctagcctcctcgataacccggttgatatccggctccgagcttgtagcttggtggaatttcgacctcatttctttcaactctcgacttacttctttcatggtttcgagctggtcgaagttttcctgctcgtgttgatcaccgaactggtcatcgtcctcgggatgcgtttctccgtcttctggttgattctccgcgtttgtaccctccggggtcgtttgatcactttttgcatttcgcggaagggaatttggggatccgaagatagttcttcgaactctagaatttcctgtatttaaagaacggacacgagactaaatagtactaacattttggctaagcgatacctgggttgtttgcagtgtttcgacagttttttccacgtttgaaaacttctgcgccatatcggccatagtttgttgcatggtcttgagggtttcggctatcgaagcgttggtagtatcctctcctgacattgcggatcacttcgggtatgtaacacacagaaaaaagctgatgactcaagaatcatccgtccccacagacggcgacaaaatgtgaatgtcggattcacacactcaagtatttatttatttagtgggtaggattattcttgaggacaaatatactagaaaatagataaatgatcatagagaaaactatgagtattgtaaaagaatgtgtatagctaatttgcaccaagaaatgcgtgtgtctttacatggtctttgacccacaatttatacccaaagaatacatttaatacctatttactcacaatcattatactttaaatatatccgtttttagtctttgaattaactatttgaacgtttaaaccgagtccactccgggccttctggacctcacctctcggcccattcggtttctccaattcgagtaatcctgacttcgatgctgccttcacctcgcaaaccaacatctcgcccatactctcacctcgaggatgcttatgggccctccctcttatgggcttcttctacttgtgccgcaatctttggctggatccgaatccatggtgcgggatccgacaccaacattaatcaccctgaatttttgttttaaatatttattttcagttaataaaatgaatcaaatcttatattacaatatatgcttcaatatttttattaaaaatttttaattacgtaacattttaaaaatttgaaaccctaattatttcccaatccacattttctgttttaaatttgcaattgtacaaaataattatcacttcctaaaactttcttttctgatttttattaaaattttttttttctagcaaaaataaactgtgcacgtattaagctaatattgctgactcaaataatattaacaaaatgcccaaatttaggctattgaaataataataaagttagtaaaaaacacaagtatatcaatctagaattatgattaaactacgtatttatatataatagttgttttacaaaaaatagcattatatatattaaattttttgaagtacctttttatagtacttttgtgttagtaaagtaagaatttacaaagaatgtcatcacattaaagtaatttttttttattattttttaatattgttgatatatttttaactttataaaacattattattatttaaaattttaaaaaaaatatcatgagaccggacagatttggattgatatgaaatatttcgggacgggtttagactaatataacactggttaaatatttattttattattttatcattaccaatttttttagttacaacattaatataaaattatataactttaatactaaattaaaaactttaaaatttaatattattatatatatgaataaaacattaacccgtggtataatgatgttgggaatttaatgaaaaaaaacctcaactttggccagatccatttttaaaccctgaactatgtttttagtaaaacaaaccctgaactaaaacctgttaataaacttaaccccacagtaataaacttaaacctgttaataaacttaacattgatataattatggtaaaatagagaacaatgaattatgtttgacaagatcttccttttcaaattatttaatttaatctttgcatatttagacttgcagcaactgtcaacaagtcggacacaacaaacgttcatgcaagcgtaaagcagtgccaaaaccacccaagaaacctcaaggacgaccaaggaaaaaacagaaaacaatggatgaagagaaccctatcactcaaccaatacaatcttctcttcaaagttaatgcttgacaagtctttactttagaatatcttgtccctctgaaacgattgtttttttttgtgacaaatattgttgtgttgcaacagcttcgatagttatgttggttggatttatttaagcatgactctttggattattttaagttgttgtgtctttctttcagcttctaaaatccaaactaattaagcaattcaaaatcatttagaacactaaacgttttttttgtaataaattcaaaacagttttaaagaacatcatgtggtttttgcgctaaatacaaatgtctcgttgttgttttttttggaaattaatatcccattaatatttaatactgtggggttaagtttattaacaggttttagttcagggtttgttttactaaaaacatagtttagggtttaaaaatggatctggccaaagttgagggtttttttcattaaattcccaatgatgtttactaaactaactaaaacaagtaataacaaataaactttaatcactatcttctgatctcattgatgacacgtcactatcaatatcttctaattcttctttattatctcgaaggaattctggttgcttatatccggctctggtccaatcataagacatgcttgagcttcaggagaatctgggttcattcttgatcgagtttcatctagtatttgacctccaatgccaaaagctcgctcgctcttccatccatgaatgatttgaaagtattacctgcatctgcatcactaaactcaaaatttgtagataaataattttcaaagagcttttggactaacatagatatgccatgagttgtccataataaactgaaacatgtagtgaagaaccctaatcttgatcactttggatgcttcttcatcaaaaagaattagtgatccttgtaaactataaaataaaaatatcattaatacaatttacaaacttttatatatattacataattataaaattttaaaatccactaattttagaaaacatattatcctgtaatatatcgctgatcaattcctagttgtttataatttttggtgtgatcatatatattttcagttggtatatgtcaccatgcaacctaatttgtttctttcaaataattatattctaattcatatagttttatctttttgtggtctggaaattcaaaagtttaaccctaaccctaagtaaaatatctcatgcctacccttaaaaaaataaaaaataagcagcagtccataattccattatagagaaaaccaaaaccaaaaccacaatctcatcaaccaaatattattaatcgtccgataacccaatctctcttttctccaaacgcttttttttttctctcacttcaaaatctccccgagacctctcgccttctctcgcagccgacgatcccatccaaaaccaacgctctccggtgatcgtctttcctttacctcgccgaccttctccgtcttctcaattacgatctatcatcaccagaatccgttttctctcttttaactccgatacaaaacttccgataatcccaaataaacgttacgaatttcagactcttttttccagtttctgtttgaattcgatttcgaaggattagattctccggtgagatttttagaagcgtgtttgatttttcaaatcaaagtttgtcaaaactcttagcgtgaattttctccagagtttatcatctcttatgtgactgtgttttaatagcttcttctctatagctcttcctttgtgcttcttctctgggaaacttctctattcgtatacctaattctagggttcgtttatcctaacaattcgagatttagagggctttaggattcgatttcgtgttttaatcgtgtggatctgctttcaattcgtttatcgtttcgttccactgaattgagtttgttgattgcttagacttttatcctcgtcttgttgtttgctcaattgaagagcagagtagcttccgttagatctgctttgttgtggcattgatggagaggagaaatcaattcatgttacgtgctcctggaattctggaataatcttaattttcagttgaaacaatgctttgcttctcttattttcctgttaatcaataactaagtgtgaagtgtggtttttatcgaatttttttagtatcattttgatgcaggttattaactcattcgtcttcttctttttcttagttctactgagacgttagaagaattgtggctgttgtcgactgcaaggagagcgcttactttaattgctgatttcatgagacgagatggctttctttaggaactactcaaacgatactgtgtcacataatgttcttgatgaaaatgaggagcggcaaaatgctgctacttttcagagttcacctttgaatgaagatgtggatggtacttatagtgaaagaggctttgacatgaacatggacgtacagtatcaaagtgacccagaaccaggatgtagtattaggcagccaaatgagacagcagttgataatgtagctgatcctgtggattcccattatcaatcttcgacaaagagattgggtgtaactggtagatggggttccacattttggaaagattgtcagccaatgggacaaagagagggttctgatcctgccaaagattcacaatccggttacaaagaagcatatcatagtgaagataatcactcaaatgaccggagtgaaaagttagattctgaaaatgaaaatgataatgaaaatgaggaggaggataatgaaatgaacaagcatcaaagtggtcaagctgatgtcccagcagatgaaatgttgtctgatgaatattatgaacaagatgaagataatcaaagcgaccatgtgcactacaaagggtatagtaatcctacaaattctagatcactgccaaaggcaggatctgctgtccatagcaactcaaggacttcaagagcaattcacaaaaacattcactatagtgatagtaatcatgaccacaatggggatgctgatatggactatgaagaggaggaagatggtaaactcttttaatttggattcctaaatagatttgactctgttgtttgtttgtacgcagtactagaacttacgtctatgttttttcctctgaatacttcccacgtcaagtgcttggtttgaacttcagtaacatttgatcttatttctcatcagaggatgaccctgaagatgctgactttgagccctatgatgctgctgatgatggtggtgcaagtaaaaaggtttgacttcttacaattcttgtgttgggatacatgttcatcacaatgaagctaaaactgaacaaaagaagggagatactttctgaaccatttcttaactaagtttgctattcggaaggatcttcatttatagttaacatgttgtgttctagcttgttacttgttatagttttgatgggatttcttacatgttacaactgtgtggttgtttgattttagcatggccaaggttgggacgtttctgatgaagaccctgagagtgatgaagaaattgatctttccgattacgaggacgactacggaacaaaaaagcccaaggttaggcaacaaagtaaaggtttccggaaatcaagcgctggactcgaacgaaaatcattccatgtttctagtcgacaaaagaggaaaacatcatatcaagatgacgactcagaggaagactctgaaaatgacaatgatgagggttttagaagcctggccagaagaggcacaactctccgacaaaacaatggaaggtccaccaataccataggacagagtagtgaagttcgcagctccacccgatcagttcgtaaagtctcttatgtagagagtgaagacagtgaagatatagatgatgggaaaaatcgtaaaaaccaaaaggtatgatatcttgttacattttttaaggttatacatttttacaccctcaacttgcttatgttatcgtgtgggaatctaatacatttgatagagactggcagtagtttcatgagccttctctaaagcggtctaaataactcattgctatagttataatctgcacgtcgtacatattatctttctgttggaaacatgttaaatttggagaacttacggtcttttgatttgattaactccaactatttgacctagagcagccattaatttcaactacttggcctagaatgaaagcaatttctttagaagccttgcccagctacttaatgaacttttttgttatgttattcccttttatctgatatatgctcgttaggatgacattgaagaggaggatgctgatgttattgaaaaagtgctctggcatcagctgaagggtatgggtgaagatgttcagacaaataacaaatcaacagttcctgttctagtaagccaactgtttgatactgagccagattggaatgaaatggaattccttataaaatggaaaggccaatcacacttgcattgtcagtggaaaacgttgagtgatctccaaaatgtacgtcctttggactccttttttaattttaattttgatcaatgtattgcatatattttagataatgctaatttttattgtttctttacctatgttgtgtgttcttacagcttagtggattcaagaaggttcttaactatacaaagaaagtgacggaggagattaggtacaggacagcactctcgcgagaggaggtaatgtttgaatgtctggaagattttctgctttttattatccttatatgtacaaggaagaatgccatgagatgctactctgatggttcacaacatggttatatttcttatttagcttgtgaaaccatgtttaccacgtaagatactaactttttgtttatatttaggcattatcatattgaacatgtgctgccatagtatgcattggaatatatcaaatagatctgccagagttgttgttatggtatataaatctgaaattctttcacttgatatattttttaaccttttagattgaggtcaacgatgtgagcaaagaaatggatctggacatcattaagcagaatagtcaggttagtgttttcgttccatcaaatttgcaatctcatttcacgtctcatctgctgctgtttacatctattgcttttgcaatttttattagattattcctcctctgagctaatttgtttatgttatttaggtagaaagaataattgcagatcgaataagcaaagatggtttaggtgatgttgtaccagagtatctagtaaagtggcaagggctatcttatgctgaagcaacttggtatattctctaacactctcaatggatattattacttgtttccttcttttttttatagtgattgtgttgtttcataaattgagaagcatgctataagatgatttacaatttgtaattatgtatctatcacccctcaagtatcattttcttcctgtcttttttctttagggagaaggatgtcgatatagcatttgcacaagttgctattgatgagtacaaggtagagtttttttttttgttataattctgcttgaatttaccatttggcttttaatttgtaactctttgtccaactctatatttttccatctttttagtagtaataagaatattggtattaaattctgtagtttacatcttgttttgtaacacaagaatattctaaaaggaaatacaaatgcttatcaaatattaagaaacttttttcagaatatttaacagtgctattatacttagactagtatatacatgggtctgtttctgcagaatcagatgattaaaaaacctaagttgctttaatgcttgatgtaatttctatctatgattcaggctcgtgaagtttcaattgcagtgcaagggaaaatggtggaacagcagcgtacaaaaggaaaaggtttgttacataaaatcaatagttttgtagttttctttgtttcacgttatatggaaagcagacaagaaaaatactcttcattagagaaactgcctaaccttgtgaactggttctttatagtttggtctctgcattcttcgtctctcgaatccaaaagttatatgtaaaatttgattataaactgaccagcatctttgtctttgtcttttattcattcacataaaaatgtgaagggtacagtgtaatagaaaattaaacaacatacttaagagaggcatcacttagatttttatgctctgtcactttgctatgttttgtctatggtggcaacgtatgcttccgttcccattttatatctgatatttagagtaggtgaaaactctttttctaatgctgagttgtggttactgttctctgtagcgagcttgaggaagcttgacgagcagcctgagtggctaattggaggtacactacgtgactatcagctggagggtttgaattttcttgtcaacaggtgttacttatctcacttcacaattgctgatgattatttacttgtctactcggtcttatgtgattctttacttgtcggctcggtctaatgattggcttcctttcattttccagctggcttaatgatactaatgtcattttggctgatgaaatgggtcttggtaaaactgttcagtcagtttcaatgcttgggtttttgcaggtgaaaatctttttcttttcaagtgagcgttcaagtttgctcatgatttggaaatcttgttctcttttcttagcattacttttcatgagctaacatatctcttcttttatttcttttcttttttcttgcagaatacccaacaaattcctggtccttttcttgttgttgtgcctttgtcaacactagctaattgggctaaagaatttagaaagtggcttcccggcatgaatataatagtatatgttggcacccgggctagtcgagaggtgagaaacaaaacaaatgatgttcatgttatagcttctaataatcttcagggtgttaagctcttatatctctgttgtctatctaaatctttcatttactgtcctagtcaacattttttctatccaaattggataggcgctgtagcttaggtttttgatttgaagatctttaatgtttttatacgacagtaatatatatatgttaacagcatatacacttctctatccctctcttccctggtgtagaattttgatttttgttaatttctggcttcaggtatgtcagcaatacgaattttacaatgaaaagaaagtaggccggcccataaaattcaatgcacttttgactacttatgaagtagtcttgaaggataaagctgtcctctccaagattaagtggatttacttaatggtggatgaagcacatcgactgaaaaatagtgaggcacagctctacacagctcttttggtatgtgacttttttaagaacttttatctattttcatggttctttttttggttgttcataatgggtggcatatcttatctgttttaggaatttagcacgaagaacaaattgcttattactggtactccactacagaatagtgtcgaagagctttggtatgctttcttccctttttaagccctttctctggagatggccttttgtactctttcggattaatattaatcctgaaacttgcaagtttatgttctttgtttgtttataatctttgatagtgttgatttttgtattctgtgcttgatccactcctttttaatgcaagctatgctcttgatgattctgttgatgcgtttcttatgcacggacaacgcgtatattggatattttttaactgttgacacaatgattcgttgctaccccattttacatggactgcgtcattgtatcatatgctactttcgtacctttgtactctactcgtttgataaacgacctatttctattttttgcagggctctgctccactttcttgatcctggcaagtttaagaataaggatgagttcgttgaaaactacaagaaccttagctcattcaatgaatctgaggtaaggtttgtccattgcttaatagtatgctgtagtaacgaaatatagttgatttattattcagtcgtccactagcttatacttttttggaatttagctcgccaacctgcatttagaattgagaccccatattctacgacgagtgattaaagatgttgaaaagtcgttgcctccaaaaatcgagcgtatactaagagttgagatgtcccctcttcagaaacagtaagcataacttcagctgatacttttgagtggatagctttaaatattgttacttatattctgttgttctgtgttaggtactacaaatggatactggagcgcaacttccatgatttaaataaaggggtgcggggtaatcaggtgagtgactttatgatgcacccaggttctcatatttattgttatgaataattattttctttgtccctgcactgtaagttaggtggattattttaatatgcatccgacttcttaagtttgttgatattaagctaacaatctctgagttacaatcaacaggtttcacttttaaacatcgtggtggagttgaagaaatgctgcaatcatcctttcttatttgaaagtgcagaccatggatatgggggtgacataaacgataactctaagctggataaaattattctaagtagcggaaagctagttattctagacaagctactggttagactgcgtgagactaagcatcgtgtgcttatcttttctcaggtgcggtttgatgacttttattcttcctagtgagttttgtactttattgaaatgagtgttgtcatatacagttccactgttctcctgctgctcccttgttagaataaagcaccttgtgcttatcttcccgtaggtgtggttcagcacatttgttcttcataatgggttttctgttattgaaatgaaattttgttcttctttgacaatttagctggttttcttttctgtagtagataacttctttcagttattcatatttccatatctaattagatggttcagaataatgcctaaggtaccttgtttgtatatgataattagtttgcgttatttttggttgtactgcttagtttattgtgtgaaagtcacttctgggaaaacaaattatgaactgttacacagaagttgctttcttggtaaccatttagcgatcaaatgttattaggaaaactgaagctctgttggattagaagctttaaaagtctttcatcttgttgataggccttcttgcattgttaactcttacaaaatatgtcttgaactttcttaatttatcgttgttgcactgtttgctttacagatggtaagaatgttagatatcctggcagaatacctgtctcttagaggtttccagttccagagactggatggtagtactaaggcagaactgcgtcagcaagcaatggatcattttaacgcacctgctagtgacgacttttgctttcttctttcgacccgagctggtggactgggtatcaatctggctactgctgatacagtcgttatatttgactctgattggaatccacaaaatgacctgcaggttttgcctccaataaaatttttctacctttggattattactctttaatactaaatgttgataatggaatcccaaccctattatatcaggccatgagtcgagcgcatagaattgggcaacaagaggtcgtgaacatttatagatttgtcactagcaaaagtgttgaagaagaaatcctggagcgcgccaaaagaaaaatggtatactagttttagacatgcttagcttatgtttacatgaatcttttagcagtgcaatgaattcctttgtcctgcatcctcaccttcatgaaataattccacttcagcgctgttaccgattcttttgtagggatactttagcttgttacatagtcgagttttaattgcaaattctgttttatttatggggggttattctataatcttagtttctcttctttacttcatttgtgttgtcatctattcatgttgtaatatccatgtttggaagtcaatcacctgtggatgagataggttcaaaacccaaatttttacttgtatcactttgttatagcaggctgtaactttttttcgtccaccattctctaggttcttgatcatttggttattcaaaaactgaatgcggagggtaggctggagaagcgagaaactaaaaaaggaagtaattttgacaaggtaagggcatcttttgaatgtttgatttcctttatcaaggtttaatttctgaaagaatgacccattacttgtattctagaatgagctttctgcaatattgagatttggagcggaagaactttttaaagaggataaaaatgatgaagaaagcaaaaagcggctgttgagtatggatattgatgaaatcttagagagggcagagcaagttgaggaaaagcatactgatgaaacagaacacgaactgttgggtgcttttaaggcaagttcagttgttttatgctctttctgtctttagtttaaggtgaacctaatagatgcaggaaagcaaagcagcccgaggcgatcatctgctttgaaggctgcttgttctttatcaagatactgaaatcttctttcaagtggctgctttatgtgttctttttgttctttctgtcgtcaaaacagtttctaggcataaattattgaatccattttcattgcttatatttgtgaaatccttcactccactaacttttctctgcttttaggttgccaacttttgcaacgctgaagatgatgggtccttctggagtcgctggataaaacctgattctgtggttacggccgaagtaaaaattctatcttctataagaatatggccttctatgtcatagtttttttttttcacatagtcatatcaggtttttcagtgtctaaacttgtattacctttttataggaagctcttgcaccacgggctgctaggaatacaaagagttatgtggatcctagccatcctgacaggactagcaaaagaaaaaagaaaggatctgagcctccggagcatacagagagaagtcaaaagcgcagaaaaacggaatattttgttccttcaactccactattagaggggacttcagctcaagttagaggctggtcttatggaaatcttcctaagagagatgcgcaacgattttatcgaactgtacgtcaaaattatttatctaatgtttcattcggcatattttttaagtactggaaaaagtttgaattaaaggctcctcaacttgttcagccgcaatgatttcatggtttcggttagggtttccttggtagcagtagtttctatgttagatttgggtagttccaatattgatttactggtttacttagttttactccatgatgctgaactgacgattgttatatttctcattgtataattcaggtcatgaagtttgggaaccataatcaaatggcatgtattgcagaagaggtgggtggtgttgttgaagcagccccggaggaagcacaagttgagctatttgatgctttaattgatggttgtaaggaatctgttgaaacaggaaattttgaaccaaaggtaaaacttgaaatataaacatctgaaatgaaggctcttttgttttccttgttgttcacttggatatttccaatcttcctgttttctattctctgcagggtcctgtgttggatttctttggtgtgccagttaaagcaaacgaactattaaaacgtgtgcaaggactgcagctcctatcaaagcgtattagtcgatataacgatccaatttcacaattccgggtgttgtcataccttaaaccttcaaattggtccaagggttgcggttggaatcagagtatgtacaacctaaattcaatattatcatatcagcatctgtcttatgttttttatcctaagtctttttatcatttggtgttctcagtcgatgatgcgagattgcttctgggaattctttatcatggttttgggaattgggaaaagatacgattagatgagagccttggacttacaaagaagattgctccggttgaacttcaacaccatgagacttttctacctcgtgctccaaacttaaaggagcgtgccactgcacttctggaaatggtgcagcatattacttgctaagatttctcttggtaattaattttcgtaataaccttccttgaagaaatgattgacagtatgaaatttacttttcacaggaacttgctgcagcaggagggaaaaatacaaatgccaaagcatcccgtaaaaattccaaaaaggtcaaggataatcttattaatcaatttaaagctcctgccagagaccggagaggaaaatctggtcctgccaatgtaagtttattatcaacaaaagatggacctcgaaaaacccaaaaagctgagccgttggtgaaggaagaaggggaaatgtctgatgatggggaagtttacgagcagttcaaggagcagaaatggatggaatggtgtgaagatgtcttggccgatgaaatcaaaactcttggacgtctacaaagactgcaaaccacaagtgccgatctgccaaaggagaaggtctcattttatcttccatcgttaatagtcctggacttcctccgtctttatctgatctcatctcaaaattccttgtgtgtcccgcaaataggtacttttcaaaatccggagatatttggaaatccttgggcgaagaatagatgcaattgtcttagaacatgaagaagatctatacaagcaagatagtaagtaatgcaatatctggtcactttgcagcaacatttctgtttttgtaaaaagttgatgatagttggataaaccctgttagctctaagacagtaaaatactttttctcagataaccattttaatgcccatggttgtatcattaacgggaaatcaaaatgcaggaatgacaatgagattgtggaactatgtttcaactttctcaaatttgtcgggggatcgactcaatcaaatctactccaaattgaagcaggagaaagaggaagaggaaggggtcgggccatcgcacctcaatggttctaggaacttccagaggcaacaaaaattcaaaacagcagggaactcccaaggatcacagcaggttcacaagggcattgacacagcaaagtttgaagcgtggaaacgaagaagaagaacagaaaacgatgttcagactgagcgaccaacgataacaaactctaactcgctgggaatactcggccctggaccattggatagaagccatagggcacgtcaaaccggatttcccccaagataagttttctctgttctggtaccatacattatgctctgcatttgccggttgaactctggtttgatcatcgattcagaagctcaacaacatagatacccggaaaactcattttttttaaaaagtcggaaacacggcagcagtgttcggttttggttgctcatattggagattggcatacccgactagctgatgctgacgctggcttacccgagaaagccataactttgttattggcaaagagatagcacttaccagttaccaggtggtttgcttaggtataaatagttgtggatgtagtcaaagctgctggactccatttccttatatatttatatatatatatatatatatatatatgttacccatttggaatagagcaaattgtacattaccagttttgttaattttaatttacttaattttatgtgtttctcattttcacatttcgtaagttttaatggaaaaaggtacccacgccatcatttgtataacttttactatgatgtttcagatctctgaagtaatgaaacagtcgacactttggctcgaaggcaccatttcaatcaatcagatcaattttgaacaattgaaaagactgaaaaccttataggttttataacgtcccgatcaaaagtgtcaaactggtctaaatccattgttgcacgtcctaaacccttttatgcttcgacaatgctcacttgcacaatctgtagaggagtaagtagaagagttagtgaggataatcatattcgtcaacatgcaaaagaagaataccaagttaaccagttccaaaccattatatcagtcacgccaatcatgtcatacacataattcataccgatcatatcatttacgttggtcacatcattcgcatcgatacaacgaaacatgcatagattcccaatacataacactcaaactaataattttcaagattaaattacaaacgatatatattgatgcaacttaaataacaaacgtaaaaaaaaaacctatacacctattttgctacaaccgaatttcacatttgatgacaaaaataaaagatccgtcatctttagaaatatctctactgtctttgaccgacgcttttatctccggaatgcgaagcttcacttttctttgaaggattatggattcatcacttttcttatcatttttaaagacaagtttcgcttcatgtttttgggtatgtcgatggtctcatcaaaacaagaatctcctcttacatggtcttagttattaaggagtatcatgattcatggcttgctttcacataaaggattttggggtcttgaagttttttcttggcatttacgtaggtaaaatttctttaggaatttatctatattaacatattatgctcttgacatcaccctcgagagggccttctagctgccaagtcgacagtttgttctctggattcgcattgatccaacaaaacatgcatattcttggtcataggttgagggttatgactttcattgatcatgtttgttttagacaccttattgctactttgctaggttgattttatctcagtgtggaaacactaaaacaaaatgattccatatacttttatttgcatttaaatatctccaatgttgagtaataaagagttgtattctaacttgtttttctaaccaatttttttatgcaaaagaaattcaaacatcctaatcgtatggccaaatatagtttgtattttacaaagtctccatattctatacattcaatagatattcacctaaatatagtttgaattatgtgtcgtctagtgcaataataatcctaaacataaaacaagagagcgagagatagtgaagaagtgccccgaggattcggcgtttggtcgtgtggtctttgttgcaaaaacaggttgtgtggctctctcccttttatctccttatctctcctcttcccttttccacctcttatctttcttactttcttatattacaatatccctccctaattccattatatattttgttttatccccaaaccttttcaaagtcaactccgtctcccaccccactctctcattatataaatatatattttgccaaaaaattcgtgatggatcctaatcttcgtggatcagaatagtaacgtgcagttcaactgcggataaagtacaatgcagttctaatagtaacgaaaatatctacatacactgcaccgcacaatgcggttcgatcaccgttcggaaccttttttggaaacaactttcctactaagtggattcgaatcaaaattctcatctttcaaattaactattagaccaagaacctcttggtttatccaactatcatccttttttcattctgaattttacagaaaaaaatgtggtggctaagtaaacataggttgcatgtatgcatgacttactaatactattatcatggttccaatttttttattttatttcgactaatgtttttaagtgctttcatctttaaacaaaatctgagccttgtaattgaactcaattatatagttttggtaagaaattaactatgaaagatgatgtctagtcaaaggataccaagcttttaggagatgtattggaaaatgatctgagttttagttgagtttttatatgattttgatgattttaggaaagttgatacgaatttttataaaatcttttcaaatttcatctaaaaccgtataatttggatttctatatttttaactaaaatgtttttctcaaatcttctccaatctttcaaaattaataagaatcaaattgacaaaccgttttcaataacaataaatttttaaattattagtttaataacactaaattttattattaaaattattaaaatccataattagataacataaaatttgtaaattttacacaaatcacttaaaatactagattaaatacactcttcgtcaataaacaaatttagtaagcgggttatacggcgggtacactcaccaagagtttttaagaagattagtcagtggtaagagagtcttgatctctgattaaaaaaaaagagtgatttgattattattattttgaacacgacaaaacaaactaatgtggaaaaactgaaaaatataagagagaagaagggcaaatatgcaaaggtaacacaaatgcattgtgagccatacgtaagctcaaagatttttcacgttgctcttatctgccacgcggccaagattccaataaggcaagctacttgattgggataaactaaataacaaaataaactacttacaaaaacatcatgtaatttaaaataaataaataaaataaaaaaaagaaaaagaagaagatatattaaagaggtttgtgaagacgaaggagtccaaaacctccctcaggagcttccgccttattcagaggttaaacttctctcttccttgcaaatttacttcttcgttttctccgcttgtttgtgtctatgatcttgcctatgaaacatctttttatagtacacatatatgttgtcttattggaaatatgatcggctaacatatttgttattgttattaacaaaaaaaataacatttgttattgttcaccggagttgatagtagcaatagtacatattacatggtcatatatgcatatggctacatgtttgagttatattcgattatctggtgaaagatgagattgtgagtttgtaagtttttgacagtgtagaggaggatccaaaagaaaagaggaaaaaatggactatatgtatggaccagggagacaccatctgtttgtaccaggaccagtgaacataccggaaccggtaatccgggcgatgaaccggaacaacgaggattaccggtcaccagccattccggcgcttacgaaaacattgttggaggatgttaagaagatattcaagaccacatcagggacaccttttctgtttcccacgaccgggactggtgcttgggagagtgccttgaccaacacgttatctcctggagacaggattgtttcgtttctgattggacaatttagcttgctctggattgaccagcagaagaggcttaatttcaatgttgatgtggttgagagtgattggggacaaggtgctaatctccaagtcttggcctcaaagctctcacaagacgagaatcataccatcaaagccatttgcattgtccacaacgagaccgcgaccggagttaccaatgacatctctgctgtccgcacactcctcggtcattaattcctcacaaataatctgtttttcttttgtgttttctctgttttaaatctcacttacattagggtttacatacagatcactacaagcatccggctttgctgctagtggacggtgtttcgtccatctgcgcgcttgatttccgaatggatgagtggggagtggacgtggccttgactgggtctcagaaagccttatctcttccaacaggacttggtattgtctgcgccagtcctaaagctttggaagctaccaaaacttctaaatctctcaaagtattctttgactggaatgactaccttaagttttacaagctaggaacctattggccatacacaccttccattcaacttctctacggtcttagagctgctcttgatcttatctttgaggaaggacttgagaacatcatcgcccgccatgctcgtttgggaaaggccaccaggtaaatgaatcatataaaatgaatacacttagtcctcttcgtaatcttgattcttactagtacattgactttggaaaacattatagctagagtttgattgttaatgatcatgtacataggcttgcggtggaagcatgggggctgaaaaactgcacacagaaggaggaatggataagtaacacagtgacagcagttatggtgcctccgcatatagacggttcggagattgtgagaagggcatggcagaggtacaacttaagtcttggtcttggtctcaacaaagtggctggaaaggttttcagaattggacacctaggaaatgtgaatgaggtacatatcgagatttatcttagtgtaatccaattttcattgaccaaactcttatcaaacaatacaaatcgaacgcagttgcaacttctcgggtgtcttgcgggagtggagatgatactgaaggatgttggatacccagttgtaatgggaagtggagttgcagctgcctctacttatcttcagcaccacattcctctcattccctctagaatctaatccatgtggtccttctctttctttctcttcctctcaatgtaaacaaactctcatgttttctcttttcttcatctatatttttactacattatctatgtttttatttgctatctccaacaaacttattgaacaaaagatcaaatatgtttattactcactataaactttgtctcaacaacttcaacttatatgggtatgagggatgctcttacaatgttagtggaacataactcgagtctaaaactatgtttgggatgaggatactcgatcgtcaagtgaaaaaagataattttgatctctcatccatttatatggaggttggtttaaagacactatagtcgggagaaggtgtcccatttcgcggtatgaagtcgaagacgactgagatataaggtctacatttggcggtatgaagtcgaagacgactgagatataaggtctacatttcgcggtatgaagtcgaagacgactgagatataaggtctacatttggcggtatgaatcaagaagacttatttcaagaggggtcttatctgtgacaacaaaaggaaactcttgttgatgctttcttatgcctagtcagtaatcacaatgttctgcatatacaacctccatattaataagaaatattgaaattctttaaaatgtatttgcgtcttaacgcttttagtttaaacactttgaccattgacaaaatagatttatctcttcttttgtatgaacgttatgtaacacccaacttttggccaaacctaaaaaaattgagttaaattatcaatgagtttcgatacgctattactcaacagatttaatctttatacatcatgatgaatactttcactgcatagcattttcttttaaaaaagattgggttaagtatattgattttaactaattggacgtcgttatttatgaaccatggctacgtacgtacggatagctagagtaaacccatagcaaaccaacggtaaatatttagacataatagcacttattcttattcaatcaactaatatggctatatatggacattgacaaaaaatttgtagccatatcatatgatcataagtatgatttgaccatgcctaaaagattctaccatagacagttcaccgatattcctagcaaaatggaaagggatgggttaagaagttggagcaaaggttttagtggacgtaaagaattctaactatcaatttgaactcgtaagttttgttatttttattttgttttttgtactagcaatcttttactttcttagaacgcacatagaactaaacagaacttccataagtcaatctctataaactctggaattatacagaaaaataacagaaactaacctaaaatagtgaaagagagtagagagatctaaaaatatcgcaagaagatcaatgaaagaaaatagtagtcaacggaaagtaatgcaattgattcggtgttctaaaataacaaaaaccaaaacaagaaattaataaacaaaaaaaacaattctttttttgcttattattatttttgggtgtctttgtcaatttgcttttccattttcatcttcatgcattgctttccttcgtcgtccttggaggggacgacgacggatctgtctttctgtctactgaaaatccaaatttcatcctctccatttatttaactttttcagatttagttttgtcaagaaaacacaaaatgtcttttcttgcgccttgtcaaattttggagctgaatattatttcggcccaagaattggcgcccgtggcacggtgtatgaagacatatgcaatcgcttggattgatccagagcgtaaattgacgactcgggtcgacaatacgggcggaacaagccctacatggaacgacaagtttgtgtttcgtctagatgaggaagcactctacgatgccacatcaatagttgttatagagatctatgcattgcattggttcaaagacattcatgttggaacggtacaagccttaataagtgaccttgtaagcccttcttcggctatgagattcgttaccctagaggttcttcgtgcctcgggccgcccccacggcctcctaaacattgcggtggggcttatcgataactcaggccaaagcatgcctcttttgtttgaagaagatttgttgtttcacaagaaaaacatatcttcaaaacccgtagggcttcgacggtcaaaaagtgatacaagctcaatggtggattcaccaaggaaggtgacacaatcccgtgtgagttctactacaaactcaggatttgataaagatgagttttcttctgactctcaaatggttgtgtatgagccccaaagaaaaacgccgaatacaatgaggcaaacaaagcaacaactcgtgtatgggacaccgatgaggccaaggaaaacgacagcatatacccccaaaaggaacacaatcgaatatggaacaccaatgaggtcaagaccaatcgttattacagaatctgacttaggtccttcagcctcagtagttgctgcccaaatagcaaaagagaaagcacttacagggaaagatgcggagagtactgtgataagtgttggtgaacgaagtgtcgagggtcttcgttctaagttagaaagatggcaagccaatttaccagtggttttagacgtggggtcaagttatcaaccaagttctgactacaaaacaaactctaactttaaccctaaatcaagttacaagcctaacgaaatcgtcccaagaaatcctcaaatgattggagctcccatccaaaagccaagtgggaggaacaagaaaagtggagataacggattgttttcatgttttggtaacatttgtggcattgagtgttctattgtttgtggtggctctagtggacaaaaagcagccaagaagaagaagaaaaagaagtgataaataacaaacatgattccttcaattctaaatgattcatttctcattatgtttctatttttcaagcttgtcgattttgctactcaataatccaaatttatatagtaagacatggggaaaaggtacattaattatttcattacattttttaatagtaaacatgaaaatttggtttaaatcgttatgatttcaagaatattaaaatgcttatctcaatcttttttcattaatcaaaaaggtgtacatgtagatttcttatttaaagaaacaatattagattactatgttaagtcctacataaagcgccaatttttttttttttttgatattactattgtcaatatatatttgtaattcgctttttgtcttgaaaaaactcaatgtaaaccacaccgctaatttaattacttggacaggttgtccaaataggttgaaaaagttttacagaggtctctaaacctaattttacatctaagaccacctccaatggtgtttctaatggggctcttagcctaaaaatcttttaaaaaagccaaaaattaaatcaaaactcaaaataaagttaaggaatgtttcttaattaagaggttttagagttgctaagaggtgctgacgtatcacatctgattggttcgacattttgtagtaacatttttggattccattaagcctaaaagaattgctttctgcagacgggaaaggggttatccagtatcgaaacagtcgttatctagcagcggatctccataccaaattgcagctccagtgagctagtagactccaaaagatcagtcttatttatcctggaaaagtttgttttaactgttctccaaatactaaatctttgaaacattatgatttgttgtctctagtttattgctcaattgatcgaatatcttctatatcattttttccatgagtctctttaagtgttttcagaatgtgtatatcaacaactaaaaaccaaacttcaattgtctctctctagcattcttttcaaaagttcgaaacaccaaacaccaaaaaccaaattttattttcaaaattttcagaaaaattgtcaaatgaatctttctatactttgtcatatattattgtcatgaatatttgttattcaaaatgtgtttatcaagaatgtatcaaaaacttgtatagtttgtcttctctatcttttttttcaagcaatcaaaactcaaacacgaacttttattttcaaaattttatttcttaaagattcctaccattagccatgaatatttctaagatatccgaagcaaatccttaactttatatttatcaaaatttacaattataaaattcttaaggattccctaaatttacctaccattggagatgttctaacactttgagctaaactattcgttttggtatatattttttcgatgttgttaaagtataaatgatgttaatttttgattttttttgaaaagcaacaaaaaattaaaagtaataaaataataatagtaaacaggaatgtcaagatagtagaacctaccttacggtttttagtctaattggtttgattcttagaaagtatcattcattgttaatcgatattttacaatctataccggttctagagcaaaagacagaagtaaaacgatggctgacagtgatccgagtgtgatggctactatcccacacggccacggagacaaaacatgtcgtgttctaattttatcatatgataaaacaaaaaaatcaaaactcataacacgtacaaatccataaccaaactttcctaaaatatccaattctttggtgctatattattagtttaggacctattataagtaagcaaaagtctttgacaatgtaattaattactattatttggcaataaaagagacacaatcatgaaagtcagctaaaattgagtttaatattgaaaaccacgcctcttaaaatatcgaaactcagattagagtgagggatatctcttgcgatatcaattactcgggatatcgttgtttgtagatggatcatgaaaaaaaagacgataaattctcttaataaagattagtaaaagcagttggctcgatcatactcttcatgaaagtcgttgcattacctcgtaaaccaacaagctgggggctaactgttgaggttggattccccacaagcaagaccgaaccaaacagtaagaacagtggtcgccttgtggacaaacagactaacggccctgagccaaacggatcacctcagggacttaaatcctagaaacgcagtccgagccgatcgagaaaacgctttgggaaccgcttgtatcgcctcgggagatagtcaaccaatttcaatgaagagtcatccagcatgtcccgagccagaatacaccggttgcccaaagcgacctctcgaacgaccaccgagccatgaaaaatgcccgaggcaaaaacttgtgcaaatccaataatgttcaaaagattatttccaggaaaacaagatgttggaactggatttccctccaaaaatccacctgcaaaaatatcaggccaccccaataagcccaccaagcccaccaagtaagaggacctgcacaactgatgagcccatgtacgtaaattggtatttgggcctgacaagcccggtcacctgatgaaaggagataagcgaataacaacctagaaactaatagggagatatttgcggagcggacctgatatctcggaactgacctgccgaatatctaggagaatctccgcggatctcggacagagctaccacgtgcgtagacctatatgaagaagcaagaaagacttggaagacacattcattcagcttaacattcacacttatacttttacacttgtaatctcctttcacattgtaaaacctctgttataatcaatacaaaagtccattcgttcttagcaatataaatctcaaagttcttgttaagatctatccctcctttctcataattctatttacaaatctctagtgtggatttcgaaacccacatttggcgccgtctgtggggacgaaaatagatccttccaacaccgaaactaacacatctattgtgaccaacgatcatggatctgaattcatccgattcaacgagatctggcgtaccagttcagatcccaaacgacaatgtcacggacaggcaccttccaacggatctccctcttggaatcgaggccgatgctatccatgacattgatgtggagaacatctcccaaaactcgaattcttctagatctgaccaaatcctccccccccctcgcaaaccagggacggggagcaaaacgtcacgatatagcctcctaacggagataacccggctaacccttctgagcaggtccctccgagatctgccaatgagctagccgagcttcgcacaatgatcctgaaactgatcaacataagcaaaaatcaagaaatccgcatcgcaacctcgccgcaatagtgggtcagcagaaacgtgactcttctcgcatggcgcaggaggtagagcgtgataccgcatgcaaggaaattcctccccacaaaaatgggatccttgcctagatccccatagatatgacatgaaccgtctccccaacagatcccactccaaggactcgtttagacttcgcctcgatagaggtctcacctcctctcaaccggcaggtcgcctttttacaggcacccgtgcacactctcgtcgaaaacccaataacagggactgagacaggtacaacgcctgctttcccaaggctaccgctcccacctgtgctaccactaggctactcgcccccgaggtacacatggacgagaaaccagacaaccgggagctcaacgcaacaacggacctctaccattaatccctcatccattccccggatacaagaaagtgacatccttaacggtccaaccaatcctcgagcaccaatcgaccttcgtaacgtcgtggatatggaaacattccgcaattacgcagctcaaacaaacgcgaacatggctcaaatgcactcacgaatgcatcttgcagtgagcgatgcttctgacatagatcgagtgagcgaagaaaccaggcgcaccccattcacggataggatctcccattgtcgcatctgagacgtcgggagaatccgttttccggagtacgacggaacgagcgacccaaaggctcatctgagagccttttgtctggctataacacgagcgtacctgacagacgaagaaaacaaaacaggtcactgccgtttcttcgcagagaaactcgtagatcacgccctcgaatggtttgctagtcttgaagggaactctattgataccttcgaccagctcaccgtcgcctttt

SEQ ID NO: 215 - DNA, 24978 bp, Arabidopsis thaliana
aaaaaatgaaagaatatatctaaaagtttttatctaagaactattttcttcttttaagagctctttttgttttgttttttttaattcttattttgttttaagagatttttcaatattcttaagaacccatggatggaaatgctctaaaacttttgaccttggctctgtccaaacgttacatgtgttactaatttatgaaaaacaaaactttgacttaatgccttacattttttttgccagttgcttcattacaactttactaactcatctcttgtaaggctcaaaaggatatctctgaaactcagacccgaaggttatagattcctcgtcgagtttcttcttcaacctcctccaagtcctcatcttattagactgtattaatcctttatacaaagtctcaaaagttagcttttgtggtaagaaacctctctctatcatctccacaaagtatccacaagcctccttccatttctccttactacacaacccatgaaccaacgatgtgtacgagtccaaatccggacccgtttcacttgctttaagatcatcccatatctctttcacagtctccatcttccccaaattgataaacgtacctaacaaaacattatacgtctgcgtacttggcttacacaatccattcttcatcttcctatacagattcatcgctccattagcatctttccttcctttgtactctttaaaaaaacaattgtacgtcgcggaagacgggctaatcccgctctccaccattgtttcaagcaactcctccgcttcctctaacctcccacaagaacacaaacatttaacaaccgatgtatacgtttcaatcgtcgggctaatccctttcgctttcatcaatttcatcttatccaacgtcaactcagctttatgagctcggctatacatatgaagcacgatagaaaaactcgtaacatcgggctcaatccctctctgacgcatttcatcgaacaccttctctgcatttctcacattcctctcaaatctctcttccggatgcaaactcgccgtcctacaaatcccgttaagcaatacattatacgtaacaacattaggctcaatcccagactcaatcatctctaccaaaaacttctccgccatatcaatcctcctaagcttacaccaaccagcgatcaaaatagtgtaaaccttctcatcagaaccaaactcttccttcctttcattaaaaacaccaacggccattttcgtgtaaccgtatttacaaagcgtatcgagtaaaaacccgaattcgactaaacggaaacgacgattctcgagaaaacaaggcgcatcgtcgaaagcacgaaccgcttgtcgagtaagcccggcggcgattaaccgtttaacgaggattaagaaggtctcaggagaagtttgatccatttcgactataagttgtctaacgacgtcgaattgacgaacacggccgaggatatcgatgatgagattgaaagaggttggtgttgttgaaggagagggtaaggagcgtagatattggaagaaggagagggcaattttggaattgtgacggagacggaggagggtttggtggatgaggttgggagtgagggagatgccgttgagttggagagatgattccatgaagtggaatgggttgtgatttgttattaacatttgggagattagttcggcgtcggaggaaggttcgagttttgggaggttgagagtgaatccggcggagatgatggtggagatacggcggcggagttggtggagatggaacggtggtgagatttgcttcagtagcagcattttgccgtttctcttgcagccacaatctcaatataactagaaaagagaaaagaagagaaatgagttatagagaagacggagaaggtcggcgaggtaaaggaaagacgatcaccggagagcgagttttggttttggatgggatcgttggctgcgagagaaggcgagaggtctcggggagattttgaagtgagagaaaaaaaaagcgtttggagaaaagatagatgggttttggtgaattaggtgtataaccaaaattaaaagtttaattaagaatataatattatgtatgtataaattaataaagtagtatgtaagggttgagaaaagataattttggggtggagtagtctgcgagatgatttagtatcacttcatttagtttttactcatttgtatatttttgttatatatcttttctaaaaaatagattctaattctgagatttattaaatagaaaattatgtttttttctacatacaacatagtttgaaattttaaaatcggaattgtatttataaaatagtaaatagtttgtaagtaaatttatattgtactatttatgatgcatagaaataaaatgttgtactatactattttcagatccccattgaaaaactatatcctgagagatacaatattgggaacccaagcaagcgaggtaaactattgtggtgacgttgacgatagcgataatggtggggttgacggtagtaatggtgatgatgataacgattgtagtggtggtactaatggtaaaaatgatggtggtagtggcggcaatacggttatagcagtgaactagtgatatggataatggtgaattgttaatggaggtgattgtttaataaataggtgatagttgtattataaattttattatgtgtaatattttttttggttagaatagaatagaagtaaaaaacattaagaaaaaagtataataagagagaagaaaaatacgttatgagagaaggaggagagagagatggagagagagaggggaaagagagggagagagaaggggtaaaattgtgattaatacacaaaatatatagaatatcatcttttttttttgttttgatattcttttgttaattaaagtttttttgtgttatatttgcaaatttccctattctttttttttgtttgttttattgataatactagtattttacccgggacaaaaaactaaaatcaaatgcaatgtaattttacattattgtaatatttttgataatcattcaacagattattaaaacctttagttctacaattaaaactaattatatatattttttgcatctaaagattgaggttgataagagagcagtagagatcccatcataaagggtttggaaaataaaagtagatctttatactatctacaagtcctagttatttttctgttttttagataatatataaaatttttatagagttaactaagaaaaattagtttaacaactaacaaattattaacaacatattgcaatatttgtatttgtttattttgcgcaacaaataattaacaacaaaatgcaaatatttgtatttgttgattaacaacaaaatggtttaaactaaaaataatttgtaatttggaaaatatgagtataataaaatcacaattaatatgagttaaatagcaaatgaatgaataaaaataaaaattaagcattaacctgaatagaattttcatagtcgtttctttagcatccgcaagagaaaaaagatggaagataatagaaagaaagatgaaatagagaaaaatttgaattaattggaattatatgagggatgaaaaatcagtgaataaagcatgccatgattttagcttgatcgttgaggggttagtaggagcaaattaaagaatataggtttatttttaaagattgacaaagtattttacaagcccaacaaggcagcccaattataacaaaagtttctaagtctaagcaaaatgctaaagatgaagatacttgataactatttgtaagtttctactttagcattttgcttagacttacaaacttttgcatattagggcttgactggtttaaacggcagcggttgcggttgcggttgcgggagtttgcgaaagcggacaattgcggtttcaagcgttatttagcattttgaccgactggtttagcggttaaaaatgggtgtgtttgcgggagatttacgactggttaatcagcgagtacaatagcggttaaaccattaccaaattttttaatatatatgattttaaaacaaaaactaaaaacaccaaaaactataattatgaaaaagtataaatttttaaacataagaaatgatcaaaaaccataaataattattcaagtaaattttatgttgaaaacaaaataattattaatattgaaaatttaaagttagatgaaataaatgtgaatatatttaagacttgataatatatcttttaacttaattatttttcttttttagaattttccattttttaaatcaaatgcaaccgcccgcagccgcaaatgcttgcgggaaggagcttttgaaatcaagcgatctcgaacggttcaaagcggcatggagcggtttttatgattggtaccaacggctaacaagcgctaataaccgcaatcgaccactaacaaccgctaagcgggttttagcgggaaaaccaatcaagctcttaacgcaaattcaagtatttaagtgcagtccaattaatgcaaattcaagtacttaatgcaaattaactatggacacatgttattccaccaacctccatcgcacaagagcccaactccataattgcaggaaatcttatcttaacaataaaattttgtttgctcacctgggtaaaagggacaatcatcaatcaaccaattttaaccaaacgctagaacttccagcaaattcgggtaaagagaaattgattaaattgaagagtccataactgattgtctagcatattgaagctctggataccatggaacaacgacgaaaaggcaatcaacatcagcatagcaaaagaagctataatcaccaaacaaaggcataatcgaaaccataaaccttcttgagtttaggacaacgacgaagcggcagatccaacaaagcaagccatgagagaaatcgcacccgaaacaaaaacagtaaacatgaagaagcaaacggcaaaaaagccgataagaagccgaccatcgccgctttgaaagccatcgatgacggacgagagctggctaacaccactaaaagagtgaggagctgccagacgataagcccgcatactcgggatatggaaaccggaaaaaccttcggacgacaagagaattcatcaactttctctctctaaaagatttttcagagaaatgagagattgggttatcggacgattaataatatctacatatacatatttttttgttgactttttccccaaagatccctatactatttactaataacatacaagcccttaaaattttatttcaaccaaattttttatttctaaaaacttacaaatcgttaatttgcattaaatacctgaattaactttaacctaaatttttatccttagttaaatctttctttattaaactatattcgattaacgctaatttcctaaaatctttctatcgacattaaatataaatttataatttttttgtcactatatttgttcttatatctaatttattttgactttatatataaaatacatatagttaattaaatattagatttttgtgcatatgagataattcaaaacagacatataatactcaatcgataaaaaaaataagtgtacaaggtctcacattgtttaaaaaatttgggaaatcatttagagtcatactataaaaaggaccaaaatgattctgaatacgaatgagcaggaaccttcatttatcagacatccaaaattaaaagtgttattcggtttactccagttatttattttaaacaacaaaaactttaaaagtttcaaaatattatatatatttaaactttattaaaagttaagtattaaaattttttataaagttttaaatattaataattttaaaattttatgaagttttaaattttataaatatttgaactttataagaagtttaaaaattataaatattaaaatgatattaatacgggacgatatactatgtaataatcaatatacaattatgaagtttggatcgatattaaaatctttttcaagtttccaatattataaatattcgaacttcataagaaaatgacaaaatgatgtttaatcacggcacaggttatatggtaggacatgtttggatcgatattaatatgggatggtatactatggatgaaatcttagaattaacaatcaaatacaattatacaattttaaacactaaacaaaaaacattatattaacaaaacaaatataacttaaaatttcaaaaacaaatagttataaaaatcttcatgaagtgtatcatagtatcatacataaaaaaaacaatagcatgtatctatagatcatcttaaaaacaaaaaaatctatgggtcaatctctagataatacaagtttaaaatctttattacctctaaaagaaccaaaccacaaacaaaaaatattgaatttgaataataaactaatatacaacaaatatcataacacaaaacatgaattaccccagctttacatagataaaaattatgtgtcaagaatatattattcatatacaaatcataatttttataaaaactatttataacttttcaatacacatatccacgcacggtacaatatctagttttgttcataatctggacacccatgtgttgggagagcgtgttgtatgatgaaaacataagttagttgcacgaacatgaatagtacacatgcagtctcttgtcttagatggagttattcgtattagaagaggtaggagactagctaaagagatacaagaaacgaaagccatgttattagtagatactatttcttcctctttgttgttttcttaaaaaggaagttgaacaaaagaagaatcatacaaaataacagcgatacggttacacacaagcaagtatttctcttttgtttgggtgacttgtattttcgcaacaatagccactttttttttgccattcgagagaatgcatgcaaggttgatcaaaatcattggagagttgatgctacactgtacgacttcttaatcactcattaaccacatgctccctatcttctacccactgtggattggattctgccaaggcatgttccaatattttccctctcttcacatcttgagttcttcttcggtttgattcaagtgttatgagcagagctgttatgtcggcaggactgactccacccactctgcttgcctgcccgatcgtctctggtctcacctgaatttataattgtttcacatcataagaagataatctataaatcacactgattctactcgaaaactactttaacacacctttgaaagtttttcacgcccttcatgggatagagttgtcatcgaatagtaatccaaatcgtctggaagtcgtctatgttgttggtggaccatctattaaggatataacttataactccatgtccatatatccgagtaagcaagtagtatttaatggagtaatgaagctaacacaagatacctgctgcagttggttttgctggcgaacaatgaaaccttcatattttatatcgatctctacacagtctttctccattctagataatgtttcatttccaaagccatgcttctcaagaagcttgtagtggatatgtggtttctttaggagactctctagtgtcgctgattctttgactggctgagaagacacactagaaacttcggcagccaaatcacctactgcaactgcaagcaatacactcatcaactcatgcattgcacctaatccagttttgtcaagccttaaaatttttgctatcccatgtttaaatgtatgcagggaccaacaacataagttcgttctgaaataaacagaatacggagataacctgaaatcttgacagttttcagtctcttcttctcttctgaaatccttgcttgcttctcttggtataacttccatcgtctatcatctatcaatccaagttcacgccccagaggcgttagtcgactatccgcattatcaaatcgaagaagaagccgatgttctgaacggctgtcgttgagaaaaaaaacacatttgattattccgtgttactaaacacacataagtagtaataggctattagtacatgcacaaaatagttcacgtggaaaagaaaaaaaaaaaaagttaaaacaagtcatggccatatagccgcatcaagaaaagttaaaaagtcaagttttattccagtactgccagcgaggtttttttttgcttctctcttcagttcccccatacaagctcttatgtaacgcagaaaaattggtgatgaaaaatgtcactgttattaccatcagacagacttagatgggtaccgcatacaaagcgaatgttatgaaaaaacatattttctttctacacagatgtcaacttctaataatttcggaatcatatctctagcctgcctgaccatatttcagaaagtagagtggaggattgatcatgaaagtataaaagaatgcaggagaattaggataatgaacaagagaacgaaatggaacttaccttgttagcatgcggtatggctctctgagatcctttgtgactaaatcatcaatcaacgtacctatataactgctttccctctcaagaacaacgtgtttcttaccgtctgcatgtctggcagcattgattccagatataataccctaaatttgaaaagaataacagagaatgctatcactatatatgtacaaagtctaaacagcagttttcattatagtattcgtaatttttttccatatcatccgaataaacctttttcatgaactcaaggtccataattaaggaaattaaaaactcgtacagatcagtcacctgtgcagcagcctcttcataaccagttgtgccgttgatctgtccagagaagaaaagaccttcaatcttcttcgtcataagggacctggaacactgatgagctggcaaataatcatactcaacagcataggcaggcctaagcatggagcaattttcaagtcctggcaagcttcttagaagtggcaactggagattctctggcaggccagttgaaaatccctacgaaaataccaaattaccaattcatgagaatgctagtgatatcaaagacattacactcataagaagatatataccacgccttgataattagcaacaaagctaagatatattttctctagtcttgaaaactcgacttacaaacgcccacattaaaccactgagcagtaacaaacttcaggcttgctcttactatacataaggaaatttctggacaagcatatgttttagatattaacatataggcgacaagctaggtttctttctcatccttcacactttttcactaagacgataacaaaaaatataaaacataactaaggtatgcatcaacctgcacatagatctcaggaacatctcggccctctggttcgaggaatatttgatgagactctttgtctttgaacctaacaatctgaaaccaaacaagattttttaagttcatcaaaagcagtttaaagagaaagatggttcaacttattctttgtgccaactgtagaaaaagcaaatgcaagattgctttcaggaattagaagaatccacgtcaaaactagagaattgaagggactttcaggagtttgcaaataaaaaatgatgaaaaaattatagcagtttgcaaaaaatcagcatatataatttgctaccgtgacatcatccaagctagaaacaataaagtatatttaaactgaaacaatttagaaacgattactgctgtataactccttgagaaatgactcacacttactggaccaagaaaaaaagaaatctaaggcaccattgggtttattctagggaacctaaactttcccaataccctccaaaaggcctcaaagccaaccaaacattcaacagtcccactgatctgttccatcccctattttcactcatgcttccctctaaggctgttaactattttgctaaccattatgtagcagatgaactcttgtctccttataaaagtgttatcaatttatgtttgcatgttggagaaggaaccagtcttaaaattactatgtctagcaaatttaggtttccatggttatgctcacaagccacaattagattccagtatgtggcacaaacattaccaatcaaatgaaaggtagatgaaccatgtctgatgtaacttccccttgtttaaagaaagagacaatacaaagcaaaagagggaaaataatttaccttgtcttcaatggaagggcagtacctaggaccttttgcttcaacccatccaccataagttggggtctcatgcaaattatctctgatcaattggtgtgtaatctttgttgtgcgagttaggtagcagcacatttgctctctctcaatgtgaaaatctgggtcgaaactaaaccagctgacctggggaaaaaaaactaatgttcagcatcttcaaatacaatatataaagcgccaataaatgtggtcaaactgatctcgtcaagaaagtatatgaaacttttctggtaactcgccgactgagatgctttaacccatgtaaccatacaatattgatcatgaaaagcctactttaataattgtagagtgatacctcttcgtctccatgttgagcctccaaattggaaaagtctatagtccggcgatccacacgcgctggagtaccagtctttaagcgatcagtttcaaatccaagtttctgcaaattctctgtcagtccttgtgaagctgactcgccagctcttcctgctggcatagactttttaccgacccaaatcttcccactcataaaggttccagtggtaagaataacagaaggtgcataaaagttcatcccgaaaaatgtggccacgccttccacgttgtcattcttcccaactatgatatctgttaccattgcctctctaatacagagattttcggtgctgtcataccaaggaaacattacagttatagccagaatagaagaaatcaaaaacaattgtttacaagaaacatatacaccttgtaattcaagtttgtattcttgccattactcgtaataagtaaattggaattttttagcatcttacaccagcttgaaaattatattgcccaaaaatacatgtaagcaagaagtaaacttcagctgacctgtccactatctttttcatctccgtagcatattctcttttgtcagtctgagcacgtaacgatcttacagcaggaccccttgagacattcaaaatacgcttctgtaaatagcatctgcactgttaagatattacatcagcggtaagcgtttgaagctcattagatttgaggcaagctatatgatcactcaaattgatctccttctcataactcttattactcatgctatcataggtacaagtcaaacaaattcgtttgatgaaaacaattctcaaaagctaaaccccaaacctcaatgcataagccaagaggtttcattgagataagaaacttgtatacaattacctgtcagcaactttgccaatatcaccaccaagtgcatcaacttcatgtactaattgtgatttagctggtccacctactgctggattacacggcttcacgtaacaatatgtcacactcatataccacaattctaacaagtatgtaaccaattatgactaaagtcaaacctgccaagctattcgatcgaggtttaatgtgagaagcagagtactagctcctaatcgagcagaggctaaagccgcttcgcatccagcgtgtccggcaccaacaacaataacgtcgtaggtcgaatcagaggtagcacctacagattaatattagtcgtctaagcaaatgttggataagttcgggtaaaaattggagatgatgagattgtaacctgatgaagaggaactgaaacttgcggcgagtggacggttaaggaagagttggcgagggcggaggaagacgcagagacggggggagtgaaaaggtatggaggaggaggaggagaagagaagagatgggacaatagtagggaagctgcggaaatgtcgaagactcacggtggcggtggcggcggcggcggctctcatctcaaggcggaggttgtgacttgtgatgtgagtggtcggtagcggagtgacgagctttgtggtgttttttccttttttttttttttttttttttacagcaaacgtctacggtttttttttttttcataagtattaccctttttattaaaaacagcagttgtaaacgatacaacagtggaagaacatccactttcagagtttgacacacacttttaccacttacaacattaaattatctaactagagagtcatctaagttgtaaagcaaaagagtatagtaagggtaattagagcagagcattacaccacataacaatacacttcgggtatgccaaaaccaaaaagggatattaggccataccatcttcttcatatcttgtggctgcttgattgaattgaaagcaactaaatcaaaaaacatgacagaattataacagagtgatcaacgcttttttggaggtttcagaatccctccattcatatgctcatcttcattggactttcttgcatcatctttaaacttgggaccacccatgttctttctttttgatgaatcccccttttccaccgtgtgaacattctgagtattctcaccttgccttgatgattcacctacttccaccagacgtggagagtgtgctgcaaatgcaggtccggagaaaggctggatgttagaatccctttcatccacatttcttctaagaggtacctgaggcaaaggacctgcaaagtttggtaaagaggtagctcttgtatgagggtaatatgcagccaccaattcatcaggatttaaaggaggatgaggaatccttggaggtggatcaataggagtaggaaacgaactctcagacatttgagattgtgaattcattgaagatctcagattttcatctctcatgaacacctcttctctaacattcctttgagctgtagtgttagtcaccctatggagagactcaatctgcctgtaaagacatgagttcctgtgatgagtcattctgaagcagctactacagattctcctaagtctttcatactgaaagctaatcagagcagtctcaccagaatcaaaaatgattcttaggaaaaacctcaggcgatctgtaattccaaaccggattctcacacggatataagctatttgagtcgtagtggagtcatgaaaatccagagtgatgatctctcctaactcatgtgctatctctaaagcagtttcctcacacacatacaaaagaggaattccacgcatctgaacccataattcaatagatgttaacaggtgaaacgtaagatttacctcccatctctgagctgtcacaaaccagttgttatacagccaaggctcccttcgtagtactgacaagagatcaatctcagattgaaagatgaactggacaaacgtgtcattaaggacccggccatgcactctattagtcagaccccatgctcttggtaaagccgagatcacagcgtgaaggttctgagagcgaggattaagaggtctagctatcagactaagccgattcctagactccacaatggcataggcttcatgcggaataaagagagcaggatcctcccttcccaactccaagtgttgtaactcatcccacaactcgtctgccatagcaccagaagtgagagtgaaagtgaaaagcaagagaaggttgtgatactagcttaaccttaagagacgcttatatagaacaacctaaagtaagaaaagagcgagacaaacaaaaactcaagctaaaagacaaataagactaagtcaaagataaggtaaaatctattaattggaaaaagaaaaaccgtaaaaaaagaaggtttatcttaaaaaagaataaacaaccacactaaaaaacaaatttatttagcttaacctaatggaaacctaaaaagtaaataaatctctaaaagcaatcataacacaagaggacactaagcgagaaaacaccgacacctaactaaatatcacacacgacccctaacacaaatcacaacctttctgctattcaacacctttcctcatcaaacagtaatcgcagccagctaggacatcccctagccacgtaagattgacatctaaaaccagtaacaacattttgtgcaatcaaggaagcacctctatttacactcaggaggttccaataacaaaaaccaatccggtttgtccttagtgaaactcaaaagctcagcaatatgtccagttaatataggccattcctttggtttgttcagagcactaatgatttcaaaagaggaatatccaaacgtgaccttatcaaaccgatgatctaacatgctacttagagcccattcccaacttcttgattttgcatcagaaagagaatgtacctgagcaaatgaccggcgactatgcaataagactgaaccctggtcatctctcaccacccaagatgcaccagaacaaagctgctgcttagaccatgcaaagccaatattgcatttcaactcgccctttggtggtggcctccacttcttactagatacttcctttggctgtgtatcagactttaaagtctgttgtgccaagagccattcatgacagtcttcataagctttatcgtttagacaatttggcaatgaaccaatcccctcaaaaagaagcttgtttctgtttttccataaaatccaaataatccaaggaccaacacaccgcatatgaggagttatgagactattctttaccatatcaaagacatggcaaagatttgtaaagattgaacttccaaatccatgtaaagcagatggcactaaagaaagagcccagacttgtctagctacaggacaaagaaacaaaatatgattaattgtttcctgctcagcaccacacaataaatatccctcatcagcttttactcctctacttctgagtctatcttctacagctactgcaccattcaacactttccaaagaaaaatcttaatctttggagcagtttgtagattccatacctttgcaaacagggggttaagtgtaggtgtgttctcagcctgttgaaacatcttgaagtgaatctttcgactcataaactcatatccagatttaaccgagtataaaccattattagtataagcccagcagtgaaaatcttcacaagacatcataggtctatgttgtagaatgatctggatatctttaacaagaaacaattgcttcaacaaattaacattccaattccttgtcccacgatcaaaaagctgattcacctttagcgtaatgtccattagggaatgattattcattggtcttcgaataagctcatcaaatatccatctatcaatccagacatttgttttctccccattaccaataataatccttaaaccctgagtaagtaattcccttccaaaaaggatacttcgccaagcataagaaggtcgtgtgcctttcggagcattcaaaaaatctgaattcaagaaatacctgctcttaaagatcttaaagaaaagattatcctgcacattcagaagtctccaagcctgtttggctaacaaagcttgattgaagcattgcaaatctctgaatccaatacctccaagtgacttaggtagagtcaatttctgccaaccaacccaatgaatcttctttgctgttgtcacagtattccaccagaaatccatcataacagaagtaaggttctgacaaacatttttaggcatcttgaaacaagtcatagcatatacaggcaaatccatacaaatggactttaagagaacctctttgccaccttgtgataaattctttgcataccaacctgttaatcttgactgtaatttgtctttaggaaaaccaaataattccttcttagatccacttaagcattcaggtaaacccaaatacttacccagaccaccttctgtatgaatcccagaactcattttaacccatgccttggtttggtcatcaattctggctccaaatgtcaaagctgatttatccacatttatcacttggcctgacaactccccatactttgataagcaagctaataattcttcacaatcttctggagttgctttacaaaccagtaaagtatcatcagcaaaaagcaagtgattcacagacaccccatccggttgaaacttaaaacccgtaatcttgccttcacttttagccttattcaagatgtgaactagaggtacagtgcataaaacaaataaagatggtgacaaaggatcaccctatcttatgcccctgccaggcacaatacgaccaaacggttgtccattgatcaaaactgagtatgagactgaagatacacaggtcataatccatgaaatccattgcttatcaaatcctagagcacccaaaatatctttcaagaaactccattccactctatcatatgctttagacatatctgtcttgaaagccatgtactccttggaaattctctcatttgttctgaggttatgcacaatttcatgtgcaatgagaatattatcagagaccaatctctcaggtacaaacgctgattgtgttggagagactatatctggcagatgcttcttcaaccgtgtagtcaaaatctttgaaatgatcttatatagtacggagcatagactaattggtataagatctgacatgctttgaggtcttaagatctttgggatgtgacagatatgagtatgattccagtcttgaggcagaataccagtctggaaaaaaccaataatttcagctataacctgtgttttcaccaaagcccaattcttttggaaaaacagtgatgtaaatccatcaggtcctggagccttttcacttccaatagagaaaaccgcattctatatttcctcttcagtaactgctttaattagatcctgattcatttctgtggaaacttttgactgaaatccttccaaataagagagcaaactgcttggtctagtcgaagtaaagagactgtcaaaaacttgtgatgccaccttccctttctcactaaaacgggtatgcttctttccattttcatctaaaaggaaactcaagttattagcttgtctgttggctttcactgaagcatgaaaaaaaaacgtatttctatctccctcaaacatccatttctgtctacttttctgcctccaaaaagattcctcatctgcataagccttgcccaattgatctttaagatgattaatatgaggccaatatggattcaactggcttttaagatcatctaaagcaattctcaatcgtttaatcctcttttgagcattactatcagaacttcttttccacatacttatagctcttccacattcattcagactaaatatagaggagtaagtaccttgagaaatctcactcttccaagatttgtgaattgcagcagtgcaagaaggatcatcagctaaccttttaaaaaacctgaactgaccacgaaatagttcctgatcattgataaaattgaccaaaacagaccgatgatcagagccaaatctttccagaaaccattgatgggagtttggaaatagagaaaaccatgaagggtttccaaaacaacgatcaagtttacattgtatccattgatcattacgagtacctccccacgtaaaaccattccctgaacttcccaactcaaacatcatacaagtatccaacatgttttgaaaagcctgaaacgaagcaagagccctccgtggtccaccaagtttttcatcatttgatctgatatcattaaaatcaccaattaaaccccaagcttcctttctattcagaccaatatcactcaatctttcccaaagttgaggtcgcagctgtgtcacaggatgcccatacacacatgaaataaaccagtatttatttctttgtatgattttgagatccagaagatttttgtctgcaaaaagaaactcaatgtccaagtccttcttccaaaagatagccaggccatcttttctaccaacatgttcaattgtaaacatatgatcataacctaaccaagtaaacactttggagacaaaatcagaagtattcatagtctccatgaggaacataatatctgggaaatgattctttttcatttcctttagatggcgaattgtccaagggttccttaaaccttagcaattccagcttaggatgccttactgatccaacgatggttcccctggaaccaccgtagttttctctcttttgatacattttggttcagtagtagaagctaccactgcttttcttttaaacactttatcaaatcgaccaatctcctcctcttgaatgatcttttctttcaaaggcaaatcctgtcttgatttcccctgacgagaccaggatgcaggagttttcttgcgtgagagattctttttactgctacccgaagaactagcctcatcataacccttgctgaaacctgtgataatatccaaatctggcatctcagtacagaaatcatccgtttgtgtatttgcaatcaaaggcagacatggatgaatagaaggtttccacaaatccttcacagatgttttagggtctttaaaagctgatactagcaccccttgttctttcagcatagcagtatccaacttttcttgaccaagatcctgcagattaatctctactctcttaccttggtccagtaaattccttgatatcgctttaattgagcttgaagacttgaaagagcaatgattcttatcatgtgttaggcgttgacactgaaagcatcgcttccttatccgttcataatcgaaagaaattaaaaccaattcgccagttggaagttgaacctctttcgaattacgcataggattagcaacaggaagaagaacacgtacccgcacataatcttgaacctgtgctttctccgtatcaaaaaccacctctaaaactttcccaacacactgcgcaatttcctttattgatttttccgtgtaatagttcaccggtaaattacgcagacgaatccatacaggaaggaactgaagataatcatcctgtggtttttctacccatcgatccataaccacacaccaatcatcttgggtccaaacaccaactttcagaattccttgtaaatccttcagacttgaagaaaaactggaacctgtctttagagagagcaacacctcgaacccgattataaagtctccaaatccttggcatatccagaatccaattagacatcctttgaaactcaggattcaaaaacctgcccaaaatactacagttgtttctttcattcgaacaaaactctggttgatttgagagaatcaacggagtatcttcttcaatagacatcttctgtatcgcgtcctctagttccatcacaaacaccacaaaccacacagaacagaattcttaaaacacaggaagctcccaaaacttgtaaaaaagtgaatcttgatttctaagccgacagaagaaagagatatcttcggataacagctccactcaattcaaactaattgagagataagttcttaagtccaaatgaaaactggaacgactttgattcaaacggcgaaagaaatatcctattgacctgctatgaaagagaacagagagttctttttttttttatctataccaagaatcaaacgtctgcggtttaggggtgaatttcaaaagtaacagtttctagaaaagttattaagaatatagcactataatgtcggtaatgtagtaagtaggactagatagtgaaaagacaacaaactccactaccccagttaaaggggaagagagagagagcaaagttgggattaatatagttaaataggaaatatacagaatatcacttttttttttttaattatagttttttttgttagttttgctaatctcttactaataaaagaagttctttgaggccatcttcatcagtagaattggtaggagtatttcaatatattgttttttaatcattatcatataatattattatttatttaaataattattctgaaaataattatttaacttgttaaaatatgacatgtggcaagaaaagtatctcatagtttctccgcagagaaacttttctcactttctctcctactttattattattttatattttttagtgaaggaaaaactatgtgagagactattgatggagatgctctgaggcttccgtgtgtccacatcagcacaaaaaacattacttgagaggaagccacgtcattgctctttcatccttaaaaaaagaaatgccacgtcatctataggttaaggctttcacgtcttctccgttgtgttatggaatcggccattcacctttcattacctttcgtaactgcggcaatgcggagagtcatcagctataaagctttgtaatttattagcagctcatgtaacttatatatccaatcaaagaatataaattacactttaaatttctttagttgtggtgcgtgtattgaacttaagcaggttgtttctgaacaattccaaaagaagagggctttgtatggggattgctgcactcgaagaagaaataaggagatttaaactctctttgtttgtctggtcgtcggaagagctttgttgtctccttctttcctaaaagttcataccagggcattaagaagattcttttaattaacctctcctacttttgtctttaaaggtaatttcaatatcgttttgctttctatatcataatctttcagtggagtttcttataagaacgatccacttagatacattaattgcatgtatattgtatataagaaacgtctaaatgttaatctatgtgtgcacatgtataagattagtgtcgtgtgtttgaagtttcctttatatcgtccatatatcaaatttgacaaaggctttgtaatgtttactttatagctcatagatttgtatttcgtatactccactctcgccactatgtcgaaactaatgtgttggatgagtaaagttcaagcttttgagatatgtgcgtcaaatttgttcacataatttaatttgttgataagtaatataaatcttgcctacttaaattccaaaagagaaattgtagttattgggaaactactaaacttctataaaataaatttaaataaagagtatgataaaatttaatataagtctatagaagtcccaataacttcagtttctcttaatataaatctttatagtgtcagaaatagtttataatttatagaagcaccgatgaaatcttattatataaagtatggttttcaaagttgctaactcataggatcgtgtcacgtgtcaagtcaaacgatcggatctttacatgtgtcattcaaaatttaacttttttattctctttaaaaaatagaatatcttaaaaagtaaacaaatttacatatactaatttatatatctatatatttataaacaattaacatttattcaaaaaacagaaaattaacaaatttgtctttaactaatgtaatcataaatagaacattttgagaaaaatagcttagcttataggatttaactttttaattattttcaatgagaatatttttatttattaattttaactcatttaatattaatttgcatgatgtaaaattaacttacgagattacggcatatataaaaaatatattttcaacaatgtttggtttctaaatatttttgtggatttctgtttttttattaattattagccttaggcgtttgggtatttaggtcaggtatttcgggttcgggttttcgggcttagaagtttaggacccgttcgggtaatttgagatatgtttggatacctattcggatttgggtttgggtttttcgggttttgaagtttagaccttttcgggtatttgaaaattttgggttcgggttcggataggtttttttggatcggttcttcgggtttgggtattatacctaggcctattaattatattttgttaattgttaattatttttaatactaactaggatataggtttgatatgtcataaatattattttgatatgaaaatgttatcactcaatatgaagtgtgtagaatttaaatcgagtttattatgatgacatagatagttaaactgtattacaaaattgaatggtgtaagatagaaatttgttttttctttttttttttctagatactaaattaaatatagaataatggtcggttattttttagaattcaaatatcattgataagattgagtgtatataattaaaatagaatgcataagactgaaattttgtttaaaccaataattattaaattaaatatcaaaacaatatataaattgctatataatattcaaatattatcgataaaaatttattttgtatcttacacccgcctaaataggcgggccttatctagttgaatataaatcttaaatcttgaaaattaagtaatataaatcttctagaccgatgtatcaaaagtcgtccagtgctggaaatagaaccccatatttaatcaaaatgaaaagaaactctttcgtcctgattcatagaacgtatatcactcattgttaccagaacatcataaccattcaaattttactttagcagtgatattctgaaatatatcactagcatagaggtaactaaatatatcaaatgtcaaatatatatcattagcatagttaacaaactttaaaatatctaatatcaaatatacccgggcatagcccggattaccccctagtttctctaatattaattgcaacaaactttaacaatggtaatagtaatggatagctgattttatactattttctaatttagtcttatataagtatgattttcaaagttaatcgttcacaagatcatgacacgtgtcaattttaacaattttaaattttgacacgtataaaataaaaatttctttttaaaacttttgaaaataaaaaaaaatacttataagaaattagaaatttaaacaattttcagaagataaatataatgaaactatacatttttataatataaaatataaattataaaattatgtcaatcaattgatgagattttaacatatgtacgtatacaaaaacttatcccatttagattttgacatatgcatgttaacatagaaaaataaaaattacagatctttaaaattaagaaaaacgaaaataaaaactctataattaaaagaataaatttcaattaaacaaataaaaataaaatttccaatctatcaatgtgatattttgccttgtgtaaaataactttttcctatttaataaataaaaaaggtaaaaagataattataaggaaccctgcttaataactcaataataattagaaagaaaaagcttctctttcttatctctctcatattcttcagagagaagaagctttatgttttttgttttccaattaaaatcagttctttgccggctaagtccggatatgtacattctcataagtgttagttttttttagccgttttggctattttgattttgtttcctcaatcattttgcagaatctaaattctcttccggtaaggaagaatcaaaatccgagcgtttaattctgagtttttaagatcattggctgctcgattttgatcatgagaaaaataaatcctacatatcctaatcgtggccgtaatcggcgttggatgaaggtatcacctcaaggttgcaaatcgtgttgagaggattttgttggctggtgctgaatatatcaggagagcgtgtttgcgactgatttgccctctcgcccgctgcgtcttcccgtgtttcatacatctgatggcttactaatctctgttttttacaattggagagtttagcaaaaggtagcaaagcaaggtgattggagtttgaagctgaagatcggtaaaatccttgattagaaaaagcttttcaatggtgaaagtcgaaggattgatcggtggttcagctcggtggagatggtggtggatgtgcctttccacttccaacatccatcgatacacgtatcttcacacgtgtcccttttagacctatgttatcttgttcttcttgtaattttgggctaattgggcttatcttttgtgtaattgggctctttatcaccttgtaatcctctttggattttaatgaaaagtttgacgacaaaaaaaaaagaagataattataagaaaattataaattaaaggttttcaagtctaaaaagattgatagaaaaacattatacctatatttccataaaagacttttgttatgtggcaaacaaaagtttttttttaaagtatacaattgaaaaagtttaaagaatataaaaagattaatataaggaaactgtaattatatatagtatatgtatattttctataaatatagaaattagaaaattattataaacgttttaattataagttactaactaaactagaaaaaaatgaaaaatagaaaaaggattacaaaaattatataatgagttattaatcctataagaaaaaaaatatctcatattttctcaccaagcaaactaatttgttcgtaaatactccaccattgattcaaaataattatgatattaggcaaatagccatgagtaaaaaataaattaacctcaaacaaaagacaaacatacaacaaagtattgtaatttggagaaaaatgtgaaataactactaattacacgaaattcaaaaataaagaaaatcaatactggaattccaacgacttaaagagaaatatcccacgagaattagaggaaaaaacaatgtcatttaataaagggagatttgcaaaactaccatttctttactaccttttgcaacaatactcttttatgttgttcatttttaaaaataccccttcctttgaatagaattaccaaattaccctcatctaatagatcatgtaattgaaaactgaaaatttcccgtcaaattgttttttcgtaacaatttttttctcagccaaaaaaatgcatttaaaaatccttgtaaattttttttggcaagaaatagatttacaagggattttaaaagggttttaagagatttacaagggattttaaaaaagttttaaaatatttacaaaattattt

SEQ ID NO: 216 - DNA, 102585 bp, Arabidopsis thaliana
aagctttatgttttttgttttccaattaaaatcagttctttgccggctaagtccggatatgtacattctcataagtgttagttttttttagccgttttggctattttgattttgtttcctcaatcattttgcagaatctaaattctcttccggtaaggaagaatcaaaatccgagcgtttaattctgagtttttaagatcattggctgctcgattttgatcatgagaaaaataaatcctacatatcctaatcgtggccgtaatcggcgttggatgaaggtatcacctcaaggttgcaaatcgtgttgagaggattttgttggctggtgctgaatatatcaggagagcgtgtttgcgactgatttgccctctcgcccgctgcgtcttcccgtgtttcatacatctgatggcttactaatctctgttttttacaattggagagtttagcaaaaggtagcaaagcaaggtgattggagtttgaagctgaagatcggtaaaatccttgattagaaaaagcttttcaatggtgaaagtcgaaggattgatcggtggttcagctcggtggagatggtggtggatgtgcctttccacttccaacatccatcgatacacgtatcttcacacgtgtcccttttagacctatgttatcttgttcttcttgtaattttgggctaattgggcttatcttttgtgtaattgggctctttatcaccttgtaatcctctttggattttaatgaaaagtttgacgacaaaaaaaaaagaagataattataagaaaattataaattaaaggttttcaagtctaaaaagattgatagaaaaacattatacctatatttccataaaagacttttgttatgtggcaaacaaaagtttttttttaaagtatacaattgaaaaagtttaaagaatataaaaagattaatataaggaaactgtaattatatatagtatatgtatattttctataaatatagaaattagaaaattattataaacgttttaattataagttactaactaaactagaaaaaaatgaaaaatagaaaaaggattacaaaaattatataatgagttattaatcctataagaaaaaaaatatctcatattttctcaccaagcaaactaatttgttcgtaaatactccaccattgattcaaaataattatgatattaggcaaatagccatgagtaaaaaataaattaacctcaaacaaaagacaaacatacaacaaagtattgtaatttggagaaaaatgtgaaataactactaattacacgaaattcaaaaataaagaaaatcaatactggaattccaacgacttaaagagaaatatcccacgagaattagaggaaaaaacaatgtcatttaataaagggagatttgcaaaactaccatttctttactaccttttgcaacaatactcttttatgttgttcatttttaaaaataccccttcctttgaatagaattaccaaattaccctcatctaatagatcatgtaattgaaaactgaaaatttcccgtcaaattgttttttcgtaacaatttttttctcagccaaaaaaatgcatttaaaaatccttgtaaattttttttggcaagaaatagatttacaagggattttaaaagggttttaagagatttacaagggattttaaaaaagttttaaaatatttacaaaattatttaaaagggtttaaaaatatttacaaaagattttaaaagggttttaaaagatttacaagggattttaaaaatgtttttaatatttacaaaatatttttaaatggttttaaaatatttacaagggattttaaaaggttataaaaagatttacaagagtttttaaagggtcttctagtaaattcttttaaaaaatttaaaaaacccttgtacatcttttaaaacctttaaaaatctcttgtaaatcttttaaaactcttttaaaatcccttgtaaatcttttaaaacacttttaaaccctttaaaaatctttaaaaaaacctttgtaaatctttgaaagccctttaaaattccttgtaaatattttaaaacccttttaaaatcccttgtaaatcttttaaaacccttttaaaatctcttgtaaatattttaaaacccttttaaaacaattttaaacccttttaaaatgtttaaattttttttgtaaatcttttaaaacccttttaaaatcccatgtaattcatttaaaaccctttcaaaatcccttgtaaattttttatcgaatttttttggcgaaaaaattttggcgggaaatttattttggaatattttaagcgaaaaatatgaatattttattttgttaacataaaacaatttccaaataggggtaaaatggtcattaaaaatttaaagagggtagaaatgaaaatggctaaaaaagggtagagttgaaaagggacatcatgaaaagagcattagaaagaatttttctttaataaatatcatgtcatactaaaattgtaagagtaatatgtgattgttatgtaagtgaagatggtggttatagatggtgtagaaaaaaatattatattatataatttatatgatatatttttgtttcttaaagttagtaattaatattatcatgaatagttatcaatcaaaaattttattatgtgtcatgatttaaagagatttagtcattatgatatattttttattcaaacaatttttaatcaataattttagtggtaaagaaaacaatacaacagtgaaaataaatattttatatttatgaaagttaatttttacttacaacattgttaattattattattttaaatctgattttagttatgaaaaataaactcgtccatcggacgggtacttatctagtaattaagaaactaacgtttgtgttagtgtcttttgcaaatgaacttttttaatgtagggtaaaggtaagataaataccaaattgttttttatcaataaactagtgcagctactatttctatcattaaccctcctctaacgacgatagtacggatccgtatggacgttagcgagatgttgtgttttgatttccggcaacagttctgaactcctcttgtcttccacttctctcccatcatattctctctcttggagttatactaattgaacctagatctgcaattttttttcccttttttctcttttgccaacaaaagcttagatctatttaaaagttcttgttctttgaggagatcttaccattttacggtcacttctttctgtaatattttttaattagacttttttcttctttgttaaatgtttaattaattttatttttttgtcacaagagtgttaattttatatatgaaccactacaaccaaagtcattacaaaagtagacaaatccacggtaagcaaaagcctatcaactagtacagaacaagattaccaagactaaacttgacaatcacaagagaaggttaggcttgtatcaaaaactgaacgtggtggagaacaaaagttctcggagtcaaaagccggtggaaacaagtataccctggagacaaaaccttatgaaagggagacggtgaaagtagtacaacctaaccaagaaaagctgtagccaaaatatgaacctaagtcttgaaataatcctatcttgctcaaaagaaactcaaggatcaaactaaccaggaaccaatagaaggaggaaatctagaagaaaattccataaaaaaacaaaatattaaaaggggaagaacctaatctctcacttaaccctcgtcccaggaacctttacacttaacgcgcgacttggcgaagccatgagtgcaatccaattaaccgaaacttcagtaagaacctcaaacacagagatcccaaagcttgaaggaaatgtaaccacttcgacgatctgcttctcgaatccaaaacaattatgcagaggagagagagaatcatgtagaatctgcgaaattacgaaaccgggaaacaccaaccacttcgaggaggacatccactagaagaacgagtcccaaaaatttgcctcaaaaaaactattgaactagccctggatcttccacaagcaagaaaagagaagagcatccgaagaatcactatccacaccataaacgaaagcaagtttaagatggggaaaacctaatcgggtataggtacaacataaagtccaagttataatgggcttctacaaagattatttcccaatacaaagccttggagttgacaacaaagagagatgttgaaggataatcttcaccacacgtgggaagcatagaacatgataagaaaccacatgttgcagcaaagcaacaagtcatcaaccaccaaccctctccacctttgtagaaacaacgagatagacgtataaaacagatcataacaaattcaataggttgctaaatccaccaattgggattcaacgaacaaactccattagagaatgataagatctgaaagtccaccaccgtttgctaatcgaactgaagcttagagacaacgactgagagtcaatctaaaattaacaaaggaacacatcttcataccatcaatcttagtcgcaaaactctgaaaagaaacatgctagagagagttgaccttagtcgcctaaaaccatgacgctgatacaatttattcaggaaaaagataagaagcggcaacagataaccgaaacaatagctaaccacaacagatagccgaaacaatagcaaaccacaccagaaacaaaaccggactacaccagaaagttggtaagcataccgaacggtggaacaaggattgagttccctatctttgaagaatcctagagagagaaactcagacatatatgtttggtcttttttttgtctgaatgattcatgatattaacaacaacatgttcacaattacaaaggggaaacgagggcaatcaaactacaaaaaatcattacaattatgtaatacatttatcaatttcaaacaccatctctagccaaaaagagtagtcttatgctacataagattgtgattggtccgccattgtgacacttttaactatgaggaaagctccttggtttgctcatcgatcttctagtgtcatcttccaacatggatgaggaaaacatggtggaatacaattgccgacggaacttaaacccgagaaactaagccggcggaactctaacccccagaaactaaattccaacatagggagacaagcaaaagacataaaactaaaaaaaaatctaaacttgattgaaaggatttgaggtagagaaccaaatttcttactacccgagccaaccgagatcgcaaaacaagcaggaagtcgttgaaggagctgacaaccaatccataaaagtttcgatttacaagcctcacttgataattaagagtcttcagaagaaaaaaccttaggatcccttggatggcgggaaggaggaatctcggccaaaacttgcagggaccattggaatcatggagccgggagtgtcaaccaataaacgtgaaccggtaaaaggacccaaacctaggcggatcttgtcctaaatctatttgttgacgctgtgtgaggaaacctaaaaattaggttgcccaaaccaaattaccactacaccgacaatgagtggcttagagccatcacagttaaggctaaagaggactcaggcgaagaagaaacaagaacctccaacaaaaaccaagcaataaaaacctagatctaaaaagagaaaaaagcagagaaccaatcgacgtcgtgaccaatccaaagatctttccacacaaagacataaaactaaataactaaacaaaagcgaaaagaaccaatcaacgtcgtgaccatgttggcccacacgcaccggtcggaggcaaaaaacacaaccagcggcgagttgtagagagaaagaagagagaattaataataaggatacatgtttggtcataaatatttaattaattagactatcaattttattttatttgtaatttaaatgttggttagaaaaaaaaaaaagaaaaaaaaagtctaggagattgtttttttttatctttttatgctaaagtatttttatatgtctttttccaacaaattgactactatatatatgtggaacaagttgcatcattcaacaatgggaaatcattttggagaggcttgttacaaggagagaaactttttacggaccaaagaaacaaaataaaagagtactgataaagaactacaaattacagagtaaagaaatacagataggggtacattatatttgtctgccaattgtggaaggcctgcaaagtgagtagtttgtgataagcagaacatcatgactcctcaataaaaccagaccacgaaaaacatttttcgaatctgatcttaaagcttccatcttatgtatgtgtcatgacagcttcttactcaccattgtatcagtacaacaagcattcttaggagtctgattgaaaacctttgagaaatcttcaaacgtagacccataaagctgcaatacttaagactaaaaggtgataaacatagcagcatcaaaaagagtatctcacaacacactccaaactaaactaaaagaactgtagatgcaaaataagctaaacaaattgtaccccaaaaagtgttaagcacagagtataagggtatgttatactctgagtgtcccataactgaaaaggtctatggagggtgagaaggtaccggagaaaatctgactccatgatcttttctacactgtctcatgcttctgtccggggtgggatcaatttcttttccttttttcgtttagaaatctcaccagcttcttgtcgcaccgtgttattaagaacacttggagtggaagagtcatcagaggaaaccttggcatgagaaagtgataagtgactcctctgttggtccacatcaggttcattcaaatccatacctattgaagcagggctcggcggttgagaattaggtctatgagaagaaatatctgaggtggaggacttgtgttcaggcggtggttggagcctgctccttcttcccaaacaggaaccactaaaacatctgcttcatcatcaacatcattatgagggatcatcggctgggctagataaggacaatgatcaacatcatgggtgatacgacaacagtttgagcaaatcctccgaaggctttcatattcaaaaccaatcattgctccttctcgtgactcaaaacgtacgcgacgaaagaacctcaaacgatctgtaatactaatcctcaccttaatacggataaaagctatttgagtggaggtttcttcatcaaaatcaagccccataacttgtcccaaggtactagcgacaaagcgaacagtcatggtagacacataaaggacgggaattccccttacttgaacccaaaggtcaatataagtaagaaagtctccacggggaaagtcttcccatctttgtaaggccacaaaccattaattaaacaaccagggacctctcagcatcatagaagccatttcaagtgcagagcgaaagcgaaactgaatacacatctcatcaaatatgcggccatggaccctagttgctagaccccaactgcgaggtacatctctgagaactcttcgaagatgctgagcatgagtgttaagaggtcgcccaattagactgggtctattactagcaacaacactagcataaggagtttgaggaacaaacaattcaggatcatcacgccctaagaccatgtattgtaaatcatgcaaaatctcatcagccattgaaagagaacgacggaaggaaaagttgaagtaaaagaagctcaaaagaaaagaaatagaacaaaggtgtaaaagaccaagttatatatagggaggtaaaaaccaaggcaataagattagatacgggaaaacaaaattataaaataaatatttttgtactttcttaaatatagtaaatatattgtactttgaactgataacttatcgtaacagtaacctcaaaaagtcaaacttatgatggcggtaaacattgagaaaccaatgtcatatgagaaaaagaagtagccataaatattttctcagcaaagaaattctttaaccaaccaagaggtccttgtgcaacatatgatgatagacgatagtcagatgttacactataagcaatacgagaagctcccacattgaaatgtaagggctcaaaaaccatcatccatccctacttatccagacttaattgtagcaaagggaaaatatgacttacaagagatggccaagcagcaggtttattcaatgcctgaataatttcatatgttgaagcagcaaataagacattctgaaatttcaaactctacatgctttcaagtgcccattccctgcttttaatctttgctttaaaaacagaggccacctgagaatatgatctacgactgtgaagtagaacattttccataggatctcgaacaacccaagaagcactagataaagccaagttttttgaccaagagaaaccaatgttgcatttaacttcagcccacaatggaggagaccaatgaaatgtgtgatatgaagttgaaagcgagacattgtgatttggaacctgagcagacagccaagctattgaatcctcataagctatacaaacaaaacaatctggaggatacagagacccattaaaaagtagcttgttcctatttttccaaagaaaccatacaatccaagggaaaattgcacgggtctcattgctaatattttcattgtgcctcatggagaaaacatatttgaaattctcaaggtcgatgcatccaaaaccttcaggaggaacaagaatgttagagagtgcccacacttgtcgagcataaggacaaagaaacagaatgtggttaactgtttcctccactgcaccacataagagacatccatcatagttatgaattccacgtgtctgtaatctttctgaaactgtaattgcccccttaatgcttttccacagaaaaacctgaatttttggagatgttttgagtttccaacagtctaccgaaatcggaaacaatgatggagaaagagatggtgcaacaaacttctctttattttccaaatgatagatcagctcataaccggatttaacagaatacacaccattccgatttccagcccaacagtaagagtcctgtctcgctaataaaggttttgtagaaagaatgcgactcacatcatcaggatgaaacaactcaccaagaagccaaatattccacaaaccagagtgaagatgtataagattagatactctaaggtgaatgttcataagagattgaatactctgttgtcttctagcagaatcatcaaaaatccatttatcaatccatacccatatccttgccattaccaatgacacgtttaagccctttgagaagtagattcctgccaaagaaaatgcttcgccaaccatatgaaggacgagaacccaatttaccttgcaaaaagcatgttttcttatagtatcgactcttgaaaaacctagaaaacaggcaattaggttcatgtaataatctccatgcttgttttgctagcagagcttgattgaataattccaaatccctaaaaccaagaccaccagcacactttagcattgtcaacttatcatggctatccaatgaatcttctgtggtgcatgagaattactccaccaatattccatcatggcacttgtcagctttttaatagcgctcttaggaagtttaaaacatgacatggcatacattggtaaagccgtagctatcgacttcaataaaacttcctaagagaaacattcttagcataccatccaaacaactttgactataatctttcttgtataaaccctaaaagttgttgttttgatctactaagacattcaggtaaccctaaatattttcctctaccaccctctaaatcaatgcatgtctgaattttaattcagttcttgatgtcatctgctactttagaaccaaaactaatagcatattttctcttattaatctgttggccagacatctgttcatatttatcaaggcaaagaagaacctcatcacattgagtgattgacgcttgacagatgaacaaactatcatcagcaaagagtagatgattgatagctggtccagagggatgatgttgaataccaaaaattgtacctttctcgtgagcttgattaaaaagatgaatcaaagcttcagtggacagaacaaaaagaaaaggagatataggatctccctgtcggatacctctttcaggttttacgaagccataaggctgaccattaatcaatactgaaaaagttactgaagttacacaccccattatccatactgaagaaaaaaaccattgcttataaaattccttgtagaaaggtccattccaacatatcataggcctttaacatgtctgtcttgagtaacatagaaaatgcttaaatatccggatgagaattcaagctgtgaacaatctcatgagcaatcaaaatattatctgaaatcatcctttctgaaacaaaggctgcttgagttggagatataatggacggcaaatggatctttaatttgttaacaaggattttggacactattttataaagcacagagcaaagactaattggtcgaagatcagtcatttgattaggcgcttcaatcttaggaattaggcacatatttgtatggttccatcattgagccatttttctgtgctttttcgtctccaaaacacctcttcttctcagaaagcaacaacaagttcattcttcaattgtcttattctagcaaaacagggagaagaagattcatcatgtaatttcaatgcctctctgagtcttctgatacatcgttctgagttagtccaatacttttgcttccattcctgaattgctttcttacaagtttcagctttatgaataaaagaagaagatgaccctgaagactctgtattccaagcatgtgtaagcatttgtaaaaacgagggatcctcagcccatctcttatcaaacctgaattgtcctctgaaaaaatctttgtcttgagtaaattcaaccagaaccggcttgtgatccgatcctagtttctccaagaaccattgatgagcagttggaaacatagagaaccacaaccgattatcaaaacacctgtcaagcttgcattcaatccattgtttatttcttgtgccaccccaggtgaaaccattgccagaactgccaacttcagacatatcacaagtcgccaaaaggttcctaaaaggttgaaaagaactatccacacgaagaggccacctaacttttcagaattagataagatctcattgaaatcccttatcatacaccatggttcctgtccaactacaccaatccgtgagatcctctcccaaactagtggtcgaagatgagacgttggattgccataaacacaagatacaaaccatgtgtttggaccatcaaaaatcttcaaatctatcagatttttatcagcaaaaagtatttctatatctaacacatttttccaaaaaattgcaagtcttccactaagttcatcaggctccactgttttaaaattatcataacctaaccaaccataaactttaacaagaaaatcttctgcatttttcatctccatgaggagtaaaatatctggaaaatgaatccttctcatttccttaagatgccgaattgtccaaggattccccacaccttggctattccaattcatgatacctattgatccctcggtggtccgctaggaaccaccgtatctttagctcacttggagtactacaccacacctttgccttactccgcaattttccattttaaaacctcttcagtaggatccacagaagatcctatagctaatcctttcacagaaaccttgttctctttggatttacaaatcacgatcttggtttttacacggaaccaaattcccaatctttaatcctgaagaaatggcggtacaacatccagaagagaaaacaaagggaagaatacattgggaaaaacctgatgaaacatctgaggatatagtcaccagagctgagactgatggatgaggagtataaactttaatagcatcagccattaactttggtaatcctgggggtaaagtagtgcaatgttgagggagagattcctcttttttatctttagaaggaatatcagcaggagcagaaatctcttcaaacaaaacatttgaatcaagaggagagataaaagggcatcttaatttatcatgagtcaacctttgacaatgaaagcatcgtttgcgaatcctttcataatcaatgccaatcttaaccaaagttccattaggagtctgaacttctttgaatttttttaaaacctttgaaacatccaacagaaccctaactctgacaaaagctctactctgagcatgtgcttcctcaaaaggaaactccagaattttgcctattcatgcagcaatagtcgctatggtcgtctaagttttcaatgattaacaagaatattcctcagacgaatccacactggaagatacctcaaataatcaggtggaggatcttcaatccatttttccatgaccacacaccaatcatcctgtgtccaaacaccagttttcaaaacttcaagaagatcatcctcatgattgaagataaactcgaaacgatccttagatacagcaatcccacgaacacgatcatatagtctccaaatcctatgcatctctaaaatccatttgctcatacgttgattctcaggatttaaaaaccgacttagaagactgcttgaatttctttcagtagaagagaattgaggttgatcaaatagaataattggtttatcttcctcctcttcaatcgacatctccttcaaatacttatctattgaaaatctattacagttccgcataaagaatatccaagagaaatcacaaacgcttccaagatgttcagagcaaaaaccagataaaagattatccacaagaaatcataaacgcttccaagatgttcttagcagaaatcagaaccagagaggatttgtttcaaacacaaacttctgaaaaactgaaacccaaatttggacagaaaacaagtatatctccaagcaaagctctgctcagacagaagatacctaagagagaagtactgaaacccaaagaaatgggacggcggtgattgaaatcaggaagattgtaatcgtagaaattgaccagctaggagagagaacagagcgaaagatctaatttttggtctccagaacggattagtatttgtatatgttcatatttctcttttgtgccatctttttaataatttaatcttcatacagaagataatctccaacaaattccatcgtcgtcgttaatcaaatcgatgtcccaggtttcttttgggcttaaggacttttctctcaggttgtttcaaccgttcggagctcctaccggagatttcaacgtactcggtccggttctgaaaatctttacatcgtgttctgtttatgagttctgtttttttctgctctgttctgttttgttgggttttcgatatctttctcaaaagtttggacgtatcaagagtatggatctggataaagctattcaagatatgtctattgaagataacaagacgttgattctatctaatcttccctaattttgctcagttgaaagaaacagctgcagtttgccgggatggtttttgaatccggaaaatcagaggatgtctaacttgattttagatatgcctcatatttgacgtctagcttctcgggttcgtggtgtagctctttccaaagaccgatttcagtttttctttaaatttgaggaagatttagaggaaattttgaaaacatgtgtatggactcaagatgattggggggttgtgatgcaacgatggaatgagaaaccaccttctgattatttgatgtttcttccgattttggttcgtgtaaggaatattcccgttaactactatactaaagaaacaattaaggagatagcggttgccttggggaagtgatggaagttgttatggactctgacaaatctcaagttcaggattatgttcgggtaaggttttttttcctatgtctaatctccttcgaaatagtaaagcggttcagcttcctacgagtgaaatagtcatcatttcttttgactacaagaggatccggaaatggtgtttccaatgtcaaaggttgactcatgttaaaagcagatgttcgttcaaagtttcaggttctgtaactcttgcagttatgaattctgtaaccatcgttggatcagtaaggcgtcctaagatggaattgtcaaggcttgaggaatccttggacaattcgacaccttaaggagatgaaaaaggatcatttcccagacattttattcctcatggagactaagaattcaatagagtttgtttctaaagttttctgttggcttggttacgattttatgcatactggtagaacctggagggagaagtggaggtttagcaatcttttggaaaggtcatttaaacattcaggttctcagtgcagataaaaatcttttggatcttccggttttttcaagaaataaagtttggtttctttcttgtacaagtaatgggttcacttggggtggtaacaaaaatgatcaatggattaagtgtaaataagatagatgttttgggaatccagcctggttttctttattcccaaatgctcatcaatggtttcttgacaattttggatctgaccatcgacctgttttggttaaattcactgacgataatgagctttttcgagaatattttcgatatgacaaaagatttgctgatgatccgttttgtattgatgctatctatcgttcttgcaattgtgcaatgtctcaaggtactcactcatctatttttagtcttactgaatgtcgtatggccattagtgtttggaaacactcggctgatactaattctcatagtagaattaaaagattgaggaaagatttagatgagttgaagagtctgcaatttccagactgacctaggattgggtttatcaaggatcagctgggactggcttatgggaatgaaaaattgttttggagacagaaaagcagacaaaatggctggcaggtggagataagaacacagggttctttcatgctgcggtgaaagttgctagaatagggaattcattgacttttcttgttgatgaaaatgaacaagaacacactagaaatagtgataaagggaaacttgcgacatccttttttgagaccttattctcatcttcgtatcaaacaaatcagaatatctattaggaaggatttcaatccaaggtctctttagaattatatcagaatctgactcatgatgtcacggaattggaagtgtataacgcagtgttttctattaataaagaaagtgatctggggccagatggttttactgcattattttttcaacaacactgggatttagtgaagcctcaaatcttaagtgaggtctttggtttttttcagactggtgttctacctcaggattggaatcacactcatatttgtcttattcctaagataactacaccacagagattgtctgatcttagacctatcagtttgtgttttgtgttatataagattatatacaagattttgattgcaatattgaaaaaacatctcccaaaaattatttccacaactcaatctgcttttgttcctgaccgtttgatctctgataatatattggttgctcatgaaatgattcacagtctgagaaccaatgatcgcatagcttatgaacatatggctttcaaaacggatatgtcaaatggcatatgatagagttgagtggccttttttggaagctatgatgaatgctctgggttttaacagcaaatggatatcgtggataatgcaatgtgtaacatcagtctcttattctgttttgattaatggtcagccttatggtcaaatcattccagaatgtggaattcgccaaggtgatcccctatcaccagctttgttcgtcttatgtactgaagcttaattcatatccttaacaaagcataaaaagaaggaaaaataactggtattaggtttcaggataaggaagttttagtcaaccacttgttatttgctgatgatactcttttgatgtgcaaggctacaaagcaagaatgtgttgagttattgaattgtttatctcaatatggtcagccttccggtcaattgatcaatttagagaagtctacaattacgtttggggcacaggttgatactgaaaccaaaaactggataaagaatgcttcaagtattctcttggagggaggaactggaaaatatcttggcttacctaagtgtttaagtggctcaaaaaaggaattgtttggttttattaaggaaaaactgcaatcaagactaacaagttggtattccaaaacattatctcaaggagggaaggaagtcctactcaaatctattgctttagctcttcggtctattccaggtcttgtttcaaattgcctaagagtttatgtaagaatttgacttctgtgatgatgaaattttggtggaacagtgttcaaaggaaaatccattgtattagttggcaaaggttaacattacctaaggaacagagagggtttggtttcatagatcggcaatgtttcaacaaggccttattggctaaacaagcttggagactcttgcatgagaaagaaagtctgttttgcagagtttttaagagccgatatttctctaagtctgatttcattaatgctaccaaaggctctagaccttcatatgcttggaacagtattttatttggtagataattacttcaggaaggtttgagaattgtgattgggaatgggaatcatacttctgtttggattgataactggttgcatgatggtcataatcggagaccaatgaatagacagcctctcattgatattactttgaaagaaagtcaacttattgacccggtgtctaggaattggaatcttaatagagatttatttccttggaaggacattcagattattatcaagcaaaggccgatggtgtttaaagaagattctttctgttggttacattctaattctggtttatattcggttaaatcaggatacgagttgatcaataaacaagtccatcatctgatgtaccaagaagctgaaattgctccttctttgaactctctttttgacaaagtatggactttgtaaacagctccaaaaatcaaaattttcctctagaaggcattacatggggctctctcagttgaagctaggcttagaacgagaggaatcattattgctgacggatgcttaatgtgtgatgaagaaaatgaaaccatcaaccacattttactccaatgtccgttagctcgacaagtatgggcaatttctcatttatcatatccgggatttccagctctctgtatgcaaatataagtaaattgtttgacttaactcagcatcatggtggtcttcacaatgtgagatttgttaatccatggattatgtggtcgtcatggaaaaacatgaataagttgttgtttggaggtatttcctctatgacaactactattgcagacaaggcttttgacaatcataatcaatggttcttagcgcagccttatagacatgaagatgagaaaattatgaggattatgcactggagtccacctttgcctggtgatttgaaatgtaatattgggtttgaatggtctaaacaacatcaattcttgggcgcatcttgggcggtacgtgattcacaaggtactgtcttatttcatagtagacgttcttttgctcaggtaaattctctcttttatgctaaattacgaagctgggaatgggcacaagaatgtatgattcatcatcaacttaacagagtgacttttgctgctttctacttatgagattattcaagcattacacaaatcgaatgattggcttcttctattaggtcatatcacagagcttttgagtctcagtcatgcaaacccaaattggttcctactagtagaaccctctctttgtaatggaggagcgactgcaattgccacaagtgttgttacaggttttcgatttcaaagctacatggctagaggacatccgttgtggatgacaaagctttttactgaagaaagaggaaactagattggagattgggatgtatttttgttttatttagtgtcgctttcttaagtctcaggtttctttcgtgtcaggtcttcttagtctgcaggttctattgtctttatctttcttttatcattcttaatttgttttaatatcccaatagttttattattatactttagtctttttctattcgaccaaagttttagcttctttggttctctaagtctatatatattctctgttttttagttttagtgttagttatccctttctcttttctctagttctctacatctcaacatggtcgatgtgttatgggacgagattcaaaatctggagttgggtcaagattatcctactttgttcattcccaatgaggcctatgtgatggttgaagaccgcaacaggcttagtctgattgccagacctctgcttccaagggtacaaaattttaacgctgttattaatgctttaccaagagcttggggtcttactgctcatgttcatggacgaatcctagatgctacgtatgttcaacttctgtttcaaacagagatatacttgttatcggttcaaaggagggaagtatggttgtttaataactggtttgttgcatctcaaagatgggaggctgctccttctttgaattttgtaaccacaattgatctttgggttcaaatgcgtggcataccaattctttatgtttttgaaaaaacagagctagagattgctcaagagcttggggagattatatctttggactttcatgatgccacttctacacagattgcttatatccgagttagagttcgttttggtattactgatcgtttaaggttctttcagagaatcacctttgagtcaggagaaacggctttaattcggtttcagtatgagagacttaggcgcatctatagttgttttaggtttacccataacttgaactattatccttatcgccaacgttttcagagcattgacagggaaagagctgttttcagagatagtgttttgaggtcaagctttaactctcaatctcagatgactgatagctctcttcaggttcctttacatccacctccacgagtgccaacacctccactgaatccacaagaattggcagcagctactccatactttcccattttaagatattcagctttccaagctttcacaattccgactactcaagttgatattggacgtcaacagattttccctgactctaacatcagtccatcctctggagatgcgattacttctggaataatgcgagtctttgaggtgggtgaatcatcaagaggtgttcaagatggggaatctcacaataacatgaatcttggggagtcatctaagaggaagaacttggtcattcttcagcgtgataaggagtcaagacaacacaaacaacaagaaactgagcaaagaatgggaggtattctgaaacctcctaagaaacgttaatcactatgctcattctgtcacattttttggtttaaggctgctatggtttcatggttgcagcctcagtttcaggtttgaataacaactcagatatggtctctgcatcactttttggagttcggaatgacatatctgttttggtctgctgttttacttgcaccttttgttccatcttttgttctacaacatggatacttatgtgttaactttggtttatccatagttgttagtttgtagtttaaaagttctgttatgttttaagtttcacatgttgttgcctgaaggttgtaagtggatgtttccacacatgtactttgatagactttcgtttcaatgaatgacaacacttttttttcctcataagtgttgcttttcatttataacagagtttgccaaagatacaagagtggaacaatccaccttcatgctacagacaacactttaaacagaaaacaacaatggaaaaccaaacaagcggaatccatgttgtagaacttaaatattgaaactgaaactacaaaacacagccgatgtgatcagttccaaaaagtaacacaaaaccatatccaaaatgtatttggtctttagcacggtagtcatcttctccatgaagtcaacaaaacacctgccttagaaactaaacaacaatggattgacctaacaagagtaatccatgctgcaaaagataaccataaaactgaaaacacaaagcactcaatatctcatgatccaaaaagtgatatagagaccctatcctagctattattcaaacccttaactaagactgcaacatgaaaccatggcagccataaaccaaaaaatatgacaaaatccattgagtggttaacgcttcttaggaagtttcagaatacctcccatttgatgatcagtttcttgatgcttagtttgccttctcattgtcactttgtagaatcactaagttttttcgtttagaagactccccaatgttcctgttattgcgagattctccatctggacaaggacgaaatgattctcctacctcataaacacgtcgaactcctgaagtaatcgcagctccagaggaaggattaatgttagagtctgggaagacatgatgacgacctacacctccttgagtagaaggaaccatgtaaggttggaaagctgcatttcttgaacttggaaaataaggactagcacctgctaattcttctggattcaatggaggagctgggacccttggaggtggagttcaaggagcaggcaagaaactagcagtcatctgagactgagagtttaaactggaccttaaaacactatctcgaaaggccgctctttcccggtcaatgctctgcagacgttgaagataaggacaatagttcctgttatgattgaacttgaaacagctactacagatacgtcttaatcgttcatactgaaaccgaattacaacttattctcctgactcaaaagtgatgcgttgaaataaccttagacgctcggtgataccaatctgaacccggactctaatataagcaatctgagttgaagtagcatcatgaaagtctaaagagataatctctccaatctcttgagcaatctctaaagctgtttcttcatacacataaggaaggggaataccacgcatctgaaccaaaagatcaatggtagtgacaaagtttaaagcaggagcaggctcccatctttgagatgcaacaaacctgttgttaaaaagccatggttccctcctttgtactgagaccaagtccatttctgtgtgaaacaggaattgcacatacgtagcatctaaaactcttccatgaacatgagttgttaaaccccaagatcttggtaaagcagcaataacagagtagagattttgtacccgtggattgagaggtcttgctattatactcagcctgttggtttcagccaccataacataagcttcatgtggaataaacagagtcggatcctccggacctaactcaaggttttgtatctcatcccacagcttatccgccatgttactcagagtatgaaggaagaaaatgaaattgagatataaaagactctaacaaagaagtataaatagaagaaaggaactataaaatgaataacctaaagttaaacattaataaaataaaggctaaaaaaaagaagccgcaaaaacaaaacccaaatctaaagaaacattaaacttaaaaaatctaacaagacacaaaaatatcccaatcaccattctaattacctctctctgcagtaaaaccattgtcatccacaaagggtatcctcttgccacgtaagattgaaatctgaaacctgtgatcacacttgttgctatgtcagaagcgcctctattacagtgagcacgttccatcatgagaaactaatttggcttgtctttagtgagaagcagaagctcagtaatatgacccaaaacattaggccactcacttggtttgtgcaaagcttgaataatgtcataggtggatgaggcgaatgtgaatttatcaaaatgatgatgagacatacagtctaaagcccattcccaactttgcatcttagcatcaaaaagagatagtacctgagtaaaagatcttatactatgcagcagaacctcaccgtgtgagtctctaaccacccaagatgcccttgagagttgatgtttcttagaccaagcaaagccgatattgcatttcaattcatctggcagaggtggaatccatttctgagagggcaaaactttatgattttcatgactatgagcctgagccaaacaccattgatgacattcctcaaacgccttgtccactagattaactgtcattgatcctataccctcaaataacaatttaattctgtttttccataaaaaaccaaataatccaaggaccaacaatctcaaccgatgatgaatatcatgtctttgtggtaaatcaaacaaagagcttatgtttgcataaacagaacccaaaaattcaaagcctgaaaatgacaaatgagaaagagcccaaacttgtctatcaaaagggcattgaaacaaaatatgattgattgtttcatcacacaataagcatccatccttaataatcattcctctagttctgagtctgtcttcaacaacaactgccccttttaaaactttctagaggaagattttaatttttagaactgtctttaaagtccaaattttagcaaacaatggatttaaagatggatgaacctcagactcttgatacaactgattatgagtcttcttgcttatcaaatcattcccatacttaaccgaataaagaccattattcgagtgatcccaacaaatatagtcttctttataaaccactggtctgtgttgagaatcaactgaatatccttccaaggaaacagatctctaagcatgttgagattccaatttctagacacagaatcaataagttgactaactttcaacttaatatccattaaaagctgcctattcattggtcttctattttgtccatcattcaaccatttatcagtccaaacataagtctgattcccattcccaatgattgttcttaaaccttgaatgagtaattctctaccatacaaaatactattccaagcataagagggcctagttcctttaatagtagtaagaagatcagagttggaaaaatacatgctcttaaaaactttgaaaaagagactttctttctcatgaattaatctccatgcctgtttggctaataaagcttggttaacacattgcagatccttaaaaccaagccctccctgatccttaggtatagttaaccttttccatccaatcgagtgaatttttttttgttgcatagtattccaccagaaatccatcatcacactggtcaaaattttgcacaaagtcttcggcagtcgaaaacaagtcattgcatataaagaaagagccagagcaataaatttgagtaaaacctctttgccaccctgagatagttttctagcataccagcctgtcaaacgagtgtgtagcttttccttaataaatccaaacagctcctttttagaaccccgtaaacagtcaggtaaaccaccttctaaagaaatttttcagaccgatgttttatccaattcttgagatcatcaccaactttggccccaaaagtgattgcagatttatctaaattaatcagttggccagaaatgtgaccataattagataaacaattcaatagttcctcacattcttcctttgtggccctacacaaaagcaaggtatcatcagcaaacaacaaatggtttattgatattccttcagcttgaaactgaatttctgaaatttttcctttcttttcagcttcattaagaatatgaattaaagcctccgtgcataaaacaaacaaagctggagagaggggatcaccttgtctaatacctctttctggaataatgtgaccataaggttgcccattaatcagcacagagtaagaaacagttgttacacactgcataatctaggcaatccatttcctgtcaaaaccaagagccttcataatagcttccaaaaaaacccactcaaccctatcatatgccttagacatatcagtcttgaaggccatctcttctcttgacattctatcattagttctaagactatgcaccagttcatgagccactaagatattatcagaaaccaatatttgaggaacaaaagcggattgagttgaagagataatacttggaagatgttttttcaatctggcagtgaggatcttagagatgatcttatataagacagagcacaaattgatgggtcttaaatccgacatacttctcggttttgtgattttttgaatgagacaaatgtgagtgtgattccaatcctgtggtataacaccattctcaaaaaaaaaaaaaactcgcttaagacctgagttttaaccaaatcccaatgttgttgaaagaacaaagcagtaaatccatctagtcctagagcactttcacaattaatagaaaacactgcattatacacttccaattctgtgacatcttgagttaattgttgattcatatccaatgaaacctttgcttgaaaaccattcaaaaaattatcctggcctattggataagaagatgaaaaaagatgctgaaagaacgaagaagcaattttccctttctcactaatcctggtgtgttcttgtccattttcatccagaaggaagctcaaagagttccctaatctagaagatttcaaagaagcatgaaaaaaccaatgtttttatcttcagcaaacagccatttttgactacttttctgtctccaaaagagttcatcatcctcatcagcaagacccaattgatctttaatatatgcaattctaggccaatttggaaactcataacttttcagcaaatccaaatctttcctcaatctttgaatcctactctaagcattagtatcagctgatttttttccatacactaatagctcttcgacattcaataagactaaagatagaggagtgagaaccttgagacattgcattggtccaagagttggaaatcacttgaatacaagaaggatcatcagctattcttttgtcataacaaaactgtccacgaaacaactcgttatcattaataaacttgactaaaacaggacgatggtcagatccaaatctctcagaaaccactggtgagaatttggaaacaaagaaaaccaagaggaattcccaaagcatctatccaatctacactgaatccattgaccatttctagtccctccccaagtaaagccattgcttgtactacctagttcatgcatatcacaagtattcaacatgtcttgaaaagattgaaacgaagaaggtactcttctcggacccctctctttcccgttttcgacttaatatcattgaagtcacctatcatacaccaagcttgcttccgatgtgatccaagactacacaacttatcccaaacctaaggcctaagatatgtcaccagatgcccataaacacaagaaacaaagcatactttatttctagaagaacactgaagatccaaaagatgtttatcatcaaaaagaatctcaatgtccaaatggcttttccaaaagattgctaagccaccacttctcccttgaggttctattgtatacatatagttataaccaagccaatcaataacttttgaaacaaactcgtcaggattcatagtctccatgaagaataaaatgtccgagatatgattttttttcatctccttaaggtgtcgaattgtccaaggattcctcaagccttgacaattccaactaaggacgccttactgatccaacggtggttcacttggaaccaccgtattcttgtctctcttgaaactttgagcttctgtaatgtctgagggttttcttttccttttgaacaccttttcaaaatgaggagaggcaggagactgaataaccttattcttcagagacagctcattaactagtttttctttcctgaactgaaaaggagtgaaatcctgcattatatgatgtttaaaccctgaagtggaggaactagcctcaccaacacatgtggtaaatccagtactaatgtccaaatctagcatctcagctaacaaagtattctctggatgactatcaattgcaacagtagctgatagaggatttgctggcaaagcatctacccttcctttgggagcaattgactgaaagggaaactcagccagcctcggtaaaaacatcttcttctgtttgcctttctcttgtaatgatctcacatcatgtttgatggaatctaagactttggatgggcatctatttttatcatgagttaatctttgacacaagaaacatctctttctaatctgttcatagtcaaaagaaattgtgacaacttcaccagatggaagttgtacctctttattgttacgaagtggattggcgacatgaaacaaaacccgaacacgaacatagtcctgaaactgtgatttttcagagtccatcaccacctccttcacttccccaatacagctcgtgatctctttaattgtgtcctgagtataatagttcaccgaaatattcctcactcgaccccagattggaagaaaattcagataatcaattggaggattctcaatccatctatccatgactacaccccaatttatcttctgtccaaactccaattttcataatttcttctaaatcttcctcagatttgaagaaaaattggaatcgatcctttgagagagcaacacctctaacccgagaagaaattctccaaattcgtggcatatctaatatccaattagacatcctttgattctctagattcaaaaacctacccaactaacgacagttgtttctgttaattgaacaaaagcgcggttgatcagaaagaatcagaggcttattgtcttaaatcgacatattctgaatggctttatccagctccatgatgagatcctgatagagagtaaacaactttcccgaactcgtcaaacctgatttgcaggaaacaaactccaagagaaaaaacagtgaagaaatccgagtaattcagatgataaccaacacagaactgagaatcacaaagcaaactctcgtaacagagaaagagtcagaactaccaaaaatccgaggaagaaaacaacaatttagaccggaccgaacacgtaaatatttctggtagaagctccgttcagaatagaacacctgagagaaaagtctttaggctccaaattaactgggacgactattgttttaacggctagtttcagctactaagagaaagaagagagagaaaaactttttgtcaaactctttttgtgaactccttttcttagatgacaacacttatgagaaaaaaaaaaaaaaattagttttgacgagacacggacataaaaaaaaaaactagggcagagtgactgataccaaaggagaaacaacaaagagacgaactgaagaaaaacctctcggaagaagatgagcaattggaaaactcttctccttcgcatcggcgaaaagggacctgagtacggcacttcctccgactacaaagaccacatcgtcagtatctctctctcgattcatcctcgctcttaaaccctaattttctcactactcaaaacttttccgattctctatatacaggagacttgtttcggtgtcattcgtagagaaatcgagcgttctggagatcaagttttgcctgtaagtgacttcgagccttcaattttaggatctgttgtgatgtatctctgtggatattattattgtgtgttctcattatttttgttttcgtcttaacagtttctactacaatgtgctgaacaattgcctcataagattcctttgtatgggactttggtaagtctcttataaactagttaccttggctttttcatttctgggtatgtgttggatgttgggcttgcatttagatgtgttatatatgtggaggttttgattgagtatgttatggtatctgtgaactgattcttatcgaagaataattagctcgaagcaataacggaaggcatttaacttgaaacaaatgaacacttcagaaacacaaataatagtggaaatgcccttaaggtggatcattttgtgtctattatatcatatataacatgttgtaggaatctatttattcatagtattcatcaatatttgctaacttctgagtaataaagaatgcttgaatattttctgtgtataattcttatctgtgtaagtagcatttggatctatttttgaactgagataccctgttccctgttataaattagttcgatttaatctgatacacatacttcgaagtttgatggatgtctttccacatgtttaagattggtttgttgaacttggagaatgaagattttgtccagaagctagtagaaagtgtccacgctaatttccaggtgaataatctaatctgtacatcaaaggccaaggataaattgataacataagttttctcagttacttttgtttctaatgtgactgtttttcttggtcaaacatgccaggtcgctttagattctggcaactgcaacagtatccgtatattgcttcgctttatgacttccctggtatggttgctaatcatgtttcatggttgcttcgtctatttaatatgttagttcatgtttctaatacacagaaagcgtctaaaaaataaaagtgcgaagtatatagaacagtatttgtgaaaattttgagatgttttgtctattttctaacatgttttagttgggttctttagttgtgcagtaaggttattcaacctgcttctttgattgtcgtcttcgaaacattgctatcatctgctgccactactgtggatgaagagaaaggaaatccatcatggcagccacaagctgacttttacgttatatgcatcttgtccagcctcccgtggggaggatcagaactcgctgaggtactgctcttggactaaatacattctagaaattatttacattgaaggctattagaatactggatatgcgtttccaattttataatgatgtcatccttgttggatctgcaaccaactttgttagtctgctttcatatctattatcttaacttgtatggccgctgaatttccctttggtttgcagcaagttcctgatgagattgaaagagtgttagttgggatacaagcttatttgagcatccgaaagaattcttccacctctgggttaaacttttttcacaacggagaatttgaaagcagccttgcagagaaggtttgccttttagtgtttaattcttgaagttgttgtatttgctttgtgttagctgcccctctgattttgtttcggtagatgtcttggcaaatgtataaataagatgcatggatgtgacgtttcatttctgcttttgtttgagatagatatctgttgaattttgtatcatggtgtgataacttttggtctgcgtcattcgtctttctcatttgtgtctcgttaggatttcgtggaggatctattggatcgaattcagtctctggcttccaatggatggaaacttgaaagcggtatgcttattttgtcaacttctcatatctctttgtattacaagattgcaatcttctacgaaccctctcttttaatatccttatctaccttgtttgacttacaaattgatcagttcatatgactagagatattagttgtatattacaattgacaatttcatgcatattcaatgtgctagtacctaggcctcatctctcgtttgaagctcaactcgttgctggaaagtttcatgagctacgtcccattaaatgtatggaacaaccgagtccaccttctgatcattcgagggcatacagtggcaagcaaaagcatgatgcattgacgagatatccccagagaattcgtaggttgaatatatttccagctaataaaatggaggtaatattctggtttttgatgtcattgtttatctgaataggacatatttcatgctaatggaagcttattatacttgctaccttttcagtcgtcaacatttttcttttttctaacctattatatttgtagattgatatatgggttatatggtgtccttttgtattccttttctttgtctaccctttcttctgattctgtaactatcaaactcgcaggatgtacaaccaattgatcgttttgtcgtggaggagtatttgctggatgtgctcttctatttgaatggatggtgtgtattttcccaaagcttgtgttcttttgacgtttttgtatgtttcttctatatttttcttgcacagtggtcgtccattcatgctggttttggtgtagatcttggtttttgtcccccaaccatagcaaattagtcacgtgttttctaaattattaaccttagagtatggtgtattaatctaagttcatgacttactctttgaataatatggtcactgattcagctgggcgactaattggctactactaagggctagtgtttttgcgttgagtatctagttgaacctagcatatacttatttaagtcattattatggttgtagacttgcctagcatatacatgttttctaatcaacatcttagcttatgctaagtctctttctttctggttactaaattttgtttgccttcttaaattatatagaattttgtttcactaattaatttattgcaaagctagtcggaaggagtgtgcatcctacatggctaatcttcctgttacatttcggtacgagtatcttatggcagagacactattttctcaggtaacttctgttgtataaattttgggattatctctctagtgagtattcacgttgtaatataaaagcatacgtttctggcagattataccaattaattccaagatctgtgatttttaaatataacaattgtatctactgtttttcagatactgctgctaccccagccaccattcaagactctttattatacactcgtgattatggatctttgtaaggtacaaaggattatactgttcatccgatggtttttaaatccctgctgttatttcttttttcaacctgattccaaatattcaattaatttaggctcttccgggtgcctttcctgctgttgttgctggcgctgttcgtgcactatttgagaaaatatccgacttagacatggaatccaggacgcgtcttatcctctggttttctcaccacttgtaagtatataatttcatatttcttacctcttgattttttgtaatctggaaaaggtgctttattgtcgaatgtttggtgaatgttccatatatgttagaaagttacctagcttataaaatatggattattgaaacataaaatatggattttcagtcagcattactgacgattcgtttacatgatacagtggtcgtgtttgagtcttactttctcgattaattgagaaatatgttattcatcacatgaagttgattacgtatttcgttttgctctctactctcatgttgataactccatgcttaacagatccaacttccaattcatctggccgtgggaagagtgggcttttgtgttggatcttcccaagtgggcccctaagcgtgtatttgttcaggagattttgcaaagagaagtacgcttgtcttactgggataaaattaagcaggtaacagatcgtcagatatcctaatagctgccaaacttaagcatcagatatacttttctcttagcctagggttatttgtcttattccattttgtgggggatcaatgtttcatcttgttatccacatggatatatcattccaaacttaagcatcagatatccttcctcaggctatattgttttttctatgtgtgtctaacagagcattgagaatgcgactgccctagaagaattacttcctccaaaagctggtccgaattttatgtattccttggaagaaggtaaagagaaaacagaagaacagcaattgtcagccgaattgagcaggaaggtcaaggaaaaacaaaccgcacgtgacatgatagtgtggattgaagaaacgatatatccagttcatggttttgaagttactcttacaatagttgtacagaccttacttgacatcggatcaaaaagtttcactcatttggtcactgtcctggagcgatatggccaagtattttcaaagctttgtcctgataacgataagcaggtgatgctattatctcaagtgagtacatactggaaaaacaatgtacaaatgacggcggtggcaattgataggatgatgggttatagactagtatctaatcaggcaattgttagatgggtgttctctccagaaaatgttgatcagtttcatgtgtctgatcagccatgggaggtcagttgcgttttaacagaagtatatttattttctacactctgcagagcaagtttgtttatcttcgtaaatctgtttctgtctctgcagatacttggcaatgctcttaacaagacttataaccgtatctctgatttgaggaaagatatatcaaacattacgaaaaatgttttggttgctgagaaagcttcagccaatgcacgagtagagttggaggctgctgagagcaaactttccctagtggaaggtgaacccgttcttggtgagaatccagcgaagatgaagcgtttaaaatcaacagtggagaagacaggggaagcggagttatctcttcgggagtccctagaggcaaaagaggctcttcttaacagagctctctctgagaccgaggtattatatattagtttaatgcagcacatgatcttattatttccttttatctactaaaagctaattgagttgacttgtgcataggttttactgctcttgctgttccaaagtttcttaggtgtactgaaggaacggctcccagatccaactaaagtgagatcagtgcaggatctaaaatctataggtgctgaagatgacaagccatctgcgatggacgtggacagcgagaatggaaacccaaagaagagttgcgaagtcggtgagagagaacagtggtgcttatcaacacttggctatctcacggcatttacaaggcaatatgcgagcgaggtaaaaaataacttaatagttgggatgttgttgtaagagctttagtagattgaatattgacttgtttcaccatgttcttgtagatatggcctcacatggagaagttggagtcagaagtgttctcgggtgaagatgtgcatcctctctttctccaagccatatcttctgcacttcaattcccattacattaatcttcctctttcaatctcaatcaaacctgtctcttttgttttttgttatgagattctgattctgacatcaagttattaggaaattgaaaagagtcaaaaaacaagagtttaaacttttaacaccagtcttgtttctggagctcgtttctcagagtggcctacgcaaatatcgaaagcatttcatttaccaaaaagggaactgcatgttccgatttgagcacaattgagcaaccgtactataaaattgtctgcttatgagtaacaatattaatttattgtaagaaatttattatactaagaagttgaagacaaacataatgctcaagactcaagtagccggttactacaatgagtatcaatttttgttataatagcaacaacattctggtaatttttcaccttttttaacaaaatcacactgtcctccatcatacttcgcctttctacagtttttgtaacattgatgatttccgtaaaatctcaaacatggcccaatgcaacgatcatattgttggatttggatcactgcaattttataacccaagttatatatatatatatgtgtatgtaagacattccatgaaaacatttttctaatttctgaaaagataatgtttaaccattgctcttcaaatgatcaaaaaaacagttaacctctctaaattaatattcgataaattaataatctctgtaaattgaataataaaaacattccttgtgttgccaagatgttgtaattacaaaccgaaattgtcaatatcgctacaacgaaaatagtcacataagtttttgtgacatccattatattcacttgagaaaaatagcctctcttttaaaaaaaattcagatctttatgaaaaactcaatttatatgatatatatttgtggagaaaaatatcaaatttgaactactctttcatttcttattattactataaatgaatgttttatatttgttaatataaggttgactaaaatttaatgtgacttaacagtgggtgattggttaggctgtagctgtaaattaattgttgtaagcttttagctgtagatgtgttagctgtagatttagtttttttttgctgtaaaattttggcagtaactttataaagaaaatgaaaaatgattcgtaattatttattatatgtcattattgtataattttaaaaaatattatttgaaatagttatatgaaatcagtaataaaaattatattttagttttttaataaagtatctattataacattaatataaacattcaaaatattacttataatatacatgagtaaggaggaaatttgtatatatgcacaatatataattttatataatatacatggtgatgtgtatatttgacgttgttgttttcagcttattattattattgtaataaaatatatatatttatttaatagttagtatatatatacgtatatatatcatagtgacaatgtaaataaaagtatataatacgttataatagatgacagagaaaataaaaatctgaatatctaaaatttctacagccaaaataataaggctttaagaaatactaagggagttacccgcgccttgcgtggccaagaattttttctgaaataaatttttaatttttattgatagaacatatttatgagatttggaaattctacataatattacaaatgatcaaacaaaccgtctctaaaacagagtatttaaacattccttaaaacccataacaacataatactcatcgatcatttttgtagaaaattttcattatcactcaatcatccaaaccggaacatcttgaattcgtagcaacccaagcataagcggtggagagtgtactatatatataaatttaataggtcattagacgtatggattatgtatatccaacaatatatgaatttaaatgctgaatattaccagtttttgatttcctcaagttcgtaaaactccgggtgaaaaaaaattttagagcattcaactctattcatgagacatggttttcctgtaaaatattaaattagtgatgttttctaccgtttttagaaaatacaatgaataaatataagtcaatacctttatactcttcaacatgccaaaacatcaaaacacaaaaaacaggatcacgaaggtacgaatgatcatactctcggtaatcctcgcttctgaaactctattgtatacatggctgaaacataaaagggtagcttattcataatatgaataaaatataaaactaaaatatgaacacaatatcaaccaaaaccaagaattataaacttcaaaagggactatggtacctcagttaacatcgtcgaacgtcttttcttttatcacttgccgaacgtcttttcttttatcacttggtgcataaggctatccaatttcattttaaaaactcggcaaatgatatcaggcctatcttctcgcttaagcttgtgcctggctaggtaacgcacgacttcagaccatttaggattgcacgtaattgttacaaaaagatcgggaaaacatgtaagaaatagtgtcaaaacacaaagtagaaaaaaaatacgataatagttaaaaagtttacatacgaatttgtaattttaagaagatcaaaagagaagaaatataaataatatcataaaatttaaagggttataatgcaaatgttgaactttgggggaccagctgacttcctttaatcttctttgggtctgcctatgcggcagacccataaatactttttacagaatcaaaatataactcaaaataataagtaattaaaaacaactaaaacattattaaaaaatcttcatctcttttaaaaaataccagaaaagttatttagatgatacccaaaagttatttatttgacacaatcaaacgaacatggaactcaaaaaataaaataaacaaatcagtaatatcatataaacaccaatttatcaaacacaagcacacaataaacaactagattcataaaaaaaatttgtagctatataaaaaatcataatatcaaaactatctaatgaggaaaaaaagaaactggacgataattgtgtggccgagactcggtatttatagcttaggaattagggcaaaacccggtattatccatttttcatgtttgtaaaatagattttttagggttttacatatgactgtgtatttttttgggctatttttttcaataatttcaatagtttctttataatcaagttagacaattttttaatcatccaagacacgatcatttctttaatattgatatatgcaatgacagaaaatccaaaagtattgacttatataatattcaattttcgctacctttttatttttttcatacaaatactcttcagatcttgttcagttgatgtcgatctaaactttaatcatgagcctatcacaatgttgttgaagtacataaaacaaagaattaatttatttataatcgagttaggcaaattttaaacaaaacaagtaatatagttatacataattgtatcaaaatatcatatattgttgttatatgtattcatgatagtgaaaaaataataaaatcttataaataatcagctttatatatgaaaatatataaattaatatttcgaatcacaaatgaatctaaccataaaaattataactatatattatgaatcaaattttattaacaatacaagaataaacaaagaataaacataaattactaaaaagaataatcaatttaaatatttttaaatagttttcaaaacaaacccatgcgtagcatgggtactcatatagttataacaaaagttgaataatctttttgaccttaaacacactaagactaaatcttatcgaagaggaagcgtctctctcttctctcacatctattcttcagagagagaaggtgatttccggtttcttagaattaaaatccggcgacctcttaccataagaactttacctctcttcactcttccagatctttcagaaaggtaaagcatgtcgccaaaaaggatctaaccagatctgtttataatcttatctatatatgatctaaataaattttgatttcatgtcggattcttcctaccggctatgtccgggtttttgtcttctcgctctcgcgagattgatctcctttcttctagcctattgaaaactctgcttttcttcaaatttcaactgatttgcccatcctctcgtagagtaatatcttcatcatctcctttggctcatgaagtttagagccaagatccgactacatcaagttcggtgtcgtccgtgatggagcttccccggagttggagttgctcgaagttttttgaagcttatcataaaattgaaccgagtttcttcgcgttttaggcttgaactggagaccggcaaatgggaagggacttaccaccgatacagaactggaccgcgatggctatcacagttggcggtgttcggcgtgatgcatgcaggggtgtccaattacctgacgcgtggctcggcggagttccatcactcaacacgtgtcagcatctaaagattaggattttaatctcgaccgttaaaattacgcttgtactttattttgggcgtttccctatgtaaaaagtccattgggcctttcttaataaaatcgttggccgactaaaaaaaaagactaaaatcttatcaactatatatacgttaaattgagattagtatccacagatttgtgcatcacaccacacaattgctacttgtaagctaccaaattagacaacattaaaaatttatatttttcatatattgattatggttttttgtagtcataagtttttcttctacagaggaagaaaaaaaagagtaaaaataagttactttcttttccgcatcaccagttatattaaactagataaagcccgcctaaataggtgggtgtaagatataaattcaaatttttatcgataattttaaaatttgaatagtaaatagtgtttcacacacctttttaatatttaatttagtaatttttgtattaaacaaaatattaatcatatacattcgattttactatacattttaactatttatttgaggataattaaatctattttaattttatacgctccatcttatagttgatatttgaattttatatattaactcatacacttttcagcctacaaaaaaaaaaactcatacacttttcaaatatttaatttagtatttttttcaaccaaaatttaatcttacaaattcaatttttcaaaacaatttaaatatctactttatcataatacaatacattttgatttgattgtattcaaactgaaatacaagtcgatttgtaatacaaatatagttttagtctatacattccaccttatttttagtttttctttttagttaaaaaattaaaagttaaatattttaaatatctatgtttcttttatttagttttcctatttatttaagaaaaaagtaaatattttttgtcatgtcaacatctgaacgatagacttgatacgtgtcacgatcacgcgagttagtaactttgaaaaccatactttatataataagattataggaaatatactctattctacaaaaagtcattcatgaaccaatttgcttacatgagagaaaaggcaattacgatttcgagagttcttagctaaacaatctgctcgagtattaaaactacgagctaatgctgaaagaagagaaaaaacaaactaaataccaaaaagaggccaattccgttgcaaaagttggtcaatcgtcttggtgatcaacgagagagatcaaatctgcgcaatcggtagcaaaggtatctgtatcgccaatgctgatcatgcattccattgcccctagcaaagattcaagttcgacgtaaagcggagataagttttttcgaagaaaaaaaaagttactcatgtaagcgagtaagtaactcaaaaaaacaaaaaaaaacctagttttctctctcgcaaaaccagccgccgtctaaagaggttttgcagttttgaggctagaatgcggtggctaccttagcactgattctggccttgtgcgtctttgtttaatttcgtctgtagatttcttccttctcgtttttatggtgatatggttgtagggttgatggtgttggggagtgcggggaccaatttctcttctatatctgtttcggaggttggtctctatgttgttggcagctcccgtttttaggctttgtttcaattttggctgtatatgcggctggggttttgattgatttccagatcttgatctggttttgtcagttgaagctatgtcagtgtttgtcacgatatggaattgtttccttttgtcttcccccgttgtgttctgtgtgtttgcagttgaagatgaagtcgttttgagttggtggatgcctctggtgatgggttctgaccgggttatgtgacgttcttgttgtggactaggcgacgactcgtcagggtggtggctgtttggaggcgatttaggttgtcttccggtgcgggtatttggctgaaactgggtcggcaaatgcatgcgtgcaagaggtgtttgtcttatttggcttgtcatttggcgattctcaagggcttcccttgttcctagtttattttcgtcttctcgtgtgccttggtatggtgtgattgttgtctctctagtatcatttggttcttgctttcgttcctggcggtttgacttcagaaagatgtcttaattttgtggcattaccagtcttattgctgcttcacgtgttcttttggaaatcttagtgagaacctctatggaacaataggtcagcttagtgctttggtctccatctcttctttttgcgagtttatcttgttgtttttacctttcttggtaatttggctgtctggtttttagggattagttttcctccttttggtctttgtctctagggatttttgtttatccgccggcttatgtatgattttcgacttgtatgttctcgttgcaattctaataagataaaaaaaagcgagtcacatatcaaaatttcaaaaagcttggtacagttttcaaaacatgtaaaacatttccaataaccgttttgaaattcattatttcaataacacggtttacttaaccggttctacgtagtccacccttacccattgacatttgacactctgtcccgatataatctcttttgacgaaagtcaggcaaagaaaaaaatgagaatcttcaaataaaaaaaaaagaagagactacggagagtcaaaaacagtgagagctttctttcatcttcagccagatcggagcaatcttctccatagattccgtgaaacgatgggaatagccaataagctccggctaagttcatcatctctcagccgaatcctccaccggagaatactttactcatccgctgtcagatctttcaccacatcggaaggtcaccgtcccaccatcgttcataaacaaggtctcgatatcctccatgatccttggttcaacaaggtacttgaaaaacttgaaactcagtttctcacattttgagtgtgaacacgaacctggatctgattttgattcatgttaggggactgcgtttacgatgacggagagaaatcgtttagatcttagaggtcttcttcctcctaatgttatggactctgagcaacagatttttcgttttagtaagttttacttgttgaaactttgtttattgtttatgttgttgtcttagttgttgacatgattgattttgatataacagtgactgacctgaagagattagaggagcaagctagagatggaccttctgatcctaatgctttggctaaatggcggattcttaatcggttacatgaccgaaatgagactatgtactataaggtgaactcgttttccttttttggtctatttgctgtgaaagattttggttactacgcttgtttttagtttctgaagaggttatttacttcgatttttacgttgcttttaggttttgattaacaatattgaggagtatgcgccgatagtgtatactcctacggtaggtcttgtctgccagaactacagtgggttgtttaggaggccaaggggaatgtattttagtgctgaagatcgtggtgaaatgatgtccatggtttacaactggccagctgagcaggttcttcgatatatctgacactgtgcttaagatatctcaactctatttggctgactaatccaatgcgttctaccctctttctcttattgtatacctaggaactggtatatctttaagtgaccattagttttctgatgtaacgtttttgctatacatttaggttgatatgattgttgttaccgatggaagccggattttgggtcttggagatctaggtgttcatggaattggaattgctgtagggaagcttgatttatatgttgccgcagctggaataaatcctcaacgggtacttgcaccatctaatattttcttattttccccatctccatttttctgtatgatgtgatacaattcttatgtgcacatgctggtttaggtactacctgtcatgattgatgttggaacaaacaatgaaaaactacgcaacgaccccatgtgtaagattcatttgctcctcttaccttcttaaagtcaaattattggagctgattataataggttaataacggttttcttctttccgaaaatatataattagtataactgtttactgaggtttgatattttattatggtgaaccatatctatcatctgtctctttacatattgaggttgagaatgcatattatttttttagtaggatggtacagaatgtgtagttgagatttgtgtatgcatatatacatatattgaaaggtcaaaggtttatagtattctgtatactgtaggagtctgtcataaaatttggttgtacgacttgttatttttgtctttcatggtttagggatttccaatagttcagagacatgaacgagaatagcttattatctgtcatgtaatcgttctttctatgttttctttttgacagacttgggtctgcaacaacgtcgtttagaggatgacgactatatagatgttattgatgaatttatggaggcagtgtatactcggtggccacatgttattgtgcaggtaaccgatgcttcatagatctctggtatatcaaatgtttcttattatgaaacttaaatgttttttctacccacagtttgaggatttccagagcaagtgggctttcaaattattgcagaggtatagatgcacctaccgaatgttcaatgatgatgtccaggtaatgagtcttccgccttagaacgattcttgtgaagattaaatactaattatttatttatttctgcagtatttttactatttttagagcattttagtcactactatttataaaagtatcatattttctgtgctcaatccatcatcttatcgttcaatagttattcttaatcttttttatacgaccagatgcattaaagagactgacgaagggaactcgaaatctaaatgctgatactagaatcttgtttttcattctatgttttcatgatctcgctcaggggacagcaggggttgctatcgctggtcttcttggagcagttagagcacaggggcgacctatgattgatttcccaaagatgaagatcgttgttgctggcgcgggaaggtaagccattctcggttggtgtttttctcgtctttcctggtcctagtttaccagaaattggtattggtaaaagattggtcttgctgttactgtttaattatttgttggtcagggatctttcgtttatttgttggttttgagtaatgtttgaagagatttaaaatgaaaactttcagctgcatcactgcataagttagcttagactacttatattagaatactgagcttccttgtaaaaatctttgatttcttcagtgcgggaattggtgttctaaatgctgcgaggaagacaatggcacgaatgttgggaaatactgaaactgcgtttgatagtgcacaaagtcaattttgggtggttgatgcgcaggtatgttattctatagtggagtaattgattttcagattagggagctgataagacgttttagccagtcaagccatttccctctggtttccttttactgctgatgaaatcacttcatcatcattttttttttgggcgtgtgttttggtccaatagcttaaggagctgaagttgtgaactcttttttttgcacttaaatcagggtcttatcaccgaaggccgggaaaatattgacccagaggctcagccttttgctaggaagactaaagaaatggagcgtcagggattaaaagaaggagcaactcttgtggaagtggtctgttattctttctatcaatatgttcatcaagtatactaaatctaatttggcaatgagtctggtgttggagagaaattctcccttaaaaaagtttccctgcttaatactgacaagaaacaacggttttctgtttcatctgtgctaggttcgtgaagttaaacctgatgtgcttcttggtttatcagcagttggagggttattctcaaaagaggtaatgaaagctgccaaacggctaaacatatctagtgctatgcaacagaatcagtgatttaactaattagatgagcgcgcaaatgaaatctagtatttcttcagtgaccactgtcttcataatctggtttccatggtaactgctaagtagatgagtgagctagtagaatgtagcatagctcattgcttgcatgattctgacatatggtagttgatttttgaagtcattgttgggatattgtgttgaaggttttagaagcaatgaaaggttcaacctcgacaaggcctgctatatttgcaatgtcaaaccccacaaaaaatggtaatttgtcttctttctttgccataaaatgtgttttgcggttatttgtgattcttttttggatagatgtaataggtacttgtgttttgaataacagctgaatgcacgcctcaagatgcattttcgatattaggcgaaaatatgatttttgcgagtggaagcccattcaagaatgtggaatttggtatgtatgaggacctctgtatcatttagcatacgccattttatatgaggctttttcaaatattagtaccttttcttgtggcaggaaatggtcatgtaggacattgcaaccagggaaacaacatgtatctatttccagggttggttcctcttgtttattgtccgaaagaattgcatacattcttgaattgatacattaattgtcatgaaataaattgattttctaatcctgtaaaatttattgtagtattggacttggcactcttttatctggtgctcccattgtctccgacgggatgcttcaggccgcatccgagtggtaagctcctttctttacctttttcatttatcattcctgatttattctcaactaaagctgaagtgagtaccatgatatataactacggaccaaatttaaatgattattaagaatgtccgcatatttggctgatgtcacgaactataacataccccccatccacgagacaggaaccacagtagttcgacatgttctctccaaatggtattcccaatagtaggccttcggttgaggtttcatattgtagttagtgtaaaactcatatttttaaggagaccatgaaaataaacaagtcccgtaatttatgaatgtggaatcatgacattgttctgctaaactactgcagcctagcagcatacatgagcgaagaagaagtgctagaggggattatataccctccaatatcaaggtaagagtaacacaatcaaagaacatccttactgttacataagaaaatgttttgatatagttgctacatttggcatgtggaattgaaatttcaggatacgagacataacaaaaagaatagcagctgcggtgattaaggaagcgattgaggaggatttggttgaaggatatagagaaatggacgctcgagagatccaaaagctggatgaggtaacaattcagctaatgacttgctttaatataatcataaatgatagaaaaagaaaagatgtcaaaacaacatcccatctttcacgtgttttggactcctgatcataaaatcgtattctacgaagaatgtcgatcgggtttgattatatgtaaagaacagaagagtgtttacctgatttctcacttagagaaaataaagactaaaccagaaactaagcctaaatgttagttatgttgacgcggtcttgtgtattccgcaggaggggctgatggagtatgtggaaaacaacatgtggaatccagagtacccgactttggtctacaaggatgactaagtttggttcccaaaatgaataagtctactttctcttatttatatgtaaaaatttataattggggttgctttatacccaatcaaattcatagctactgctttctcttgttcttatgtaaaaaaaaaaaaaatatataattgggttgtttgttatccaatcagattcatagcttccactttctcttatttatatgtaaaaaagaagttatattcaatcagattcatagcagcaacattttacatacatcgtattagaaatgcatttacttttataacttatagtttcaggtcaagatactaagagtagtgagtgaggaacaatttgaagttctttaattcaagcaatcatctttatcaatcataacatgagtaaatgaatgagaaacaatacaccattctcttccaattaagctattctctactggaaaccttataagctagaccactaactctcaaaccgtaggtggtaagtattctaatccaattagcagcatggaattagtttctactgttgtaaatcatgagagattgctatatttgctcgagacgaactaatccggaaaatatatgaagacgaatttctgttacacaaaaccatgggtatactgaaaatatcaaaatgtacgtgtctagtgtctatatagcaacaaatatatataagcatcaagatgtactcacaaaaggtaaagaaaagcatataatatgtgaaaagaaagaagaaaaaaagcaaatgtctctctcaccagtgaattgaatcaatgttattatcatgctgctgcgggaactgtttctgcaatgatttaggagagaaagcaatattgggaaaaggttgatgatccactggtaggaatggagaaggatgatgatgagagatgtaactagtacatgacatgttgttattgttttggtcttgttcttgaaactgataattatgatgattctgttgttgaatctgctgttgttgttgtctttgttgttgttgttttgggctgttaactttctctccttcggtgtctctatatttgcagaggtagacctttaatggagccacgtagtcttcgaaaccgagagttgtgatagcccaaatgatatcatctccattgatggtcttcctcttttctctttgacacttgtcagaagcttcaccagtgacgaaactaatgaactccgagacacattcttgaacggtttctttagcgtcttttgagatcttaccgttaccgggaagaacttttttcatgatccttccgacattcgcaatgggaagaaaccggtcttgttctttgttgttgttgttgttgttgttggtctttgaagaagggcttcctggatttgtttcagctactccaggagacccatgatcttcttctgggctctcctcagtcatatctctatctctttgtttttttttgtgattgatgttaaccacatgtgatcaatctgattttatggttaagcttagtgcatgaaactaggcaacttttctatttatggataccttgccaaccaaatttggaactccatgcgactcgctcctttttttttttttttttttttttctttgttatttgccagataataaagaaaagtgtaagaaaatagcaatcatgtaacatattgtcatcaaatagtgttttcaatttattattttccgtagtatgtttatttagtatgtagacaactataaattatcatgtctccataatgctttgatttattgtattatagtaatttcctaaactctagcctggtaaatatatatggtggttatttatccgagaatattacacgtaaaggcactattttgaaactttggccacaaataggcactttaaaagcattagtcactttaactcagtagaattacccctttaccctgaaatcgttagtttaacaaaacctaacaaatttagccggttttcggtttaattttttaatctcaatctctaaactaaaaccaatttgtgagaaacctctttttctcacccaatccttcacgacgattttacagtttcatttatctgggcagttaaaatcatcacaacgacgataacatcatctcgactccggcgatcatcccaacgagttttctaccggcaaagtcatttcctcgtccctctcccgtcgttatcgtcaacaaagctttcaatcggccgacattaattcgtcctctcccgtcgtcgtcgtcaacacttgttctcccgtcatggtcttcattttcttgtctctcaatcgattcgtcgtctccggcgtgtgctagtaacttctactcggtcctcaaatgcaaggtattaatcttctccaatcattttatttgctctaattattcaaccgtgtgctaattttatttataatatccaacattgtgaagagctaataggtgaagacatgaatgctacgttaggtgatatttcaaaaatgttaatcacaagaccttatcttcttaccacagacttcggcttgcttatctcctcattgttgacggtgtcctcgtatcctcaaaccaacctattacgtctacattaaaatatgtagagatgttggcagatttggagaagttccttaactgactgaggtctacgtaactgactgtctatacacatgtggataaatggtcaaagaaacatggataatatactttggattgacgtttattgttcatgtataaacttatgtattagtatgaaactatcatgtgagtctttagatgatcatggactggactgcttggacaatcattaatggacaaatatgtctttgatttgctgcgaatatgtttatagctcgataaaattgtatcaacatgtctatatacatgtggataaatggtcaaagaaacatggataatgtactttggattgatgtttatttgtaaatcttaatataaatgtcatccagtcatagtgaattatccaatcagacaaacgaattaatacagttatgttgtggatggattcatatggatacattaacaattatctttatctttcaacatgaaaagcgtttgatatggatacattaaccatatcgataatcttatctctatattgctgttgaatgttttagtggtttgtatcatattatttgtttgttccatccataacaacattttttcaagtgcatctaacatttgatatcagttaacaatgcgaagaaaaataaataattttgtgtattttgaactattgtttatttggtaaatcattctagctaattatgtttacaaatacgttaaaacttaatataaatgtcatccagtgataatgaattatccaatcagacaaacgaattaatacatttatattgtggatggattcttatggatacattatcaattatctttctcttttaccatgaaagacaaatctaaaattccttctaccggaaatattgagatactgttgtatagcgggaatattcccaccatcaggttttaaactatattgtttacaatatgatcaaaaaaaaaaaacatatgcacacttagagacaaagagaagctcgtcagctctcccgtctcaaccagctcgtcagctcacccgtctgaagcatctcgtcagccggtccgtctcaagtagctcatcagatcgcccgtctcaagcagctcgtcagctcacccatccgaagtatctcgccagccggcccgtctcaagtagcttataagctcgcccgtctcaagcagctcgtcagctcacccgtccgaagtatctcgccagccggcccgtctcaagtagcttatcagctcgcccgtctcaagcagctcgtcagctcacccgtccgaagtacctcgtttgcccatccatcttgagtagctcgtttactcgtccgtccgaagtgtctcgccgacttgcccgcccaaagtaactaacctactcgcacgtctcgagaagccattcaactcgtcacttatccgccggatcatccctaaaactgcctaactcgacatacgaccttcctccagtaatggcctagctcgtttatcgcgatatgaactacgtgtggcttgatccctttctaagggtacgtaggcagccttttgcagtttatcttttattggacttgatatgttggatactagtttttttgccgaaacaatttcttaaattttttccatacgagtttcttgtttaatggtgctcaagtcaaacctccagcaccaacctgtagtaaatgcagttatcgatggagatgatatcatttacagagactacgtggatatcagtatcgctgttggtaccctccactctagttattctaaacctttcagataactacaacttccatcatattaagattttcaaagtctgtaaaaaatggctattgcaggccgatactaattcagggagagattcctaatcgacgcaaataggcctctccaacaaatctctctttctctctatcacactctttatcactctctgctatcgtagatcggagaatctcctctgagagctctaatctctcagtaatcttcaccgcgtgtccggatctaattttcctgtaagtaatctcattttcaagatttatctgcgatttcttctcttgatgctaattttcctaattttccccgaagaatcgagaccattatgtggagaagaatcgtttcatcgcatcttaaatccatctccgccgtcgggtcctgcgcggctccgtcagatttgattttcgatatagcctttagctatcagtgttacaatcaattatcacagtgagaattaacaaccatcgacattgagataatttcactcggcgaaggtaacttccttttctgtaaatatcaactgtggatttattagaagggaaccaaatcaaaacaaacatttctaaccgggtaagtaaatttttggtttagatgagtggggatataattgtccatttatttttcaaaaacaaggaaaagtgccttgtacgtgagaagtgcctcaaaaggaataaaagtttgtagaagtgcctaaacatgtccaattccctatttatccacaacaatatattgtcatcgattttgtcacttttcttcaatacgtttcctctcacgaacctaaatggaagaattttcttgaaaccagttttcttaaatcatcataaatgaaattactatttttataatgttaataaattaaagtgaattaaattttgtaatagattacgtcattagaaagaaagaaatagaaagcacataagcaatatcttccatccacatgaacataattgtgatttttttcttgtgaaaacatgattgtgattttctacaaatataaagacgagactaaaaaacatgattgtgattttctactaatataagagatttagagttttagtagcgctgttagtttaataatattatgtttaaaataggaatatagatcttttccatctaaatctgatctgttaaaaacaaaaataaaataaaaaagagttctagtaaaataaaaccatagaccatatattctttttttaatatgtgtttgctcatgtctagaatgaattcaagaacacatttttaaaaaaaggtggtcgtcaattggaattgtttgtagattacgaatttctagaactgcagaattcctaataatatattaattacaatccaaaaagtacgaatgatttgtttttatacaaatgcttttagtatttcaaacaacaatttctttcatttcttatgaacgacatttattcttatatttatgaattaattatattagtaagttatgttgcattatcaattataactatagttgtatacatatttgatatataaacatataaatgaatatatatgtgtttgacaaaaaaaagaaaaaaatatgtatgtatattacacatatatcatatggtgtaagtattcattcatagtctaagaaatttccacaaaaggttctcaacatttacttaaaacatatttaatatatgcaaaaaaaaaacttttgacgtatttgttctttatgctggttgagtccaaattgtttttcatctagttagcatccacattgtggcctaaatctgttatgatacttttgatatttaggtgttgggctcttggaataatgaaagatggctatatggtaaactccgcgaagccgaggataggtggaaataaagtaaatgtgggtttaatttaaaaatgttagtcttacatagaccattttcataaataaaaaatttccggctcagactattttctaaaaccactgctctctatcgataaaagagatgttggtgaaaggagctgcttccactttggtgattggctaatgatacatagcaccgatgctctccgtaatacacagtcctaaaaaatcaactcaattaagtcagtaatacacactccgattaatctgttcattgtgatcaatgtttactaacctttgtgttttgtgatctcccatgtcattccacccatcaagataaataactctagacatatatgtcttggagaagacaacacttgcataaggtttctatgcttcctataatcttgcaattcacgaaaacgaatctcgttcgatcaattgatgacttttacatgtatttattatgagagttggtgtcttgtacactaatcaagatgcttttaatactcatcttaagtttttatttttgttataatctaataaaatatttaaataaaagcacacattgtgtttttaagtatttgctttttaataaactttgttcgagaaaatctcatttaaaaacctacattattaccaaactatacaaaacttaaaaaaatctaattatgtcaattgactctatggtggaacatgactatgccactccacatgatgtaaatgttcataacttctcttgaaaaaagcagaaaatgcttaacatttgctcaaaaaatgcttaacatttgcttaaaaattacttatacttgcttggattagggagttttcatcttaaagggacaagaaggagagaagttaatagggctacttacaactgcaatcaacctccattcatcttcccaattaggcattagcgataactactttttcgtcactacttagtcaataagttaaggtttcttcaaattttaatgttgtgaagaaaaaggcagatgctctagtatagttactcttactctctcatcctaaatttagttatgctatgatcactatattacaaactattatttctttgacaaagaccttataccaaattcatttgatattcttagctgtcataaagaaaaagatttcattacttttaagtttttactttttaacttcatatgaaaccttttaagttcagtattttcaataatagatagttttgtagtttaggcatttaaaatttttgagacccttaaacgtccttatgagttggtgtcttgcatagctttttgtacatgatgcttttaacactactaatcttattttgatatctatttttattatctaagaaaacaaaatagcatatattttgtgtttacgttggtgagtaattgtttagtataaaccaaaccgaacattttttactacaagtctacaaggtgtcaaggtacaagcagagatatacgcgggaaatcataacaccgccggtttgaaccgttgttaacaagaaatcataaaagacgttagaaaactttttctttgtagttttttttataaatgcattttaaatctcatatataaaatataaatgttattacatttgaaatatataacattcactgaatcattatttggactttttgacatcgactcatactgtcatcacttatgaaataatgctattttagttaattagtagtatacagtaaatggttttgtagtttgtacaattaagaactattagaattttacaggtctatatattatgagagttggtgtcttcatgtacagtaatcatgatgcttttaacactcaacttatgtttttatttttgttataatctaataaaaaattataaaagcacacattagtttttaaggattttgcttttcaataaactttgtttaagaactctcataaaaacctatattattatcaaactatacaaaaactagaagaaaaacaaaatcaccagaatttcatattttttatgcaagtttataaatagttaaggtttcttcaagttttaatgttgtgaagaaaatggcaaaggctctagtatagctactcgtactctctcattctaaacttctttatgctatgatcagtacactacaaactattatttctttgacaaagatcttataccaaattcatttgatatttttaaaggaagaatatttccttaattttaagtttttactttttagcttcatattaaacatttttatttgagtattttcaataatagatggttttgtagtgtaggcatttaagaattttgagactcttaaacgtcctcatgagttggtgtcttgcatagctttttgcacatgatgctttcaacactactcatcttattttggtatctattttaattatctaagaaacaaaatagcacacattttgtttttacgttggtgagtaattgttttcaaaaaataaaaaattgatccatttttgagaaactatcataaattattaacacacaatacaaaaattaaatttgttaatgcgagttttataaatagttaaggtttcttcaccaatttgaattttaataatctatatacatggtgattgtagttatacaagtgtgtttggttgattaattaagattatttgattgatatcatgtattaccaaaacgattctcccatgaataatgatgtatcttataagctaagaatcattattgttaataaatatataatgatccaaaaaagaattgaataatggctaagaaattgatgtaagagtgtagaaaaatgaaaatttattgaagagtcaagaattgtggaagttgaacaggagagccgtccctaacaaaatgaaaaccacaagcccaaaaaacaatataatattttaatagtgtgtttaaaaaataaaaaagagatttgtaaaaaagaaattcgaactgttgccctgtttgttcccaatctgaccaataaccactagactaacaagagtttttgacaaatttgcggccgaaaaactatatgatatatgtaaaggccgcaaacccatgcttggcctgttttgtctcatggccggctctgagttggagtgtaaactgtgtattcaaaattataaccaaaattgattgtagaaaaccaaatcaaaatggtttgatataaaaaccaaactgaacctttttcactacaagcatgaatacgcgggaaattcaagtcattttaagtagaaaataaaggatgttttttatttttgaagaaaaataaaagacgttacaagcctttttctttgtagttttttagtgcattttaatcacatatgtaaaatgtaattgtaattatgttaaaatctaacgttaattgaatcattatttggacttttgagatctacggatagttgatactatcatcattagcgaaaatcaacattgatttggacattgttagtcgatccgttttttttactgagtcgaatgccacgatgttactttaggataatgtagacctatgcaaccttccttggcctattgtgtattttgaacagcattttgctagttatccagccccataatttttcggccaagataaaatggaaagagaatcagccatgagctaagccaatttttcctttgtttaacaatactaattatcaaatcggtacaaataatggttatcacatagagttataactcttaatttcgaaatgcataggcacttacaaggaaaatagccaatgcctgagactgtaacattcagcttttaggtgaagtaactttgccgctgatcattctccatctgatgtcaagatccttggtggaatccacatcatttctctcttgcttcgtttgtattattcccaaagaagaatctgaaagcttctttacccctccaagaagtaacttttgtgatgtggagttgatcctcgtaattagttcctgtcagaacatcatataacatcaaaaactttgcttttaagacacttaaacataaacctaatggtccatcaaaacaattaatatatacttttaagagacctagcggtaaacaagtaatttgaggtaaacctttcaggacagagttgtcaagaatgactacctgcattacaccaacccatttgtttcagcttccatgttcttgacaacgtgaatgcatcatccagccaagtgatcaacagcatcaactctttgtagttgcccaaatgcagaacaattaaacattgtactcttcagtagtttcgctcatggactctttttcgcagtacttgcaatgattgtcagttaagacgaggcagacttggaagggaaacgaattctacatagaccagacgaatctattgagcaataatgattgagatgttgagcaaaatgcaatacaagacagcacataaaattgaatatttatactcatggacagagaagttcaaagacaaagaagatgacgcaaggttcatgagcttacctggagtcaccgccggtaatagatgagtcgacatatcgtttatcaaaatagcagagaagacgaaatgtaacaaaaccaattttctaaactggtaaaaataagaaacactttgtcctctttgcaattaccgtgacaagtcagccattatgtacaatggtggaggatatatatcattgattacgaagaatactgaagaaagatgcaaacaaaaaataactagattcttgaaaaaatggtacatacgaaaaagttttgtaactcgatactaccacagctagatttgactcgcatactaccacctacagaacataaacgaatagatagatagaacacattgtaagtgcggatgagacaataattaagtgcagaaagtaaagagaaaagaactttgttaacgatattcagtttttcctattctccgggcccaagtccagatttgatttcagtagaacaagaaagcaaattacaaccaattcgcaaacgcgtaaaacaagcacacctatcttaaattaccgctcctttctattaacgtgaaaccttaaggagaatctctacccttaactaaactcccctgagtctagatttaatcatgataacctaaccctgagctaaactctccctgagcctagacttcaattctccaagtctctggaacaaccttcacacatcaccaaacaagcttcatcacataagcaccaaacccgtgaaactcgtcgcacaaaaccgcgaaactatgtcgtaaaactatgtcacacacacccttagaaagctctcaataatgtatctctatgcctcagctctcctcctttccaaaacttcctagctcctccttatatagccaaaccgatactacaagaaaacatccttttttagacccccaaaaaagtcctaaaatggtcccaaatcgctatttacgacaactttggaactatctcaattggtcgctaaaaaacgttcgcaaaataaaatggtcacaagaacgatggttatttgtgacccctttgtgactaatttatgtgatcctatatcagcgacggtttagcaacagattttaatagttgtatactagggactaaattgtgaccataacaaaagtcgtatattaatgactttttagtgacaaactacaatttttttttttttttttcacaaaaagtggtacttttataacaaactgagttgcaaaagttacaactgtggaaacatccatagaaacagagctaacagtttaaagcataaaggtattaaaaatggagcttctaaacaggttgaagactccattcaacataaccctaaagagtgcagctcctgaaaccatctcctttcctgcttgagacttcgtcaaaaaaacaactgcaactaaatttcaggtatgcaattaccaaaaagaattgcatgagcataccaattattcaaaccccttaacttccttcactgagctggctgaacctcgccaaaaagtgatgacagaaattagtagagtgggttaccgtttctttggaggtttcagaatccctccttccttcagctccgagactttctgtttttggcttcttttatcagactctttctgaccatcttgtgtagtctttctcttggatgcctcttcttcagcttgccttgaagattctcccatttcaactcttcttgaggattctccagtctccactattcttgagaaccttgaagtgtcctcctcttccgttaatggagaaacttgagaatttggccttctttgttgtgcttgaattccaacctgaggacgatgaaccatcaacttctgagaacttgttactgttgttggtggaaatagctcaagtcttgtagctgcaagttctgcaagattcagaggcggagtaggaactgtaagaggtggtgttaaaggtgccggaaacgaatcatctgataattgggattgagagttcatatccgacctacacaattcatcatgtaatatccttcttaccctctcagcagagatctgaactctgtcttcatgtcttggtgcaagtaatggtaatgagtagggagaaggattcctttgatgcgtaaaacgaagacagtgactgcatattcttcttaacttttcatactgaaaacgaagtatagcagtttcccagagtcaaacctaatcctttgaaagaaccttaggcgatcatttattccaaatctaactcttactcggatataggcaatttgattagtagtggcctcatggaagtctatatggataatatgaccaagatcatgagcaatgtcactaacagtttccacacagacataaggcattggtattcccctaatctgaacccacaattctatggtagtaagaaaatctatggcaagaaagatttcccatctttgattaactacaaaccaattattaaagagccaaggctctcttctttgaaatgataaaagatcaagttcatattgaaagaggaattgtacataagtaccatctaaaaccctcccatggactcgttcatttaatccctaagatctaggtaaggaagctattaccgagaacatgttcaaaggtttagcaatcaggctgagtctgttcatgagagatgagctttcttgttgtatgataccttggatgcgggatccgggtgtcataggtgagtctagtttagtgcactgccgattcctgcctgtgtgtgtggaagccagtgagttttggtcccaaggaatcactcgccggttagtcttggaacctaagccaagagtgcatgacgatgcattgggcttattggtatactgggtgggttcaataagtcgtgatcttgttggtttcatgtgtggattcaatgagttgttatcgggttgatagatccatataggagaactcaacttccaatatttagggaggaggaatggagctcaagacccataggttcgcgtctagagtattgtcgagtctctttgcttgtttgtttatctttgcatgtttgcttgcttactgcgtgtttctctgatttgtttgtcgcatgtttacttttcattcgtttgttaacccctctaggtttttagaattgcattagatcggcttagagttgcaataggttctttgttacatggtcccggctcactgagtaatactagattactcatgattctacttgtcttacaggtaacccgtcgcaatcaaccagtagagggaagacgaacgttaagaccgccgaactagggtattgttttatgttgcttttgtaaaaccgtttttgtactaaagtattttggaaaacttggatccgaatataaatatatatgtatggatttggtgatgttttattcatataatatctagtacatatataagtacaatcagttttacaaatcgggaatgttacgtaatgatataaggctttgtccgaaccgcacaacaccgggttcaccgcaagggttggcaagcctacgcggtgaatctagtggggagatgaccggatacgaatcggccgaagatccggaaccctgggaccttagccgaattgcgacaggttctctccatctatgaccccccccaccccccaccccacccccgggatggccgtggttagaccggccatgatcatgcccgcgggcgttacagtcactaagttagggagcatcatatcttgttacaagaatatcacccttggaagctgaagctgaaacccttttatcggcattgcaacaagtatggataaaaagattttgatctataattcttgaaggagattgcgatatccgatcaatatgaccaatggaaaaacctatgatatatctatcgccggaattcatcaagatatcgcctactggacagaaaattttcaaaacattaagtttagcttcacgaagaggagtggtaataagacattacatctattagctaaacgcggatgtcaaactagttgttactttttctgattgtatgtacccgctattatggcttagtgaacaattgtatcttgacaattcaaattaatataattatattttcgacggaaaaaactatatactctcctaagtttataaaaacttaaagaagtttttgaattttctatgcttttaacttctaatctttagtatttgaaatttagtttttaactaatatattctaacttgattattatctaatttattctaaatgattttatgtttggtattttataatatatatatatatataaaatacttgggatatagatatataatatacatggtatatatatatatatatatatacgcttccaacacaacacgtatctgctttctaaatatttttaaaaactggcttttacgctttcgcttctgcgtacctgcttccaattctatgcagctaaagatattagtttagttttcttgttattatcttttatatttttaaaattgtttaaatttataatttcttataattatatttttaaaattaataaaatttttttttttgtgatcaataaacttgatatctatgacgattatatgtcttactacttgaaaaccataatttaatttttataataagattgttatgggtgaaaatcgcaaatatttcgttttaattaagggttttctgcaaaataaccctccaagtcaatctcgtttgcaagtttaccctccaaatccgaattatgcaagtcaaccccaccatctttaaagtcacccgcaatacaaccctctcatatatcgatgatgtgacactcgataactccgtttgaaaacataaaaattttgtgcaaaaaaatcctcaatgtattttttttttgcaagataaacctccatatcaaataaatataggtcaaaccacaatctgaaaaatctcctgcaacatagcccttccgtgtatcaatgacgtgacagtcgataactcatttagagattttataagtctatcgaatatattactttaatgcatataatttaattaagttattgatctaagttttaaataaaataaaaccaaaccataaccaaacgattaaccaaaatatccagaaacttagaaaatatccaaaattaatacccataactataattataaactcaaaatattaattatttttagaaaaacaatcaaatactttaaatgatcaaaatattcaaatattgttagttatatttttcaaaattaaatactcttttacaaaataaaacaaaattttaattttctttctaatatttttcttctttgtatttttttgttaatttcggttaaattaggttaattttagttattttgaaagaaaaaaagaaccagagcgaatctgataaaaatttggttagttacagttatcgattcaaaaatttaattttgtttttttgtttaaaattacggttatcatttatttaagttttagtgtttacccattgcacattgcaccttaaataaatgactcatgctctaaataagttattgactgtcacgtcatcgatacacggaagggctatgttgcaggagatttttcagattgtggtttgtatttatttgacatgaaggtttattttgcaaaaaaaattatattgaagttttttttgcacaaaatccttatgtttttcaacggagttatcgagtgccacaccatcaatatacgggagggttgtattgcgggtgactttagagatggtggggttgacttgcataattcggacttggagggtaaacttgcaaatgagatcgacttgttgggttattttgcagaaaaccctttaattaatatcttcggtttagtttcggttattcccggttcagtacggttgagcattttactgcttataagaaaaccagcctgatgtaaggaaaaaaaagaaaactgcctttacttctgtctgtctgtctacacacaaagatgcgtagctttgattgctcgagaaaactagactcatgttcaatgttcttctgcaaacgacgataatggaatggcaacaaaatcatttctcaaactcgctgctgatctctcttctttcaccgattcttcaccattcgcaaagcttcttgattcatgcatcaaatccaagttatcagcaatctacgtccgttatgtccatgcttctgtcatcaaatcaggtttctccaatgaaatatttatacagaatcggctcatcgacgcttattcgaaatgtgggtcactcgaggatggtcgccaagtgttcgacaaaatgcctcaacgaaatatctacacttggaactctgttgtgacgggtttgacaaagttaggatttttagatgaagctgattctttattcaggtcaatgcctgaacgtgatcaatgtacttggaattctatggtttcgggttttgcgcaacatgataggtgtgaagaggctttgtgttattttgctatgatgcataaggaagggtttgtgcttaatgaatatagttttgctagtgttcttagtgcttgttctggtttgaatgatatgaataagggtgtacaagtacattctttgattgcgaaatcgccttttttgtcagatgtgtatataggttctgctcttgttgacatgtattccaaatgcggtaatgtaaatgatgctcagagggtttttgatgagatgggtgatagaaatgttgtttcttggaatagtttgattacatgttttgaacaaaatggtcctgcggtggaagctctcgatgtttttcaaatgatgttagaatctagggttgagccagatgaggttactttagctagtgtgattagtgcctgtgcaagcttgtcggcgattaaggttggtcaggaagttcatggccgtgttgttaaaaacgataagttgaggaatgatataattctaagcaatgcgtttgtggatatgtatgcaaagtgcagcaggataaaagaagctaggtttatatttgatagcatgcctatcagaaatgttattgcagaaacctccatgatcagtgggtacgcaatggctgcaagcactaaggcggctagactcatgtttaccaaaatggcggagaggaatgttgtttcatggaatgcgcttattgctggctatacgcagaacggagaaaacgaagaagcacttagtctcttttgtctcttgaagagggaatcagtatgcccaactcactattcctttgctaatatcctcaaggcatgtgcagatcttgcagagttacatctcggtatgcaggctcacgtgcatgtcttgaagcatggctttaagtttcaatctggtgaagaagatgatatatttgttggcaattccttgatagatatgtatgtgaaatgtggttgtgtagaagagggttatcttgtattcaggaagatgatggaaagagattgtgtttcctggaacgcgatgattattggatttgcacaaaatggttatggaaatgaggctcttgagttgttcagagaaatgcttgagtctggagaaaaaccagatcacattaccatgattggtgttctttctgcatgcgggcatgctggatttgttgaagaagggcggcactacttttcttctatgaccagagattttggtgtggctccgcttagggatcactatacttgcatggtcgatttgcttggtcgagctggatttctcgaagaagcaaagagcatgattgaggagatgcctatgcaaccagattctgttatatggggttctttgcttgctgcttgtaaagtacataggaacattacgttaggtaaatacgttgcagagaagcttttagaagtagagccgtcaaattcaggaccatatgttcttctttctaacatgtacgctgagctcggaaaatgggaggatgtgatgaatgtacgaaagtcgatgaggaaagagggagtcacaaagcagccagggtgtagttggataaagatacaaggacatgatcatgttttcatggttaaagataaaagccatcctcgaaaaaagcagatacactcgcttcttgatattttaatagccgagatgagaccggaacaagatcatactgaaataggatcactctcgtccgaggaaatggattattcatctaatcttctttgggacaacgccatgtaatgtaagtaactttgctggaattgttttttgctgttcaaaatctattctatcttttcttgaaaacttaaggaattagaaactggtagtatatgagagattatagaatcaatggaaatttcattttgcagaaacaacattttctttcacatcttcggttgctgtacgaagtaaataattaaacacatgaacaaacctgtaacccaatgtttttcagaaaggacattattgctaccacatttattaagcgagagtggttttgaaacttcgttgggaacatctacacctcagaatcacataggaaatgaacctgtagagcaagacaaaacatagcatgatcacaacatttctccatctactttcctctccgtacctttcttctttgagtagatcctcctcagtcaccaaacattttccgaatccatactccaaacacttgtttgattttgagaactcgttaatcagaaatccttcgaacgggtacttgaacaaggagatgtagtgcatgaaaatccagtaaccagggatctcatggttcgatatgaagtagccggagaacagaaagaaggaacccatcacaccggaaatcactgagtttccaactatgaaattaggaaccagtgcactaaagcacacaaccaccgagtttgctgtgtagaggatcaaccaaatgaggagcgaaaagtgtagaaacgccatgaaactggggttcagtcccaccagccagtacactggggttgagaatagaatagctaggatgagcagaaatggcaagtaaactagtccattagcgacggcatatgaagacactctgtagcttccactagaggtctccttcatcagaatctctctttcttgcagaaatatagggagtgcctctattgtcgaagttagcagaaaggtcaatatgaatgcaaagaggccgactctttctcgcgcaccttttaaatcgtctttgagattatgaaaaatcagacctaggacaattcctgaacctaacatctgaaccgtcctgcacgcaaaaagctccttggttctgaaaatgttcttggagaacctatgtgtgagtatcatagtttcttctaatcttgaatttgcaaaatctcttgtgaactctgttgctatgttcatcgttcctacatcagcgacccttgtttgttgaaacagctgttgtagtgtgaatttgccacttttgctctccccttgactatcttctgatctcttctcttgtaatgttgtttgtggtgttaggacatgagctgctcttctgctttcctgtagccgttgctgttttgtgatggattcgattgattcaatggcaaattcaacgatgttttcatggagaggagggtgcaaaccatttgaccttaagtaaacgccaagctgatccaccgacccctgcttcaaggtcgagccattggccaacaagagaacagaattgaactgtttgactatccgaaatcccggttggtggatagtcagaattatggtcctgcctcgtgtttcagccatgtgtttgagcatgtctatgatcagcagagccgaagtactatcaagcccagaggttggttcatcaaggatcagaactttggggtcgtgaataacttcaactcctatggagacacgacgtctctctccacccgatatacctctgacactatcatcgccaacacgagccgtggcaacagcttcaagcccaagctcatggaccaaagacttaacccgtgatctcagttcatctgcagggagctttaaacgcagcttagcactgaacagaagggtttcctccaccgtaagcaaaggaaacagagtatccttctgagtgacataaccagagattttcttgaaattggctctatccaccggtctcttgttgacataaaccgacccggtttgagggatgagtctagcagctagaatttcaagcaaagacgacttccctgcaccacttgggccaacaatagcaagaatctcccatggtttggctctgcaagtcactccttttagtacatgcttgactttgttaccggtttcatcctctagcttcaatgactcttcctctgtctttaccggctggtcagcttccggccgcggtttccgcctaaagattccaaagggattaacattaatcttccttacaaagatgttgtaatcaatatctaaagcttcgatctcacatccttgcttctccattgatgaagaagctttgttctctctctttctttcttttccaatgctatagtggcgtaagaaaaaggacaagtaatagaacaaaaccaattatatatgtcttgtactaaatgtgttattgttataagaaactttgaattagtattggattggtcataaatggttcaaaagactaagaagtaagaagacagctagatttctgtaacttgtattggatttaagtgaagagagttgaaatttttgagtttggtcacgggccattgttttgttataccaaatatagatggatggagagtgagagaggttcacatgcagttgttcttctcacttctctttaactttcccaagacatgaagagtcacgtgttcctttgtgatattatttatatatttactttcatattttgtaatatacttgtgatttcttcatcaatttataatttttaaaaaattcaattaatattaataaaagttaccgacggctaattctcaaaatcactttttttttcttttcggcaaatcgatttacatgaaatataaaaaacattcaaaaacaacctttgaaacaaataaagaaaattaaacacaatttcgataaaaattaatagaagtaaccttgctttctatacggaagttttataagcaatagataaaatctgttaaatctcttctttatatcctcgtaaaaaactaacatcttatagataaaagttacaaaatatttttctcatcactctcattaaaagaatacattgatatgttgcttgaaatggtttttggatcttgatcacgtattttgtaacaacttacacattgttgcccgttcatggcaccgacattttctctttcaccgacattttctctttcaccgatgtattttgtaatcacttttctttcataagaaatttacatgtattgacatttggcactgattgaactatcccctaattatgtgtttttataaccataaatgtggcgttacgtctttaggattctaaacactacaaaagcaatctttgacccaaacaagaaaaacaaaaaaaaaacactacaaaagcaataataaagccacgttttcatctaaaaattcgtcgttaaaatggaaatgatgataaacaattacaaaaaatgggaaaaagcaaaaatgttaagggaaataaactctaaaagatttttaaatgatggagcagattagaattagaaatatttgtggctaatttggaaaacgatagagctacgatacttttgtattaaccagtgtttgtgtggtatacttcatcctcgtcaattataaattaacagattttaaatttatttatttttgaacattaaacagcacaaaaaaataaacgaacttgtcatatacagtacataaatttcaggactctagttattttaaaaattactctctttgttttaaaatataagatgtaaaggtttatacaatcaaataacttggtttttaaaattttgaataaagctgaacttttcgttgcaagggctataatttaacacacacttatatattaatattttttaaacttgacaacatcgaaaatagtgaaaaaattataatgcaatattatttttgatatcatatgattatatcttattttttggaaataaaagataaaattgcaaaaatggataatttataggattttttggtataaaatcttaaaaattatgatagtcatactttatttcttctcttatgttttcaattttgtttggtttatatctgactggagactggtataactaaagtctttactccatgttttgcgctcattgttatttttcttatgctaggaattaaacattttcaattgtataatttgaagacaataggtgactagtttctttccaagaatttatatatgtgttggggaaatttatattttgtaattttgtaaaaaaaaacaaaagaagtgtagaacccattttcttaagagataattattgttaatgtaatatttatttacatatcaagaattaaaaaaaaacggttagttacgttaaacacctgaaaataattgtaatagttctaataaaagaaaagaagaccaaaaatagagatgatgaatgatgttgttttgactcgttgagcagagaggatgatacggaataccaccaaactttgaatccatttcctttctctcatatgtatgttcctgcaaattaacacacaacatttcctttcgatcatttcaagtttttttcttaggaaaaaatggcgacaagtgaagaacctagtacggatgcctccataatatgttatgcgccaagcatgatcaccaccaatggtgtttggcaaggcgataatcctctcgacttttcgctacctctctttgttcttcagctaactttggttgttgtcgtcactcgtttcttcgtctttatcctcaaaccctttcgccaacctcgtgtcatctccgagatccttgtaagtaaccataaattctcaatttttttcattcgtggcggaaaagtttttttaactcaaaaccaattggcaaaaagtgaaataatacatatcacttcggatgagaggtttctaacattttgaaatgtatattttgatcttaaattatagggcggaattgttcttggaccatcggtgctagggcgctccacaaaatttgcacacactattttccctcaaagaagtgtgatggtacttgaaacaatggctaatgtgggtttactttacttcctattcttggtgggtgtagagatggacattatggttgtacgtaagacagggaagcgagccctaaccatcgctattggtggtatggttttaccattcctcattggtgctgccttctctttctctatgcatagatcagaagaccacttagggcaaggcacctatatacttttccttggtgttgcactctccgttactgcattcccggttcttgcaagaattcttgctgagctcaagctcatcaataccgagattgggcggatatcgatgtctgcagctttagttaacgacatgttcgcttggattcttttggccttagctattgcattggctgagagtgacaaaacttcatttgcctctctttgggttatgatctctagtgcagttttcattgccgtttgtgtttttgttgtgagaccaggcattgcttggatcatacgtaaaacccctgaaggagagaatttcagtgagttccacatatgcctaatcttgacaggagttatgatctccggtttcattactgatgcaatcggaacacattcagtctttggtgcttttgtgtttggtcttgtgattcccaatggacctcttggtctaaccctcattgagaagcttgaagatttcgtctctggccttctcctacctctcttctttgccataagtggtctcaagactaatatagctgccattcaaggccctgccacgtggttaactctgtttcttgtcattttcctcgcttgtgctggaaaggtcatcggtacagttattgttgcgtttttccatggaatgccagttcgtgaaggaatcactcttggactactcttgaacactaaaggtcttgttgaaatgattgtacttaatgttggaaaagaccaaaaggttttggatgatgagacatttgctactatggtacttgtggccttggttatgactggagtcattactcctattgtaacaatcctttacaagccagtgaagaaatctgtttcatacaagagacgaacaatccaacaaacgaagccagacagcgagcttcgggtattggtttgcgttcacacaccgcgtaatgttcctactataattaaccttcttgaagcttcacatcccacaaagagatctcctatatgcatctacgttctccaccttgttgagctcacgggccgcgcatccgcgatgttgattgtccacaacactcgtaagtcaggacgacccgcgcttaacagaactcaagctcaatcagatcatatcatcaacgcctttgagaactatgaacaacacgctgcctttgtcgctgtacaacctttaacagctatttcaccttactcaacaatgcatgaagatgtttgtagcttagcagaggacaaacgtgtctccttcataatcataccatttcacaaacaacaaacagttgatggaggaatggaatcaaccaacccggcctaccgtttagtcaaccaaaacctactcgaaaactcgccttgttcggtcggaatactcgtggatagaggactcaatggagcgacaagactcaactcaaacactgtttctcttcaagttgctgttctgtttttcggcggtccagacgatagagaagctttggcttatgcatggagaatggctcaacatcctggcatcactctaactgttttacggttcattcatgatgaagatgaagcagacacagcttcaacacgagcgaccaatgacagtgacctaaagataccaaagatggaccatagaaaacaaagacaacttgatgatgactacattaatctctttagggcagaaaatgcggaatacgagtcaattgtgtatatagaaaaactagtgagcaatggggaagagactgttgcagcagtgagatcaatggacagttctcatgatttgtttatagttggaagaggagaaggaatgtcgtctcctcttaccgcgggtttaactgattggagtgagtgtcctgagcttggtgccattggagatttgcttgcttcatcagactttgcagctactgtgtcggttcttgtggttcaacagtatgttgggtcatgggcacaagaagatgatatggattttcctgagagtccagtacattcacatgaaacaaaagtcacatatggtttagagaatccacgttagccaaacattcagatttgttttttttatcttacacacacactttcattttctcatttgttttttgtcatacaaatgtattttagcaaactataaattggcttacaccccaaatttggggtatttacagaaactgattaattttacattttgttttagattttttgtatgtccaagggccactcaaaagtctagctattttgttttcgttagagacttagagttcagatgagtttagtatgtgtgttttaattttaatttattataaaattctttacaaaatatgcatgtcatgagaagagtccatgcatggtctagtggtactccttctcatagatgagtgacagaggtctcaagttcgaggcactctgtcaccacggtggtactagtttctccaaataaaaattatttcatacgtataaaggcaagcggtgtatactagcccgtagatctaggccggaggtgagaattctttctggatatggggccgttttgcggtgagacttgtcactataaaaagtttaccctaatagcatcctctttagacagtttttgattggtgtctttagtataaattagtaataaaattaaagacatctctcttttgagtgtctaaaatgtttatagaaagacacaaatctaaatataaagacactcttcatttaattgtcattatttttaatagttttaaatttaaagacacccacacataaacaaccaatgtgggtgctctaaaagtttttaaaaccaaaaaaaaaaaaaatatgcttgtcatggcaatatacaagtcaaggatctgaattacggataaacacttgaacgatttcatatcgcgaaccctgagatttgatttcttgtaggacaagaaatcatttgttgtgaccatgcatctctgataaatgataactgaaggaggtagagttataaattcgtttttggtgatagaagtccctatagttgctttagtgtatcgtcttaaaaaacttctctttagctatctttttttcgttatgattttgacgatgacggacttagagtatacattatggtactatatttattcgacattttgttatggttttgagaaatattcgaaatatagctctattaattagttcttaagaaaagaaaaaaaactttgcaaaataaaattcacctattaattagctcaaatgcattaaacatcgagaatctaacacaagttaaatatctattttaccatgaacacaagagtctcgaacaaaaccaaacatacactaaacattgtaacttttatctatgaaattcaaacatgcctacttgataaacactttataaggctcaaaacccaccaactacttagctcaacaaatgtagaaagactataaaacatcaagaatctttcaacggaatgagatctctcaacatgttataccttctcatggagaccaccaaggaagcaagctaaatagctaaatggctgagtttctcctttatagtcaaatctttcatacttggagcatcttctatcatcagattgataaagtcaatactagtaataccaagagactctaggagtttgcaatgtttaactagtttctgaatcctattgagcttagtgggcacatcatcgtcttcttcttgagactcttgaatatagacagattccaactcaagattttgtagcaatggaaggcccttaatcattgtgggtggcaccagcaaacagtttgataatctgagagtggtcagattcaggaacttgaagattttggaaggtattagagccccaacgttgagaaaacataggttcttttaacaccaaattgatggcttcactagttcttttaacaccacattgatcaccaaaacatagaactgtcaagttcttccacttgtctaccaatgctttggagagtaccgaagttctaacagcatttagtagaggcaatcgaactagtatatggtcaagtatactcggatgcaattcagatattaaatccatgctaaaaacaatacaagctaagtaagatgacagaagtgaaagtacaaacgcaggtcatgatttattctctaccaagtgaaaatgcaatccagagtactaacaaataaacatatatgtacatgggagatcatgataaaagatcgagggtcatttcatcaaataaaaaataaggattgtccaatctaataaatttatgtgaatgttcaattaacatatcagattaatccagtggccgtgtgattagagagaataaacaatgtgaacattattttattttattttacgaaggattgtgtaactaagcataccaaaatcaggttcatagattttttgaagtgaaatatatgataaattggataacttacaattgtacatgaaatcgtgacaaagccacatgtaaacccaatggttacgaatccattggttctttaagaaaacaaaattatattttgcaaaacaaaattcacctattaattagctctaatacaggattatgattaaacatcaagaatctaacacaaattaaatatctattttaccataaacacaagagtcttgaataaaacaaccatacactaaacgttgtaacttttatcaatgaaatccaagcatgcctacttgataaacactttataaggctcaaaacccaccaacaagttagctcaacaaatttagcaagactataaaacatcaagaatctatcaacatgttataccttcacaaattcctcaagaacagacttaacaacttctccctttggtttcgagaatatgcttgcttttgacagagaacaaagagaccaaactgaaactcattcaacctacgaacaccattgcacagagacattaactcaaaagttatagagatatggaaaacctcctcatattgtatgttggatatctattttctggaaactttggatatcaattttctagaaactttggtactgccaccgtgatgcagctacttcctagagccgaaagtttccagcatatcaatttcacaatccaatgtaacatcaaatagcaaatttcattgagagaagaaccaatgtgtctggtttcaaactacaagctgataaacaagttatcgaaattccactaataaactcacacaagtaaaatgataaaaagtcatacggaaaaagaaggagaaatatgaaacttgactccgcatatactattataacacgattagtttaaatcaagcccacacacagattcaaaaccaattactattgaaaacagtatttaagaagctagagaaaagaaaaggaccatttgagcttggtgaaggaatgtataagattatttttttatttattatgatgaaaaaaaaaagagaaaatcaaattaaaattctatttattacaaagaaatagatagttgtggaatgtataagattaaaattattaaattaaaaattaagattgtgaattactactttgaattcaaatatcatcgacaaaatttatatttattttttatatctgtcaatttaggcgggccttatctagttcctagtaaagttcatttttaatatttttactatattcaaaactttgtttttgttgttttttatacataataattatttattgtgtgtaattggttcaagaaaggtaatgattataaagaaatttgttttttttttcagacattggcctaatcctaaagcatacaaaaccatatggaccaaaaaagacttgacgaatatgtgaatcaaatgtctcaatttcaataataaggaagagagtcttataagaaatgcttcggtttcctaccaattcggttttttgtcaaacttttgtaggattatagtaggaaatgttttctacgtaccaaacgtttcgtaggattgaaacatgatatccgagaactgaaatggaacttaacaaaaaagagaaatgtcggacaacaccaaacgaactaaaaattaacttacctttgtcagaaccatatgactctctacataatcgaaaaagaccctgacatgagcagcttctccaatactttcaatcacaacttttctagcatttttttccttaggatcgtaacagaggaaaaaaaacgtgttaggaggtaggagcggtacaagtataatctcaccaataccaagtataccactgaacacatgttcacgattgccaactaaatcttcaatagaaggaatcacggcagcagctgttgaccattctcctttgttggcatcttccagaacccacaggtcaagtagaccattacttgcatgacacattatagttatctttccagtgtggtccaccaatttaccatactcttgtagtttatgattcttaagtagcttaataacattaaagtcttcagatctcagatcgaagctcattaaagatcgtttatcgttgaaagaagctaaataatacacaaccccattccagcatatcccttgagatctaggataatgacgatgagtatacttacattcgagcattctccatttttgttttgctcctagagtgaaaacttgatgctcctctgacatagactcctcccacataggaccttcccaattaaaaacgtggtgatccacgtttagttgtcgtcttgcacaacactttgtacaaatcattaactggatcatatccaaaaacagataatatgttctttctcctcgtagtaaagatacaaactgacccgtactaggatttccaatcattgctttagtattatttctacagaagatcaaaccctcgacgggtggagaaaacaggtaccctagatccgaattcatagtacgatgattaaaagacggatcctcctgagagcaggagtgaaagagctgcatctgcatgttacgacgatagactgtgaaaagaagacgcaattgagccaaagatcaagtcatgtacaagttggtgaagtctttgctgcggattatcgatgactagtgattcaaaacctaacctagctaggctatggatttcgttggcaacttcatttgaacgcggtcgtattcatctcttttttcttctggtttcttagacttccttgcccttttcttcatggtgatttcacttcctctcatagaagttaagccctttaatatcttttactcttaacctaataacttttcacggcgatatatactaatatagtaatatgtattcaaaacttttttgagaatttgtaaataaaacctcatattttgaaattttaacagaaaagtactcttttgttttctttggtgtaatggaaatcctttatgagtaaaaaatgtaatagaattaagattcgccacaatattgttgcattaagtaagacactcatcatgattggttctcaccttctttctctctcgaactcactcgatctctctcttgtgtaacaaacaaagcatggaaaagtaaagacacaaagaatattacaaattcaggttccaatgtggaaccctacataacatacgagaaattcaccagtatacttgctcagcactcaaccatgcttacaatgagtttatatcttcctcacacttatattcgatctcaataaaatggttcagaaccttttgaatccacaagagactttgatttgttcaagccatatgatcttcacataactaagtttcctcgtctttgatgaagccttggtaacagactttttacgttcttgttctctgatcctctgtctccaaaggtgaagaagggctgatgcaacatggcaaatcttgcgatctttatgttttgtaagtccctcaagcttatccatcatcctccttggttcttttggttttggagtaatgttgatcttcatcaataacgagagagcgtcaatgcagcgagacacctctggtttacctgagagaacacccttagcgttggccacatcagcagctttctttgctgcttcgaacaacttcaccatctcatccactttcttcttcttcagctccttttctgttttagtcttctttatcaatgaaccatcttcatgtggcttcttcgttgtaacatcctccaaagagacacgccttgtcttcatgttgagctgctttagattggtctttgtctctttcttaaaatatttctcgacacaagtctcagatctatgatcctctttctgtttcaaagccaaaaagctgttccttgctttattcttctctgtttcacgagttaatgatctctgatcttctttcctattcaactccgagagtttgatcgttgtcttactctctactgcttcaacagtcgtctgagatctctcgtcttctttattcttcaacaccgaaaaggcagtgacttgacgagccatagttcccggttcttctttcttcttcaactccgaacacatttttagaacatgcttcttcatcttcagacgatctttggtaagagcagctgtgaaagagttgtcgcttccatgtgcgtagaatgtcttcaaccatgaatgaaacaaggcttgggcttccttacggattctagggttcctatgacttctcaaagtctccagtttaactattgattcagacaatcgtatatccttcacggaaagagacagagacttcaagtgattcaacacatcgatgcatcgctcgacttcgcatgggttccgtgtattgtaagtagccttaattgcagcagcagtcaagtcgcataagtcagatctctccttcgcaattctcactctcatcatctttccgtcgttcttgatcatcaggtggctagggttttcagtttatgttgaaatctcataccattgaatttctttactggaaaattggtaaaaacgaagaaacacataaaccaacacttctcttaccactcaagaatcgatacattcattaatattttactaacattatacaagtagagtggcgaaagcttttacaagaaacacataacgtgcatagaattctgaggttataaactcattgctctgctttaatcagcttttgccatgtcctatactgattgatgtagtaaaatgtgttgtagatggttagtattttaggacttctccctcattttggctctagcaaatacaactccagcgacaagacctgcaaattaggccacctcaggtttaataataatacacaacacaagcgatatgtgttccttcaagaagttggaaaagggaactgatcgagagaacgcttaccaaagagtatgcttgctgagttctgcaaactggtcggtacattgaaaagaacgatccccgcgatggatagaggtatcttgtttagagatcccaccaggctatgattttgaataaagcgaaagatgtatctagttaggactgaaccaacaaagaagcaaacataggaaagggatatatggagaaggctaggggacagcaacactctcttaagcaaagttttgaaattgctctatctctctctaatttgctacctgtatgttgttgctccagtttgatgaagaaaccacattgaagtaaagctaatggcaagccctagaagtccactaagtgtcatgaccatccagaaacttggtaatcgtagaagtggcctgcacaaatataatacaccattttgttttcagatgacacaaaccattttccattgacacagaaataaggacaggaactcacgtttgatagagataatccatctcgttgaagaaataagaaagaagaagcccaagtggtaatgaaagtgtgttattaagcaagaccatggagaactcgttcaagtttccagattgagtaacctgcttggccgtatccatggtctttctcaaagtcagctgcaaaacaacaaaatataaggcaagtcaaaagtggtggcaaattttataagagtatagtagcctagctaacaagccaaacacttggtttttgttgacaggatatagggataaatttatgggaacctaacagtctaacactctcgttttttgacccagcaatggaaaacctagtgagaactgagaagttgatggtgtcaatttgcattctttgcccaaagtcttctctttaacatgctattcctacttctaacaacgagtgaagtactcaggttaccagtgacaatggattgcaagctataaaattttctaaggtaacagaatctcggtatctcgtgagcatcttaaaactcaaaagcaagccagtatcgtaatgattatagggaaggctgtttagtttattgacttagtcttaaccaaacagcatgtaatactcgacatgaaagcatggtttttaagtgatctccttttcatatatgtgtttattgtttcaaatgactcctaacattttgggaaaagaaaacacaaatgatcaaatgtttactcaccgagtacgatgcagttaagaagcaattagcaatctgccaagcatagccaacagcattgaatgataggtctgttattcctccagaaactgcggaaattatctgcaaatgaaggacgaaagaagcacaggttaatcaaaactttatcctctacttattcaagatctatacaaaaacaaatagaatatacatataacaatgagtagccgtgacaaaaaaacatgattacatttccctggcagactaattgtggaagcagttaaaaacatgtatctccaacagtattgaaaggttaggctatgccacaccactgaaagccgctacgacaagtgtaactgtgtacgcacacaaaagggtggatcacttatcaataagaagatatgctttagactttattggttaaggttgatgatcagagagtgctttgagaaaacaagagaaaaccaaatccaaaacagtatagaatcgttgtttgacaaggatatctttcaaaaactccaatcaaaatgctatctatgtgcagcttgaaataggttccttgagaatagttttttctcaggtacaatttacagaatcagttagaaatacttttaaagcagacaaacataccattaagaagagagcagcccacactctgttgtcatgttgcttgttgaacagatacatctcaccaactgcagttatcacattagtgacattcttcaggacagtgaccattgctacattgatgtatttcaaactgtcaaagaaaatgtaattcaaatagacaatcaagttcaatctgctcttcaaacaccgcctacatacacatatacgatacatatctatatatctcgacctactgtgaagtaaatccaaaatatctatctgtttcacctaagtgtctacacgttatttaatcctcgatctgctgtaaagatgatgtacagattcttataactacctttagtactccaaaaagttgactttactaatttagtaatcttataggcttgagaattaagagagcatcgatatataattcaacaaaccaacacaaaataaaggtgtagaaacacattcttacctaaacatgcttgtgataagcataccaacaaagatgacattcactggaaaccagaccttcatcaacctcaaagtaagtggttcagtagttattagacccattaaactcaaaccaaccacaatgatcaccgagacaaagttctggtataacataaggaagatcccagcattgaagttgtagctggagagaacaaacttgttgacaagtatcatactgcatgatgaaatgcaataagctaaaccggataacaaagcccggttatgtatctttcttggaattggtttatctcctccggattttactgtcttcccatcttctaaatcaactccatcgtgttcgtacaatttcattgcaaagctaagacctaccaaagaaactaacttctttcaagcttatataactagatccatcattcttaacaatacacgcacaaaaaaagtaacagttttacataaaaaccaattcggttccaattcgcagctaaaatcaacttaagacgagattggatcaagcagcaaagttgagagtagctacacaagcgttaatcggaagttgtgtagagaataacgaattttacctcgaagttgtccaaaagctcgcgaactaaagattcaacttcggacgagatctaattgatgacaagttaccggaaaaaaaaaaaactatgaatcggaagaagaagaagaacatgaaacttgctcacgcggaggatcttcgtcaggtcgtggtggagctatctgtgaaatgttgttttgaagaaacaatggaaattaggaaactgaaaagacgagggagagagatggcattgaccagaagagaaaaaaaaaaaaaaaactgaccaattttcgtttctttcgtttgtttatttatattaaaattaagagtttcgtaagttagaggaagttccattatgtaaaacaaaataaattttctcagtgggtatttcaaaattgacaaactcatcaactactcatgtcaaacatgtctaaatgaataaataaaactagtatgtatttcttgaaattaaaaattattccaaagcgaaaaatagccttttatctataaatacagaataatattgatcatttttaagacaataaaacagaataatactgatcatatacaaataggccatatacaaatatgtcataactatactaaaatttaagaaaatattagctatttaatactatcaaacaaatctcttcattgaggtcattcaacacaaacattgttatttataaaaaaagaacacaaactttgtttggagtaactttgacagttacacgttaaatatgttctctcctaaggtattgagcttatgatgttattttgttaattttcatcattttatagttattggttattatataaatctcttatatattgagaagaaataataatataaacataaattatctaatttagttataatggtttggtaccatatggtccaaatcacacaatatgttgtacaatttgcttttttggaaaaatgtcatttaaatcagtagtttactatttttgttgatttaaactatgagttctgtatctggtaatttaaattctcaatttttatgttgattttcaatttaatcacgaattttcgttaattaagcaaattgaggcacaattttttctctttcgcaccatcaatcgacatagagataagagattattttgaatttaaagaagaagaaggaatcaaaaaaaggaaagaattcaaaaaagaaaagagggaaaaatgaaaatcgattttggattctagtgtttatgatttaagaaatttataatgatgcgtcttaattagtttaatcagtgagaattcgtatttaaattgatagtcagtgcaaaagtgtactactgttatgtgtctctaaacttggcaatttgacacaaaatctgaatgaataaaaataaaagtttggcaataatggtccatttgcctttttgctttgtaccataccgttgacctttcggcttaattctttccaccagaaattttagcctatctattttgactctttgacacagtccacttctaaatccactagccatagcccaagttactcgagcacgtaaaataaaatcctttaggcccaaaagaaccagtgtagccaaacgcatgaccattttgttttttccgtaacgcatgacaatttttataacaaaaatatattcacactctaatgttaacgacactcatcttgttcttgagaacaaatagttgaatatcattttcgtattataacatttaatgaaaagagttttctatctcttctctctttcatatcttttacagagagggagctctgtttttcttttgtaatctccgtcttcaatcagagctttttggtttgtgttttagatttcctgttttgatgccggtttctctttccgacttgttcggatttactttctttctttctcttttggttgccttttgcaggctcaaattaactcttccaatttcgggaagatgaaaattccagaagtcatcaaatggatccttgttcattgagtgcttgattcttctcccaagtgaaggtaattccttgctccgccaaaagggcttgtttagagcatcggttctccttggtggattgatcaagttgatgcggttgattgggacggagtatgaagaattggagtcttcgtcttgttctgatgaatatttcgggctaatcggctgaggttacaaattctcgtgatcaagtttaggtccaaccaatctcttctggtgatctatggcaaaaggcgagtaggtacaatcgaaggcagagatagaggtttcttggaggactgagttgatctgccggctggtgaaggaagtttccggtgatgatgagtcggtgacagctgatgaaggaagtttccggtgatgatgagtcggtgacggcgaaacctttttcttctctcaacatcccacattgcataacacgtatctcttttttatttttcttatcttgtgttttgcaattagtgggctaacttttggccatcttctgtaccgaatatctgcccatttgggcttttataaaacatattaggccgacaaaaaagaaaaaaagaaaaaaaaacaccacttactatttttacttctcactttataagcttagaaatagtattaccctccacatctctcttttggtctccttattttacacttacaagtttggccatcacaaagtctgccaacttcaaaaaaagtctggcaacttgatttcaccattcgaatccagtaatatattttttcctttgatcaaaataaatcttaaaagaaaagaaacaaatggagttcccttcaacttaaaatatttcatgataaatatattacaaccaaagcttacatatgcaccatattttgtccatgtaagaccatctccaatagagagagcctccctatgggctctctctatttttttaatacaattttattcaaattatgttaagagagcttatgtttttttttttttttttttttatagtccaatggtggactttttcaatgaagttctcagaaaaaaaaaaatgtgcttaacatgaaattttactaattgattcaagcaataacagatcaacaatgatagtaggctatgattctggtacatgtgatttttgaatctaaaacagagtgtgcttttccatgggattaaacaatgatagtaggctataattctggtacatgggatttaaacataggaatttatgcataactctacgtgttaagcatctaaatcaaagttttttttttgttcgtctgttcgtcacatatataaacttgtataaattttcaaatcaatgaatgaataagatgttaaaaaaaatgttcgaatggataatggttttcgttagaaagaataaacacaatcaaagatgagtcagtttagaatttaatttcagaaacttttaatacacatagttcttctagattggatgtcacgcattttgagaatttccttaattgttgttcattcttcaaacaatgtctacttgctaatccatgcatatacaaaatcgagtatgcaatgatatgataccaatggtatcataccatataaagcaatgtctacaaagattcatacatactaaaaactaggccatgcatgcatgttatgataccatataaatcaaacaaattcatttaacattgtactattggtaaaagaaaccaaattgagaaatggaccaaaacaataaaaacaacaataattcgttaatccgttcatagttacattaaatatgtcacagaaaaacttggaatataacagaaaataaaggagaaagacacggacctccatttgtgagagacacacacctcccagtcacacaatcgctattttattaacctctcttctttcgccacgtggcatctctctctaactgaaaatattctctcatttccctcttaaaaccgtaaagcaacattttctcctccatttttgatctctctctctctcccttcttcttcttcttcttcttcctctcgtcgccatttttttttcctctgtatctgttcatgcccgacgcctaactgagtcacctcgtctctgcttcaggtgaatcttcgtcgctacttctccgtttttgtaaatcgtctcgaaattacactcacttttggtttcgttttcttctaatcttcagggaaggggatctgaaagctcttcgcatctaacgtgagttcttcctttcgtagaatttttacgttcgatactgtatattgaatcgattcagcttccgtgagattttgttttgaaaaatgtgacgagaaacaatgaatcgatgtttgttttcgtttcgttttcgatttcttctccatcgctcgagctcctgattttgatttttgtccatgtttatcgtctgcactgatttcgaggtccttttgttgttccgtacgatttcgattgagtttccgtgaaatctctgttcgattgcttcgctcgagctccattttgattgttcatgtttgtttgttgcggaatcgcaagagcttgtaacctagtgttgttctaatcaatctgttatatacctaaattcaaaagtagcatcttaatcgcttgacaaaaattagctgtttttggtgcatataatccttcgattttgttttgtgttttgttgtttattgagaagattggtaacattgtgattcaatgttttgtaacagggagagatggcacagagtagtacatctcatgactcaggccctcaggggctcatgagacggccatctcgtagtgctgccacaacagtgtctattgaagtttttgatcatgaggtggttccggcctcccttggtaccattgctcctattctgcgtgttgctgcagagattgaacatgagcgccctcgtgttgcctatctctgtatgtatttgcgtttccttgttgttttgtttgcagaattaagctgatatacttcacttgctgtgtgactcacttgaaattttccttgtgttttgtatataggtcggttttatgcatttgagaaagctcacaggttggatccaagctctggtggtcgaggtgtgaggcagtttaagacacttctctttcaaagattagaaagggtaatcatctcttactattctatctgttttcttgaacacagtaaatattgtcatatgggactttatatcaggcttttatcatctagacactacacatagatagcaagtattaacttgtggatttctccatcggtagttttcattaaggatgtgttcaaattccagtttaatatgtcatcatctcagacctccaacatatgatacagtccagctacttgacaagctttagtttgcaaaattcctcttaaatggggattacacagtagaatttgttttacactttgagaatatccatttgaaatgatacagataatgacatatttttctaacctgagtagagataataacaaatttatcaacacaggacaatgcttccagtcttgcttctagggtgaaaaaaactgatggacgggaagttgagagcttctatcaacaatattatgagcactatgtcagggcacttgatcaaggagatcaagcagacaggtaaagatggttgttgtgtatatatacactcatgtattttccaaactttggccatgttggcatattcggattacatgggactttgatgataaataatgcagtgttcttcttctgacggactttttttgaaccaacatcttgcagagctcagcttggtaaagcataccagacggctggagtgctctttgaagtgctcatggcagttaacaagagcgagaaagttgaagcagtagctcctgaggtttgtgtccaaatactattttttcagagcaaccagaacagctataaaatattgcttattcagttaattgagatgggagtttaaaacgttcccatatgtgtttctgagtagattattgcagctgctagagatgtccaagaaaagaacgaaatttatgcaccctacaacattcttcctttggattctgctggggcctcgcagtctgttatgcagcttgaggaggtatttactgtttgaataattcttccaattctttaaactaatcgctactcaattctgatatctgccttcttatacctcttacgctgtttgatgactaggtcaaagccgctgtagctgctttggggaacactcgtggattgaactggccatctgggtttgagcagcaccgaaagaaaaccggaaatctggatcttcttgactggttaagagctatgttcggattccaggcaagttggtgatcgggaaagagtaacacgaagatctgatgtattgatgttaaaccagtgagacatatttcttacgtttcatttctttgattttcacagagagacaatgtcagaaaccagagggaacatctggtttgtttatttgctgataatcacataagattgactcccaagccagaacctctgaacaaggtaccttttgatagttctacccgttcacctatatagcattttgggatgtgttttgacacccaccaacactagggatgagtagagtggtaattcagagctttggctattgtctgattaacgttcatcgaccctgtgaacaacataatagaattttccaatgtttattcatttatatcaaggggtttcttttccaagacccttaaacagaattgtccaatgttgatagaaaaacaaagcattatctcaatattccattatatatcttcatctattaaaaacgtttcctttagcaacagattcttgatctatttattctatatatgcagctcgatgacagagccgttgatactgtcatgtcaaagctctttaagaactacaagaattggtgcaaatttttaggacgtaaacacagtttaaggtagctgacaaaattttattttctaagtcgcttggatggaaaatgttgttgaatgatattcatactgtactcaaaattcactctatttttttgcaaaggcttcctcaagctgctcaagatatacaacagcggaagatactatatatgggcttgtatcttctcatctggggagaagctgcaaatattcgcttcatgccagaatgcttgtgctatattttccacaatgtcagtaacacattcagacatgtttacctttttgaggctgatgtcatgggtcagtaaaagtatatcaaatttgatctcttgattatgcacagatggcttatgaactccatggtctcttggctggaaatgtcagcatcgttaccggagaaaatattaagccttcttacggtggagatgatgaggcatttttaaggaaggtcattacaccaatctaccgtgtagttcaaacggtacaagtttgactgataggtcgatggcattttaagaatcatgatcttgtatacatcatagctaaccttttttatgaactaggaagcaaacaagaatgcaaatggcaaggctgctcactcagattggtccaactatgatgatctgaacgaatatttctggtattttgaacttaagtctgtagattgcacctttacttggtgaggacacctgagtttattatatcatttgcgcattactgttatataggactcctgattgcttctctcttggctggccaatgcgtgatgatggggatcttttcaaatcaacccgtgatacgacacaggtagtctcttgtagttttcatttgctgtttctcttcccccattgatctaatcagtattttttcgattttaaattaatttccagggaaagaaaggatcgtttagaaaagcaggacgcacaggcaaatcaaatttcaccgaaactcggacattttggcacatatatcatagttttgaccgactctggacattctatctattagccctgcaggtaagcaagcaatctggccaatctatagcatgtttcctaataacatgagccagtcaaaatgacatttcgacttttcaatacaggcaatgatcattctagcatttgaacgagtagagctgagagaaatcttacgcaaagatgttttatatgctctctcaagtatcttcatcacagcagcttttctgcgcttccttcagagtacgtgacttcaatgctgtgaaaaaaaaaattatatggagtttcttggtgctcatcatttggttatgtttcctggaaataaatgttaccttgtttcttgcttctatgctaggtgtcctggacgttatcttaaacttcccaggtttccacaggtggaaatttactgatgttttgagaaatattctcaagatcgttgtcagtctcgcttggtgtgttgtgttacccctttgctatgcccagtctgtctcttttgctcctgggaagctgaaacaatggctatcatttcttccacaagttaaaggcgttcctcctctttatatcatggctgttgcactgtacttgcttccaaatgtactggcagctatcatgttcatttttccaatgcttcgacgctggatcgagaattcagactggcatatatttagattgcttctgtggtggtcacaggtatgaaggcttgtttttatttttccctctcttctggtcctgcatgaaaataccattctatttagtcagaaaaccccttaggcatgttaaggttctgatagttgaatttatctgcaactcaggatccattttcttgtgttgctggttagttatatgtatatgcaagtcgagaggaaattttgacttttactctggctatatcaatgtttagttaagtttttgaatatgaattatgctcaggggtatcttatatgttgtttgaatacccatttactgatgtgtcccgtttttccttctcagccaagaatttatgttggaagagggatgcatgaaagtcaaattgcactcataaagtgagtttatggagccaaagaagttcttctgaagactttattgtacataatgaaatttctatcaataggtatacaatatttgggctaatatgttttctgaaatttccaggtatacgattttctggctgttgcttttctgctgcaaatttgcattcagctactttctacaggtttgacacagcataacgattacgtgagctgatgttcgaactacataatcgtactcaccttcaataccgctctttatgtcttcttctaggtgaaacttttggtgaagccaactaacgcaattatgagcattcgccatgtaaaatacaaatggcatgagtttttccccaatggtaatcttgctacttatactcctcgcttggaactatagttttcggaatttcttttagaattttgggtaagctaaatgtttccacctgccatgcagctgagcacaactatggagctgtggtgtcactctggttaccagtaattctggtatatttttcttaaccacgcatctaaatgaattagatagaaagtccatggatgtctcatattccttaaatttgcttcaggtttactttatggacactcaaatttggtatgctattttctccactatatgtggtggtgtcattggggcctttgatcgtttgggagaggtagtttttctggaacctttttgctcacttcttttacccttgttttgttactacatcaaaataaaggtttccacattttctgaggatatcaagagcgtttgagatgattcttttacatttgcttatatcgcatcctgtgtttctactcattcgattaacattcgtgcattatatcttctcgttatttttaattagtatacatttttctaactccttaacgtgattgtatttagtgtaatccaaatggttcatgaagtagtatattccgtcgaaatagtttatatctagttttcaaatgtatatctcctagtgaaaattcattatatatcacagacgcaactgtgtaacttgatgcatcttcctgcatgaaaatatattaacaaagactcatttctgttctccttccagatacgaacgcttggaatgctaaggtcaaggttccaatcattacctggtgcatttaatacgtacctggttccttctgataaaacaaggagaagagggttttccttgtcaaaaagatttgcagaggttacacaagattgatgctcgttttatcaacaaagtgattgtggaaagaatgttgtcatacatctactaaattatatctgtatgcaggtcactgcagcaagaagaactgaagcggcaaaattctcccaactctggaatgaaatcatttccagcttccgagaggaagatctaatcagtgacaggtaacaacttaggtattatactacctttcttcatgaataccttattttccgtgccttaaaaccaactattttttcagggagatggatctgttgcttgttccttatacttcagaccctagtttgaaactaattcagtggccaccatttttgcttgcaagcaaggttggtggtctccctttgtcatcaaaaataccgttttcttcttattgctaaacttctcatcttgttacagataccgatagcattggatatggcagctcagtttcgaacaagagattctgacctctggaagcgcatatgcgcagacgaatatatgaaatgtgctgtcattgaatgctacgaatctttcaaacatgtcttgcacaccttggtaattggggagaatgagaaaaggtatttcctcattcatcagaaaagttcttgattatgatttatgaagcactttataaatcattaagaatctataaggaaaccagcactccaacttttctcttctgttgaagctactggctgtcttattagttttgataatagatgttctctaccatgtctctacttgattttctgacgtattgtagtaacatttctcctcctaaggtggcatttttaagtgcgtcaacattcctctgttttgataataaaatagttttcttaacctttcacatatatatgtgctccaacctgcaatttcagtccctctattgaattttcattcatttaattgatactaagaaaagatataatgtcacaggattattggtattatcatcaaagaggtggagagcaacatatcaaagaattccttcctttcgaatttcagaatggcgcctttacctgctctttgtagtaaatttgtcgagcttgttggaattttggtaagtgaacaacatccttgtttaatcattggtattgatttaaggctggttattttttatgccagagacagtgcaatcccctaatttaggtctgtttattattaatgttgtgctggaagggataatacttgtgaaatgttatctagggaactaaatagttatgtatacttatgatgctgcagaaaaatgcggacccagcgaaaagagacacagtggtgctattgttgcaagatatgttagaagtagtgactcgagatatgatgcaaaatgaaaaccggttagtgagctatagagaactcgaaagttctttttatgtagatgtatatagtaaccacacaaacaagatttgacatgggtggcacctttcttcagtgaattggtagaacttgggcatactaacaaggaatccggaaggcaactctttgctggtactgacgcaaagcctgctatactgtttcctccagtggcaacagctcaatggcatgaacaggtaaaatctcaaaacaaattataaggctaattcttagagatactctgtatataatgatctaattcattgttgtagataagtcgccttcatttacttttgacggtaaaagaatctgcaatggatgttccaacaaaccttgaagcacaaagaaggattgccttcttcacaaattcactgtttatggatatgccacgagctcctcgtgtcagaaatatgctgtccttcaggtatgtgctctggttatcactatttttgaacagaatttatgctcctttgaaggataccatgtgctatcaatattctccaatttaaatttttctacaattgagggatccaacttttccagtttttttcacattttgttttaatttgggctggaatgaatatacaatagaaaatccatgtagctgatactctggaactgttatgaatgcctactgcagatagcagctcttccttatttaacctttgagttttgttttcgcatttacagtgttctgactccgtactatagtgaggaaaccgtctactctaagaacgacctggaaatggagaatgaagatggtgtatcagttgtatactatttgcagaagatctttccaggcatgtataattgacgagctcttgttgttgaacttagttactcctaaatgctttcggtaatttatacggccccccaatttcagatgagtggactaacttcttggagcggcttgattgtaaagatgaaacttctgttttggagagtgaagaaaatatattgcagcttcgccattgggtttctttgaggggacagactttgtttagaacaggtaacttataccatccacgcctatttatattttgttatatggtctttttttgcttacacctatttgtatcctgcagttagaggaatgatgtattacaggcgggcattaaagcttcaggcttttcttgacatggctaatgaaacaggtgaggcttgattagttgacttgtgttgaactaaaatcagctgcacagattgaaacgttcaagcgttttcagctcgctgtattatgtcattcttgcattctactaccaaaatacagacgcaatgttgatcatttgtgtgaagtattcatagttccatatcgaacatatttttaacattctggaatacatacttataacatttcttgtgtttacagaaatattagcagggtacaaagccatttcagagccaactgaggaggacaagaaaagtcagagatccttgtacactcagttagaggcagtggcagatctcaaatttacttatgttgctacctgtcagaattatggaaatcagaagcgaagtggagaccggagagctactgacatcttgaacctgatggttaagtaagtccctcccccatatttgttgattccagcatttgttggttccctggtgagtctcactttcatattcaatgctgcagcaatccctctctccgtgtagcatacattgatgaggttgaggaacgagaaggcggaaaagtgcakaaagttttctactcggtgcttatcaaggctgttgataatcttgatcaggtattttaacttttttgaaatcttaacagattggctagatactatgtccaattcgagaacccccagatttcaaacgttgtatctcttacttttgaaaggaaatatatcggataaaactacctggaccagcaaaaattggagaaggaaaacccgaaaatcagaatcatgctctcatttttactagaggagaagctctccaggctattgacatgaatcaggtaaaatactttcccccaaccgaaagcttccacaacataaacatagtggacttttatttgttggaagagttttacttaccaataatatttaatttataggaccattacttggaagaagcacttaaaatgaggaatctgctggaagagttcaatgaagaccatggagtacgtgcacccactattcttggtttcagagagcatatttttactggcaggtatttgggaaatatggttattattttcttgtcgtgtaaagaacttcctgcattttgctagctgattgatatgtgtttcacttcggcatcttattcgcagtgtttcttctttagcctggtttatgtcaaatcaggaaacaagttttgtgaccattggtcagcgagtcctggcaagtcctttgaagtatgtcatgttcttctttctttcaatctacacacattgatgctcattttaactaaaagtttagtagctgttaaaaatgtaattccttctcgatatcatttaactcacacaggcaccttggatttgtgatttcagggtaaggtttcactatggacaccctgatgtcttcgatagaatcttccacatcactcggggtggcatcagcaaagcttcacggggcataaatcttagcgaggatatctttgctggttagattgtgaaccatacttcttcaaggaaaatttgatgttggttccttcatcatttacttatgattgattcatgtttgtatataggtttcaactcaactctgaggcgtggtaatgtcacccatcatgagtacatccaagtagggaaaggaagagatgttggtttgaaccagatatcactctttgaagccaaggttgcttgtggaaacggagagcaaacattgagtagggatctctaccgacttgggcatcgttttgactttttccgcatgatgtcttgttatttcacaactgtaggcttctacatcagctcgatggtaacttctgatcttccaatgtcaaactaagtttatcgttaacacataatttgcttaaaacaaaacataacggactaattatgtgtactacagattgttgtcctcacagtttatgcattcttgtatggaagactttacttgtcattgagtggagtggaagaggcgatagtaaagtttgcagcagcgaaaggagatagttctcttaaggcagcgatggcgtcacagtccgtagtgcaattgggtctgctgatgacactaccaatggtgatggagattgggctagagagaggattcagaacggcgttgtctgatctaatcataatgcagcttcagttagcgcctgtcttcttcaccttctcacttggaacaaaggttcattactatggtcggaccatcctacatgggggatcaaagtacagagcaacagggcgtgggtttgtggtgaagcacgagaagtttgcagagaactacagaatgtattcgagaagccactttgtgaaaggaatggagctgatggtgctgctgatatgttacaggatttatgggaaagcagcagaggactcggtgggttatgcgcttgtcatgggctcaacatggttcctggtgggttcctggttgttcgccccattctttttcaatccctcgggattcgagtggcagaagatagttgatgactgggatgattggaacaagtggataagcagcagaggaggtatcggagtaccagcaaacaaaagctgggaatcatggtgggaagaggaacaagagcatcttcttcactctgggtttttcggaaagttctgggagatatttctctcactgcggtacttcatttaccagtatggtattgtgtaccaattgaacttgaccaaggagagccgaatgggaaaacagcacagcatcattgtgtatggactgtcttggctggtgatcgtggcagtgatgatagtcctcaagatagtgtcgatggggagaaagaagttcagtgctgatttccagcttatgttcaggcttttgaagctgtttctgttcataggatcagtggtgatcgtggggatgctattccacttcttgaagctgaccgtgggagacataatgcagtctctgttggcgtttttacccacgggatgggctctccttcagatatcacaagtggcgaggccattgatgaagacagtaggaatgtggggatcggtcaaggccttggctagagggtatgagtacatcatgggagttgttatcttcatgccagttactgtactcgcgtggttccctttcgtctctgagttccagacaaggcttctcttcaatcaagcctttagccgtggtctccagatccaacgtattctcgccggtggtaagaagcagaaataagtctcagactaactttctctgatttttcttttccctcatcgtcactctttagcactcttacaacttttccccacaattctttgcttctttttgtttgtatccctctgtttttaagtgaaaacatatatgtatatcgtaagaaacatacggatagatttaagtgaaagttttctataataaatagttgaggttatgtagcaagaggaattttcttgcatttgttttggtattctcagtttcctcattcctcgtcaattactgtcaaaacagtattatggaagcaaacgatatgaaatgttttaatggtatttttgtggcactgtagctaccataatcataaacaattactcacaaatatagtaatgcccgatagaaagaaagtaccattttgtgttttgtacttgttgctttttcaaaccttacgactaatttagctccaaaaaacatccgaaacgaacatatcatgcgggtggagacaaaaggagagagagttatattacagtctaaatttccacaaaagctaaaacctaacatacataatagcctcttgaacacttggaataatttgtttacctacaagtagatgattctacacctctaaggaatgacctacgccaccatatctgaaacgccttgctgagattagggcactcagtcccatgctttgagaaccacctgaaccattccatgaacacttgatactgctcttttactggtagcgttaaaagcgtttgccccatcccttcttctacttccctcatgtctagtcctttcttgcatctctgtagccacccaaaatctactaacattggcttgaaccacgcttctactagccccgcccttgcttctcctccgcattgcactctccttttccccattgcaataaatatcgctcctgttactctgcttacttcatacctcaccattggtgacactctctcatgcatctccactagccttctttgcttcccccatatttccacaaattcttctgctatttcccgatctatcatgatctccagcagccagtttatgttctcaacctccctcgaaatactttcaatcaatggcttttctttcttgctactactactactactgccctcttcaaacaacttagctaatgaatccacacaacacttgcctgctctatatatgtcttccttgttgatctcaggctgttctttctcgtacactgagcttttgcaaagaagacccttcaccagagatttgagctcgtttctaggatttacatcactgcaggaagtaattgaccaaaccagtttcttcgataaactgtcttgcaagttttctgtctcgtttgaattaaatcttgccaaaatttcactaactgcatcatcatcaaagctataaattccaagaagtctcctcagtttttcctcttcatcctctgtccaaggaacagcttcaagatatttcagacacgataagacagctcttgaaaatttgattccagccgctacctgtttatggtcaaaaagatctgttacctccaccaatcacaacgacttaattatggaaaacaatgagaatcaatctaacatgcagagcagaacaaagatcaaaagttacacacaacaatgttcatacttaacgacaacaaatactacatgaataaaaaccagatatgtcaacaatcacatgcaaaaagtatcttcgatcgtagaaaaaaagaatagctgtagcagcattcacaaacatttctttaggcctccacaagatcataaaagtgtctcaataatagttcactgaaatggcagagtgaagtaagaatcataaaccacagactagtcactagccactagccaaaagcaagagaataagctcctatttccaaatacatgagttatgtcaaattgttggtctttccatatctatccatctaatcctcaagggttttagcctaataagcaaaaaggtaaaatcttagctaagatcagcatatatggtaataacaacaaacacatcaaggcaatcaatacccatatcaattcaataacaaggaagaaaatttccaaacctcaagtacatcaatggctctgtagactcccattgtcataaacttcttgataataacattactttcctcaaacatgagctcaacagtttccctaaaaacaccaagattctccacatcacatacttcaatcctgcatgtgttcttcaatcctaaagacgatgaagaagaagaacacttcttctcctccgcaatcaaacccgagaacacatcagaattcgcagccaaaacctccaagctaagctccaacaccagaaccccaccaccatttcttcccttcaaactcaacctagcatcgtaaccctcactcaaacccgaacccgtaacctcaatcttcggagctctaaaactctcagaacgaagatttggtgtcgaatctacaacaaccgcatcatcttcttcttcctgagtggtctcggtctcttgcattgtagtgacggtcggatccgaatctatgggtgaaacccgacccggtgataagatccgacgcgggtcgatccgatttacgatgtttaaagcagatttagagctttgcggtgagcaaggaaccagtttaggtctctgctgctgagatttagctggaatgtggttacgagatgaaatcgaacgagtatcaggactcgctggaggtacggcgaaagagcaacaccatgatcgtcggcgagatagatgtccggtgccgaaattggtaggtttacggaggtcagagtcgcccattgtcatcaagtgagagagagctggtgaagtgagtaaagttgtagtctgagagattactgttttgtgttggctttctatttctgtttcttctttttatgcaaacttgtttttttctttttactttcatcattgttagattttagatattgaaatcatacatggttaattgacacaattccctagattcatttttttttgaacatgtgtggatacattgctgtcatgatttaaaattgaataccaacctaattcaatttttcttcaaaaacattttattgtttaagttttagttcataaacatcctctatttattgaaaaaagttttttttttattgtcaagccaacaaattttctaaatttattattatttttgtttcattttcttttactatctttcttgccaaacatttaaatttttttcttttggtgagttaaatatatatatactcagaaaaaaagaaattaaaaaagtgtgctagataattctatatttaaacatctttcttcctttacaataatttctgacgtttttacccctattaaagcagatattgttagatacgtaatgatgcagcagcatttaatgcttctaaagatatatgcacaaaatcttgacgtcggtattgaaaaagaaaaaatataaaaaaaactaaatatttacatgacagttatgtattgggttgcgagatattattaatagacattggactattttttagtatcgaattatagaacaagagaatggtgtatataaaaactcactctttattaatctttaagaaacttactcaaaacctaaagctctcaccaaaactctcaatctctcaaactctaaacttctcaataggattaccacaacttggtatctctatttatatgaaagctcctagtcattagataactcctaataacattagataactactaaatttagatatctcctaaatacaatcttatcctaaatctcttaggatttggttagtttatttctcaagctaacttcaagcttatcaacattcactctcttaagcttgaaatcacatttcgacaaatcttgaactccaactagctctctcatttctttgaatttgattcttccaagtgcctttgttagaagatccgtcttctgttcttctccgggaacgtgttccacttctatttggtcattctcaacacactcacgaatgaaatggtacctcttgtgaatgtgtttgctccggccgtgaaatactggattcttggcaagtgctatcgccgatttgttgtcaatgagcacctcaccttcttgcatgcttttcctgttacctctccaagtaactcctgcaaccaaattgcctgcttagctccttctgtagctgctatgaactcagcctcacaagacgataaagccacattttcttgcttttgtgtacaccaagttattggagagccatcaaggtagaatatatgtccggttgtgttcctcccatcatcctcgtctacattgtgactgttatcactgaaacctattagccccgaattgtctcctcgcgtgaaagtagtccgtaggaggtagtgccacgcaagtatctcagaatctgcttcatagctactccatgaccttctttaggttcttgcatgtatctactcaacacgccaacacagtatgagaggtcaggtcgtgtgtgaggcagataccgaagatatccaatgcttcttctatactcttttggctcaatgttcttctctgtctccgagtcatgacttcctttctctgttcccgcctttgacagcttcaaaccggagtccattagaatgtgaactgcgttgcaatcactcatcttggtttcgtctaggatcttttctgcatatctccattgtttcaacataattcctccattatgctgaattacttcgattccaagatagtatgtgagtaacccgagatcactcatctcaaacttagatgacattcccttcttgaaatcattaatgagctttaagctataacctgaaacaagcaaatcatccacatacactgctactaaaagaagatcaactttctcttgtttacgatagagcgatggttctttagaacacttgatgaactttaattccctaagtatcttgttaaatttgttgttccatgctctaggcgcctgtcttaatccatagagtgctttattcaatttgtatactttgccttcactccctttctctgtgaatctttctggctgtgaaacaaatactgtctcttttaattcaccgtgtaagaatgatgttttgacatcgagatgatgcacctcccatccgtttgaagcagcaagggcaatgatgaagcggactgttttgattcgtgctacaagggaaaagacttcgtcaaagtctatgccatgtcgttgtacgtaacctttagccacgagtcttgccttatacttgtttatgctcctgtctgcgttcttctttagcttaaacacccatttgagcccaattggcttagctccttgaggaagttccactaaatcccatgtcttgttcttctcaattgatgtgatttcgtcctcacacgctctccactctcgtgtttcttttgcttcagcataatcccaaggttcctcgtttattatagagagcagatgttcactttcttcttcagcaagtagaacataatcctttaagtacttaggccttgagacttgtctctgagatcttcttagtacaggttatgtgttgactagtgcctgatcttctacttgtatcatcgtctcagtttctctgttttcctctgttcctctgatttccccgatacgagtagtaccttcttcctctatgctgttctcgcttgtctcagaggcatattcttcatcttctcttcttagtccgttatttccaaatgcttcaaaaccgagaaaaaaggttcctgattcttctcccgactcatctcctagatcattccaccataaaattttagtttcatcagaaacaacgtctctacttacgattattttgcgtgtggttggacccaagagacgatatgcctttgagtctggttcagttcccaaatggaaaagagcatgagatctgtcatctaacttcttcaagtaaggagagtctattcttgcgtatccaacacaaccaaacacacgtatgtgttctacattgggttttctccctttgtatgcttcatacggagtttgatttgttagaacccttgtcaccactctgtttatgagataagtggcatgacgaacaacttctccccatagatagtttgtcatcttcataagctt

SEQ ID NO: 217 - DNA, 104009 bp, Arabidopsis thaliana
gaattcgtatttaaattgatagtcagtgcaaaagtgtactactgttatgtgtctctaaacttggcaatttgacacaaaatctgaatgaataaaaataaaagtttggcaataatggtccatttgcctttttgctttgtaccataccgttgacctttcggcttaattctttccaccagaaattttagcctatctattttgactctttgacacagtccacttctaaatccactagccatagcccaagttactcgagcacgtaaaataaaatcctttaggcccaaaagaaccagtgtagccaaacgcatgaccattttgttttttccgtaacgcatgacaatttttataacaaaaatatattcacactctaatgttaacgacactcatcttgttcttgagaacaaatagttgaatatcattttcgtattataacatttaatgaaaagagttttctatctcttctctctttcatatcttttacagagagggagctctgtttttcttttgtaatctccgtcttcaatcagagctttttggtttgtgttttagatttcctgttttgatgccggtttctctttccgacttgttcggatttactttctttctttctcttttggttgccttttgcaggctcaaattaactcttccaatttcgggaagatgaaaattccagaagtcatcaaatggatccttgttcattgagtgcttgattcttctcccaagtgaaggtaattccttgctccgccaaaagggcttgtttagagcatcggttctccttggtggattgatcaagttgatgcggttgattgggacggagtatgaagaattggagtcttcgtcttgttctgatgaatatttcgggctaatcggctgaggttacaaattctcgtgatcaagtttaggtccaaccaatctcttctggtgatctatggcaaaaggcgagtaggtacaatcgaaggcagagatagaggtttcttggaggactgagttgatctgccggctggtgaaggaagtttccggtgatgatgagtcggtgacagctgatgaaggaagtttccggtgatgatgagtcggtgacggcgaaacctttttcttctctcaacatcccacattgcataacacgtatctcttttttatttttcttatcttgtgttttgcaattagtgggctaacttttggccatcttctgtaccgaatatctgcccatttgggcttttataaaacatattaggccgacaaaaaagaaaaaaagaaaaaaaaacaccacttactatttttacttctcactttataagcttagaaatagtattaccctccacatctctcttttggtctccttattttacacttacaagtttggccatcacaaagtctgccaacttcaaaaaaagtctggcaacttgatttcaccattcgaatccagtaatatattttttcctttgatcaaaataaatcttaaaagaaaagaaacaaatggagttcccttcaacttaaaatatttcatgataaatatattacaaccaaagcttacatatgcaccatattttgtccatgtaagaccatctccaatagagagagcctccctatgggctctctctatttttttaatacaattttattcaaattatgttaagagagcttatgtttttttttttttttttttttatagtccaatggtggactttttcaatgaagttctcagaaaaaaaaaaatgtgcttaacatgaaattttactaattgattcaagcaataacagatcaacaatgatagtaggctatgattctggtacatgtgatttttgaatctaaaacagagtgtgcttttccatgggattaaacaatgatagtaggctataattctggtacatgggatttaaacataggaatttatgcataactctacgtgttaagcatctaaatcaaagttttttttttgttcgtctgttcgtcacatatataaacttgtataaattttcaaatcaatgaatgaataagatgttaaaaaaaatgttcgaatggataatggttttcgttagaaagaataaacacaatcaaagatgagtcagtttagaatttaatttcagaaacttttaatacacatagttcttctagattggatgtcacgcattttgagaatttccttaattgttgttcattcttcaaacaatgtctacttgctaatccatgcatatacaaaatcgagtatgcaatgatatgataccaatggtatcataccatataaagcaatgtctacaaagattcatacatactaaaaactaggccatgcatgcatgttatgataccatataaatcaaacaaattcatttaacattgtactattggtaaaagaaaccaaattgagaaatggaccaaaacaataaaaacaacaataattcgttaatccgttcatagttacattaaatatgtcacagaaaaacttggaatataacagaaaataaaggagaaagacacggacctccatttgtgagagacacacacctcccagtcacacaatcgctattttattaacctctcttctttcgccacgtggcatctctctctaactgaaaatattctctcatttccctcttaaaaccgtaaagcaacattttctcctccatttttgatctctctctctctcccttcttcttcttcttcttcttcctctcgtcgccatttttttttcctctgtatctgttcatgcccgacgcctaactgagtcacctcgtctctgcttcaggtgaatcttcgtcgctacttctccgtttttgtaaatcgtctcgaaattacactcacttttggtttcgttttcttctaatcttcagggaaggggatctgaaagctcttcgcatctaacgtgagttcttcctttcgtagaatttttacgttcgatactgtatattgaatcgattcagcttccgtgagattttgttttgaaaaatgtgacgagaaacaatgaatcgatgtttgttttcgtttcgttttcgatttcttctccatcgctcgagctcctgattttgatttttgtccatgtttatcgtctgcactgatttcgaggtccttttgttgttccgtacgatttcgattgagtttccgtgaaatctctgttcgattgcttcgctcgagctccattttgattgttcatgtttgtttgttgcggaatcgcaagagcttgtaacctagtgttgttctaatcaatctgttatatacctaaattcaaaagtagcatcttaatcgcttgacaaaaattagctgtttttggtgcatataatccttcgattttgttttgtgttttgttgtttattgagaagattggtaacattgtgattcaatgttttgtaacagggagagatggcacagagtagtacatctcatgactcaggccctcaggggctcatgagacggccatctcgtagtgctgccacaacagtgtctattgaagtttttgatcatgaggtggttccggcctcccttggtaccattgctcctattctgcgtgttgctgcagagattgaacatgagcgccctcgtgttgcctatctctgtatgtatttgcgtttccttgttgttttgtttgcagaattaagctgatatacttcacttgctgtgtgactcacttgaaattttccttgtgttttgtatataggtcggttttatgcatttgagaaagctcacaggttggatccaagctctggtggtcgaggtgtgaggcagtttaagacacttctctttcaaagattagaaagggtaatcatctcttactattctatctgttttcttgaacacagtaaatattgtcatatgggactttatatcaggcttttatcatctagacactacacatagatagcaagtattaacttgtggatttctccatcggtagttttcattaaggatgtgttcaaattccagtttaatatgtcatcatctcagacctccaacatatgatacagtccagctacttgacaagctttagtttgcaaaattcctcttaaatggggattacacagtagaatttgttttacactttgagaatatccatttgaaatgatacagataatgacatatttttctaacctgagtagagataataacaaatttatcaacacaggacaatgcttccagtcttgcttctagggtgaaaaaaactgatggacgggaagttgagagcttctatcaacaatattatgagcactatgtcagggcacttgatcaaggagatcaagcagacaggtaaagatggttgttgtgtatatatacactcatgtattttccaaactttggccatgttggcatattcggattacatgggactttgatgataaataatgcagtgttcttcttctgacggactttttttgaaccaacatcttgcagagctcagcttggtaaagcataccagacggctggagtgctctttgaagtgctcatggcagttaacaagagcgagaaagttgaagcagtagctcctgaggtttgtgtccaaatactattttttcagagcaaccagaacagctataaaatattgcttattcagttaattgagatgggagtttaaaacgttcccatatgtgtttctgagtagattattgcagctgctagagatgtccaagaaaagaacgaaatttatgcaccctacaacattcttcctttggattctgctggggcctcgcagtctgttatgcagcttgaggaggtatttactgtttgaataattcttccaattctttaaactaatcgctactcaattctgatatctgccttcttatacctcttacgctgtttgatgactaggtcaaagccgctgtagctgctttggggaacactcgtggattgaactggccatctgggtttgagcagcaccgaaagaaaaccggaaatctggatcttcttgactggttaagagctatgttcggattccaggcaagttggtgatcgggaaagagtaacacgaagatctgatgtattgatgttaaaccagtgagacatatttcttacgtttcatttctttgattttcacagagagacaatgtcagaaaccagagggaacatctggtttgtttatttgctgataatcacataagattgactcccaagccagaacctctgaacaaggtaccttttgatagttctacccgttcacctatatagcattttgggatgtgttttgacacccaccaacactagggatgagtagagtggtaattcagagctttggctattgtctgattaacgttcatcgaccctgtgaacaacataatagaattttccaatgtttattcatttatatcaaggggtttcttttccaagacccttaaacagaattgtccaatgttgatagaaaaacaaagcattatctcaatattccattatatatcttcatctattaaaaacgtttcctttagcaacagattcttgatctatttattctatatatgcagctcgatgacagagccgttgatactgtcatgtcaaagctctttaagaactacaagaattggtgcaaatttttaggacgtaaacacagtttaaggtagctgacaaaattttattttctaagtcgcttggatggaaaatgttgttgaatgatattcatactgtactcaaaattcactctatttttttgcaaaggcttcctcaagctgctcaagatatacaacagcggaagatactatatatgggcttgtatcttctcatctggggagaagctgcaaatattcgcttcatgccagaatgcttgtgctatattttccacaatgtcagtaacacattcagacatgtttacctttttgaggctgatgtcatgggtcagtaaaagtatatcaaatttgatctcttgattatgcacagatggcttatgaactccatggtctcttggctggaaatgtcagcatcgttaccggagaaaatattaagccttcttacggtggagatgatgaggcatttttaaggaaggtcattacaccaatctaccgtgtagttcaaacggtacaagtttgactgataggtcgatggcattttaagaatcatgatcttgtatacatcatagctaaccttttttatgaactaggaagcaaacaagaatgcaaatggcaaggctgctcactcagattggtccaactatgatgatctgaacgaatatttctggtattttgaacttaagtctgtagattgcacctttacttggtgaggacacctgagtttattatatcatttgcgcattactgttatataggactcctgattgcttctctcttggctggccaatgcgtgatgatggggatcttttcaaatcaacccgtgatacgacacaggtagtctcttgtagttttcatttgctgtttctcttcccccattgatctaatcagtattttttcgattttaaattaatttccagggaaagaaaggatcgtttagaaaagcaggacgcacaggcaaatcaaatttcaccgaaactcggacattttggcacatatatcatagttttgaccgactctggacattctatctattagccctgcaggtaagcaagcaatctggccaatctatagcatgtttcctaataacatgagccagtcaaaatgacatttcgacttttcaatacaggcaatgatcattctagcatttgaacgagtagagctgagagaaatcttacgcaaagatgttttatatgctctctcaagtatcttcatcacagcagcttttctgcgcttccttcagagtacgtgacttcaatgctgtgaaaaaaaaaattatatggagtttcttggtgctcatcatttggttatgtttcctggaaataaatgttaccttgtttcttgcttctatgctaggtgtcctggacgttatcttaaacttcccaggtttccacaggtggaaatttactgatgttttgagaaatattctcaagatcgttgtcagtctcgcttggtgtgttgtgttacccctttgctatgcccagtctgtctcttttgctcctgggaagctgaaacaatggctatcatttcttccacaagttaaaggcgttcctcctctttatatcatggctgttgcactgtacttgcttccaaatgtactggcagctatcatgttcatttttccaatgcttcgacgctggatcgagaattcagactggcatatatttagattgcttctgtggtggtcacaggtatgaaggcttgtttttatttttccctctcttctggtcctgcatgaaaataccattctatttagtcagaaaaccccttaggcatgttaaggttctgatagttgaatttatctgcaactcaggatccattttcttgtgttgctggttagttatatgtatatgcaagtcgagaggaaattttgacttttactctggctatatcaatgtttagttaagtttttgaatatgaattatgctcaggggtatcttatatgttgtttgaatacccatttactgatgtgtcccgtttttccttctcagccaagaatttatgttggaagagggatgcatgaaagtcaaattgcactcataaagtgagtttatggagccaaagaagttcttctgaagactttattgtacataatgaaatttctatcaataggtatacaatatttgggctaatatgttttctgaaatttccaggtatacgattttctggctgttgcttttctgctgcaaatttgcattcagctactttctacaggtttgacacagcataacgattacgtgagctgatgttcgaactacataatcgtactcaccttcaataccgctctttatgtcttcttctaggtgaaacttttggtgaagccaactaacgcaattatgagcattcgccatgtaaaatacaaatggcatgagtttttccccaatggtaatcttgctacttatactcctcgcttggaactatagttttcggaatttcttttagaattttgggtaagctaaatgtttccacctgccatgcagctgagcacaactatggagctgtggtgtcactctggttaccagtaattctggtatatttttcttaaccacgcatctaaatgaattagatagaaagtccatggatgtctcatattccttaaatttgcttcaggtttactttatggacactcaaatttggtatgctattttctccactatatgtggtggtgtcattggggcctttgatcgtttgggagaggtagtttttctggaacctttttgctcacttcttttacccttgttttgttactacatcaaaataaaggtttccacattttctgaggatatcaagagcgtttgagatgattcttttacatttgcttatatcgcatcctgtgtttctactcattcgattaacattcgtgcattatatcttctcgttatttttaattagtatacatttttctaactccttaacgtgattgtatttagtgtaatccaaatggttcatgaagtagtatattccgtcgaaatagtttatatctagttttcaaatgtatatctcctagtgaaaattcattatatatcacagacgcaactgtgtaacttgatgcatcttcctgcatgaaaatatattaacaaagactcatttctgttctccttccagatacgaacgcttggaatgctaaggtcaaggttccaatcattacctggtgcatttaatacgtacctggttccttctgataaaacaaggagaagagggttttccttgtcaaaaagatttgcagaggttacacaagattgatgctcgttttatcaacaaagtgattgtggaaagaatgttgtcatacatctactaaattatatctgtatgcaggtcactgcagcaagaagaactgaagcggcaaaattctcccaactctggaatgaaatcatttccagcttccgagaggaagatctaatcagtgacaggtaacaacttaggtattatactacctttcttcatgaataccttattttccgtgccttaaaaccaactattttttcagggagatggatctgttgcttgttccttatacttcagaccctagtttgaaactaattcagtggccaccatttttgcttgcaagcaaggttggtggtctccctttgtcatcaaaaataccgttttcttcttattgctaaacttctcatcttgttacagataccgatagcattggatatggcagctcagtttcgaacaagagattctgacctctggaagcgcatatgcgcagacgaatatatgaaatgtgctgtcattgaatgctacgaatctttcaaacatgtcttgcacaccttggtaattggggagaatgagaaaaggtatttcctcattcatcagaaaagttcttgattatgatttatgaagcactttataaatcattaagaatctataaggaaaccagcactccaacttttctcttctgttgaagctactggctgtcttattagttttgataatagatgttctctaccatgtctctacttgattttctgacgtattgtagtaacatttctcctcctaaggtggcatttttaagtgcgtcaacattcctctgttttgataataaaatagttttcttaacctttcacatatatatgtgctccaacctgcaatttcagtccctctattgaattttcattcatttaattgatactaagaaaagatataatgtcacaggattattggtattatcatcaaagaggtggagagcaacatatcaaagaattccttcctttcgaatttcagaatggcgcctttacctgctctttgtagtaaatttgtcgagcttgttggaattttggtaagtgaacaacatccttgtttaatcattggtattgatttaaggctggttattttttatgccagagacagtgcaatcccctaatttaggtctgtttattattaatgttgtgctggaagggataatacttgtgaaatgttatctagggaactaaatagttatgtatacttatgatgctgcagaaaaatgcggacccagcgaaaagagacacagtggtgctattgttgcaagatatgttagaagtagtgactcgagatatgatgcaaaatgaaaaccggttagtgagctatagagaactcgaaagttctttttatgtagatgtatatagtaaccacacaaacaagatttgacatgggtggcacctttcttcagtgaattggtagaacttgggcatactaacaaggaatccggaaggcaactctttgctggtactgacgcaaagcctgctatactgtttcctccagtggcaacagctcaatggcatgaacaggtaaaatctcaaaacaaattataaggctaattcttagagatactctgtatataatgatctaattcattgttgtagataagtcgccttcatttacttttgacggtaaaagaatctgcaatggatgttccaacaaaccttgaagcacaaagaaggattgccttcttcacaaattcactgtttatggatatgccacgagctcctcgtgtcagaaatatgctgtccttcaggtatgtgctctggttatcactatttttgaacagaatttatgctcctttgaaggataccatgtgctatcaatattctccaatttaaatttttctacaattgagggatccaacttttccagtttttttcacattttgttttaatttgggctggaatgaatatacaatagaaaatccatgtagctgatactctggaactgttatgaatgcctactgcagatagcagctcttccttatttaacctttgagttttgttttcgcatttacagtgttctgactccgtactatagtgaggaaaccgtctactctaagaacgacctggaaatggagaatgaagatggtgtatcagttgtatactatttgcagaagatctttccaggcatgtataattgacgagctcttgttgttgaacttagttactcctaaatgctttcggtaatttatacggccccccaatttcagatgagtggactaacttcttggagcggcttgattgtaaagatgaaacttctgttttggagagtgaagaaaatatattgcagcttcgccattgggtttctttgaggggacagactttgtttagaacaggtaacttataccatccacgcctatttatattttgttatatggtctttttttgcttacacctatttgtatcctgcagttagaggaatgatgtattacaggcgggcattaaagcttcaggcttttcttgacatggctaatgaaacaggtgaggcttgattagttgacttgtgttgaactaaaatcagctgcacagattgaaacgttcaagcgttttcagctcgctgtattatgtcattcttgcattctactaccaaaatacagacgcaatgttgatcatttgtgtgaagtattcatagttccatatcgaacatatttttaacattctggaatacatacttataacatttcttgtgtttacagaaatattagcagggtacaaagccatttcagagccaactgaggaggacaagaaaagtcagagatccttgtacactcagttagaggcagtggcagatctcaaatttacttatgttgctacctgtcagaattatggaaatcagaagcgaagtggagaccggagagctactgacatcttgaacctgatggttaagtaagtccctcccccatatttgttgattccagcatttgttggttccctggtgagtctcactttcatattcaatgctgcagcaatccctctctccgtgtagcatacattgatgaggttgaggaacgagaaggcggaaaagtgcagaaagttttctactcggtgcttatcaaggctgttgataatcttgatcaggtattttaacttttttgaaatcttaacagattggctagatactatgtccaattcgagaacccccagatttcaaacgttgtatctcttacttttgaaaggaaatatatcggataaaactacctggaccagcaaaaattggagaaggaaaacccgaaaatcagaatcatgctctcatttttactagaggagaagctctccaggctattgacatgaatcaggtaaaatactttcccccaaccgaaagcttccacaacataaacatagtggacttttatttgttggaagagttttacttaccaataatatttaatttataggaccattacttggaagaagcacttaaaatgaggaatctgctggaagagttcaatgaagaccatggagtacgtgcacccactattcttggtttcagagagcatatttttactggcaggtatttgggaaatatggttattattttcttgtcgtgtaaagaacttcctgcattttgctagctgattgatatgtgtttcacttcggcatcttattcgcagtgtttcttctttagcctggtttatgtcaaatcaggaaacaagttttgtgaccattggtcagcgagtcctggcaagtcctttgaagtatgtcatgttcttctttctttcaatctacacacattgatgctcattttaactaaaagtttagtagctgttaaaaatgtaattccttctcgatatcatttaactcacacaggcaccttggatttgtgatttcagggtaaggtttcactatggacaccctgatgtcttcgatagaatcttccacatcactcggggtggcatcagcaaagcttcacggggcataaatcttagcgaggatatctttgctggttagattgtgaaccatacttcttcaaggaaaatttgatgttggttccttcatcatttacttatgattgattcatgtttgtatataggtttcaactcaactctgaggcgtggtaatgtcacccatcatgagtacatccaagtagggaaaggaagagatgttggtttgaaccagatatcactctttgaagccaaggttgcttgtggaaacggagagcaaacattgagtagggatctctaccgacttgggcatcgttttgactttttccgcatgatgtcttgttatttcacaactgtaggcttctacatcagctcgatggtaacttctgatcttccaatgtcaaactaagtttatcgttaacacataatttgcttaaaacaaaacataacggactaattatgtgtactacagattgttgtcctcacagtttatgcattcttgtatggaagactttacttgtcattgagtggagtggaagaggcgatagtaaagtttgcagcagcgaaaggagatagttctcttaaggcagcgatggcgtcacagtccgtagtgcaattgggtctgctgatgacactaccaatggtgatggagattgggctagagagaggattcagaacggcgttgtctgatctaatcataatgcagcttcagttagcgcctgtcttcttcaccttctcacttggaacaaaggttcattactatggtcggaccatcctacatgggggatcaaagtacagagcaacagggcgtgggtttgtggtgaagcacgagaagtttgcagagaactacagaatgtattcgagaagccactttgtgaaaggaatggagctgatggtgctgctgatatgttacaggatttatgggaaagcagcagaggactcggtgggttatgcgcttgtcatgggctcaacatggttcctggtgggttcctggttgttcgccccattctttttcaatccctcgggattcgagtggcagaagatagttgatgactgggatgattggaacaagtggataagcagcagaggaggtatcggagtaccagcaaacaaaagctgggaatcatggtgggaagaggaacaagagcatcttcttcactctgggtttttcggaaagttctgggagatatttctctcactgcggtacttcatttaccagtatggtattgtgtaccaattgaacttgaccaaggagagccgaatgggaaaacagcacagcatcattgtgtatggactgtcttggctggtgatcgtggcagtgatgatagtcctcaagatagtgtcgatggggagaaagaagttcagtgctgatttccagcttatgttcaggcttttgaagctgtttctgttcataggatcagtggtgatcgtggggatgctattccacttcttgaagctgaccgtgggagacataatgcagtctctgttggcgtttttacccacgggatgggctctccttcagatatcacaagtggcgaggccattgatgaagacagtaggaatgtggggatcggtcaaggccttggctagagggtatgagtacatcatgggagttgttatcttcatgccagttactgtactcgcgtggttccctttcgtctctgagttccagacaaggcttctcttcaatcaagcctttagccgtggtctccagatccaacgtattctcgccggtggtaagaagcagaaataagtctcagactaactttctctgatttttcttttccctcatcgtcactctttagcactcttacaacttttccccacaattctttgcttctttttgtttgtatccctctgtttttaagtgaaaacatatatgtatatcgtaagaaacatacggatagatttaagtgaaagttttctataataaatagttgaggttatgtagcaagaggaattttcttgcatttgttttggtattctcagtttcctcattcctcgtcaattactgtcaaaacagtattatggaagcaaacgatatgaaatgttttaatggtatttttgtggcactgtagctaccataatcataaacaattactcacaaatatagtaatgcccgatagaaagaaagtaccattttgtgttttgtacttgttgctttttcaaaccttacgactaatttagctccaaaaaacatccgaaacgaacatatcatgcgggtggagacaaaaggagagagagttatattacagtctaaatttccacaaaagctaaaacctaacatacataatagcctcttgaacacttggaataatttgtttacctacaagtagatgattctacacctctaaggaatgacctacgccaccatatctgaaacgccttgctgagattagggcactcagtcccatgctttgagaaccacctgaaccattccatgaacacttgatactgctcttttactggtagcgttaaaagcgtttgccccatcccttcttctacttccctcatgtctagtcctttcttgcatctctgtagccacccaaaatctactaacattggcttgaaccacgcttctactagccccgcccttgcttctcctccgcattgcactctccttttccccattgcaataaatatcgctcctgttactctgcttacttcatacctcaccattggtgacactctctcatgcatctccactagccttctttgcttcccccatatttccacaaattcttctgctatttcccgatctatcatgatctccagcagccagtttatgttctcaacctccctcgaaatactttcaatcaatggcttttctttcttgctactactactactactgccctcttcaaacaacttagctaatgaatccacacaacacttgcctgctctatatatgtcttccttgttgatctcaggctgttctttctcgtacactgagcttttgcaaagaagacccttcaccagagatttgagctcgtttctaggatttacatcactgcaggaagtaattgaccaaaccagtttcttcgataaactgtcttgcaagttttctgtctcgtttgaattaaatcttgccaaaatttcactaactgcatcatcatcaaagctataaattccaagaagtctcctcagtttttcctcttcatcctctgtccaaggaacagcttcaagatatttcagacacgataagacagctcttgaaaatttgattccagccgctacctgtttatggtcaaaaagatctgttacctccaccaatcacaacgacttaattatggaaaacaatgagaatcaatctaacatgcagagcagaacaaagatcaaaagttacacacaacaatgttcatacttaacgacaacaaatactacatgaataaaaaccagatatgtcaacaatcacatgcaaaaagtatcttcgatcgtagaaaaaaagaatagctgtagcagcattcacaaacatttctttaggcctccacaagatcataaaagtgtctcaataatagttcactgaaatggcagagtgaagtaagaatcataaaccacagactagtcactagccactagccaaaagcaagagaataagctcctatttccaaatacatgagttatgtcaaattgttggtctttccatatctatccatctaatcctcaagggttttagcctaataagcaaaaaggtaaaatcttagctaagatcagcatatatggtaataacaacaaacacatcaaggcaatcaatacccatatcaattcaataacaaggaagaaaatttccaaacctcaagtacatcaatggctctgtagactcccattgtcataaacttcttgataataacattactttcctcaaacatgagctcaacagtttccctaaaaacaccaagattctccacatcacatacttcaatcctgcatgtgttcttcaatcctaaagacgatgaagaagaagaacacttcttctcctccgcaatcaaacccgagaacacatcagaattcgcagccaaaacctccaagctaagctccaacaccagaaccccaccaccatttcttcccttcaaactcaacctagcatcgtaaccctcactcaaacccgaacccgtaacctcaatcttcggagctctaaaactctcagaacgaagatttggtgtcgaatctacaacaaccgcatcatcttcttcttcctgagtggtctcggtctcttgcattgtagtgacggtcggatccgaatctatgggtgaaacccgacccggtgataagatccgacgcgggtcgatccgatttacgatgtttaaagcagatttagagctttgcggtgagcaaggaaccagtttaggtctctgctgctgagatttagctggaatgtggttacgagatgaaatcgaacgagtatcaggactcgctggaggtacggcgaaagagcaacaccatgatcgtcggcgagatagatgtccggtgccgaaattggtaggtttacggaggtcagagtcgcccattgtcatcaagtgagagagagctggtgaagtgagtaaagttgtagtctgagagattactgttttgtgttggctttctatttctgtttcttctttttatgcaaacttgtttttttctttttactttcatcattgttagattttagatattgaaatcatacatggttaattgacacaattccctagattcatttttttttgaacatgtgtggatacattgctgtcatgatttaaaattgaataccaacctaattcaatttttcttcaaaaacattttattgtttaagttttagttcataaacatcctctatttattgaaaaaagttttttttttattgtcaagccaacaaattttctaaatttattattatttttgtttcattttcttttactatctttcttgccaaacatttaaatttttttcttttggtgagttaaatatatatatactcagaaaaaaagaaattaaaaaagtgtgctagataattctatatttaaacatctttcttcctttacaataatttctgacgtttttacccctattaaagcagatattgttagatacgtaatgatgcagcagcatttaatgcttctaaagatatatgcacaaaatcttgacgtcggtattgaaaaagaaaaaatataaaaaaaactaaatatttacatgacagttatgtattgggttgcgagatattattaatagacattggactattttttagtatcgaattatagaacaagagaatggtgtatataaaaactcactctttattaatctttaagaaacttactcaaaacctaaagctctcaccaaaactctcaatctctcaaactctaaacttctcaataggattaccacaacttggtatctctatttatatgaaagctcctagtcattagataactcctaataacattagataactactaaatttagatatctcctaaatacaatcttatcctaaatctcttaggatttggttagtttatttctcaagctaacttcaagcttatcaacattcactctcttaagcttgaaatcacatttcgacaaatcttgaactccaactagctctctcatttctttgaatttgattcttccaagtgcctttgttagaagatccgtcttctgttcttctccgggaacgtgttccacttctatttggtcattctcaacacactcacgaatgaaatggtacctcttgtgaatgtgtttgctccggccgtgaaatactggattcttggcaagtgctatcgccgatttgttgtcaatgagcacctcaccttcttgcatgcttttcctgttacctctccaagtaactcctgcaaccaaattgcctgcttagctccttctgtagctgctatgaactcagcctcacaagacgataaagccacattttcttgcttttgtgtacaccaagttattggagagccatcaaggtagaatatatgtccggttgtgttcctcccatcatcctcgtctacattgtgactgttatcactgaaacctattagccccgaattgtctcctcgcgtgaaagtagtccgtaggaggtagtgccacgcaagtatctcagaatctgcttcatagctactccatgaccttctttaggttcttgcatgtatctactcaacacgccaacacagtatgagaggtcaggtcgtgtgtgaggcagataccgaagatatccaatgcttcttctatactcttttggctcaatgttcttctctgtctccgagtcatgacttcctttctctgttcccgcctttgacagcttcaaaccggagtccattagaatgtgaactgcgttgcaatcactcatcttggtttcgtctaggatcttttctgcatatctccattgtttcaacataattcctccattatgctgaattacttcgattccaagatagtatgtgagtaacccgagatcactcatctcaaacttagatgacattcccttcttgaaatcattaatgagctttaagctataacctgaaacaagcaaatcatccacatacactgctactaaaagaagatcaactttctcttgtttacgatagagcgatggttctttagaacacttgatgaactttaattccctaagtatcttgttaaatttgttgttccatgctctaggcgcctgtcttaatccatagagtgctttattcaatttgtatactttgccttcactccctttctctgtgaatctttctggctgtgaaacaaatactgtctcttttaattcaccgtgtaagaatgatgttttgacatcgagatgatgcacctcccatccgtttgaagcagcaagggcaatgatgaagcggactgttttgattcgtgctacaagggaaaagacttcgtcaaagtctatgccatgtcgttgtacgtaacctttagccacgagtcttgccttatacttgtttatgctcctgtctgcgttcttctttagcttaaacacccatttgagcccaattggcttagctccttgaggaagttccactaaatcccatgtcttgttcttctcaattgatgtgatttcgtcctcacacgctctccactctcgtgtttcttttgcttcagcataatcccaaggttcctcgtttattatagagagcagatgttcactttcttcttcagcaagtagaacataatcctttaagtacttaggccttgagacttgtctctgagatcttcttagtacaggttatgtgttgactagtgcctgatcttctacttgtatcatcgtctcagtttctctgttttcctctgttcctctgatttccccgatacgagtagtaccttcttcctctatgctgttctcgcttgtctcagaggcatattcttcatcttctcttcttagtccgttatttccaaatgcttcaaaaccgagaaaaaaggttcctgattcttctcccgactcatctcctagatcattccaccataaaattttagtttcatcagaaacaacgtctctacttacgattattttgcgtgtggttggacccaagagacgatatgcctttgagtctggttcagttcccaaatggaaaagagcatgagatctgtcatctaacttcttcaagtaaggagagtctattcttgcgtatccaacacaaccaaacacacgtatgtgttctacattgggttttctccctttgtatgcttcatacggagtttgatttgttagaacccttgtcaccactctgtttatgagataagtggcatgacgaacaacttctccccatagatagtttgtcatcttcataagcttctaaacagctttattcaagcttgtcgcatcggtaacaagtaactttagatgtatcccgctcttgtctatagccttgatatccaaactgaccgcgaccacgacttcttcctctttgtcctcttcctcttccattgccttgataagattgtgagtcatggtttgcatacatgagcttcccttcattagcttgatcttcctcttcatcacatattctttcttcatagactttcatcctccccactatgtcttcaaagcttgtcttgttaaggtcaaggatctgttcaagtgaggcgatgatgtgtatgaagcgtttccttggtagactgtttaagaacttcttgactaactttggtgcctcaatcttctctcctaaagctgcagatttggtggttatctctgaaagtctccctgcaaagtcttctattgtatctgtctctttcatcttaactttctcaaattttgccatgagagtctgaagtcttgcctccataactctttctactccaacgtgtttcatctttatagattcccaaacttccttcgcagtctcaagttctccaatttgaagagttaaagactcgtgtactgattggaagatgagggcttttgcgatgtcgttcttgtccacgtcttctgatcccggttcaacagtatcccaaactttgtgtaccttgagcaacaacctcatccgcatagtccatatgttatagtttgtagcgttgagtaaaggacattggatggaaactgagctcgtttcttttaacttgctgcatgtagttaccagaactatatctcccatagtttgattctctgaaacaaaacacgactttgttattgttttagagttttgttcgagaattcaatattgctttgataccaaatatcaaattatagaacaagagaatgatgtatataaagactcactctttattaatctttcagaaacttactcaaaacctaaagctctcaccaaagctctcaatctctcaaactctaaacttctcaataggattaccacaacttggtatctctatttatatgaacgcttctagtcattagataactcctaataacattagataactactaaatattgtatttagatatctcctaaatacaatcttatcctaaatctcttaggatttggttagcttatttctcaagctaacttcaagcttatcaacaattagcacaatattgcagttggtggaacaaaacagatctagtaaactaaaaagcttagcttgagagaagttattatagttcctggataaacaccaaaaatcagtcaacccgaaaaggtacgagttaaagctctaacgattatgtccataaatgtacttcaaagaaattatccgataagtattggaatagcgcggaaacaagagcgatatggggtacaacacttaccagtatgttacagcggaatctctcggctcccgtagatgaaaatgtcaccagtgcataaacgacgacgaaacagtgaacgtagtaacacagccggttctgtacggggttgtgacaattatagaaaacatggagtttattgaagggaaaggagccaatcgttgaaaccgatgagctggagaaagatcgtcagtttcatcggttattctgtaattagagtttgagtttaagaatggttcgttaacaacctagttattcctaaatctactaatcatttgtttcctgagaataccctaaacctgacattttattatcttgatttacaaccaaccaacatgctatttgcttactttcctttcgttttattttcttatactcttttagcttaatcttaatacgtaactcattgtgtgaacaaaagaactttgtggaattcaacccttaaatactatcgacgatctcttatttgagagagaggttttaaggcaatttgacctacatcaaggtccgacaatagagattcgggaagaagacggtgaagttttttcaaataacatgaaacatggaaaaattaaatgaatttatcatgtaaatgacatgtgacattgattagaaccgtacaattgtgtgaagtaaatagaaataacatgtgatattatcatttgttggaaaaaaaacaccatgtcatttgtaaaaatagcatgacatttcgaaaaacataacattaatagtatgattagttgaagtaaataaaaacagcatgtgatattatcagagtcaaaattaggcaatttacaacagcaaacggttaaagcatcatcaccatcttcaccgaagaagacaaattgagaagaagaaaagacaagtaagtttcacttaatgtttgacagattgaaaaagataagtttcacttaggataaacacacattacctttagcttgtttggagagagacaatgcacatcttcaactctgagtttgcagcaccaaacggttagaggatcatcaccatctttttcttatccagctctaaaagtcaatctatcaatgagatagatggctaaagcaagttgtcttttaaagacatctcaaggctccacatcattccgatatgaccctgcagtttatcaaaagcatgactatgagagtgagacattattgaagatactacaattttctcttacctctattgaataagagaatcatttcttaaatacataagaaacatgtttcgaaataaaatgtcaacttgttaactatacaaatatgatcaagtaggaaaaaccacacaatgatccacacacttctatctataggttacgactatcatagtcaaaaaccaactttcattcttagattttgcaacataaacaaattatctttaaaaaagaaactaaataatagaaatatacttttaaagttaaaaacttatatttatgattaattagaaagtactccaattgtgcaagaaaattaagtaactagccatgcgtcagaatttggtaaataaagctttttgaggtggggttgggtggagaaaagatcaattaacctcttgaaattataatttttacaagataatatatttgtttgtaagtggttgtggagatttaatgagaaaaaaacagatttgaccatggaagcaatacgggggatacgaggtcttggttgacatcaaaatttggttatggatgagatagtggttgtgtcagaagaagcagtggtggaaaatttgggtgaaaaagatagatctagcggtagaaatgatacagtggttggtaggaatgtggttatggagaaggtgtagtggcggaagagaaaacagtgctgatggaaaatttgggaagaaggtggaagaaacaccaatgaagtttcgggaagaaaacagatgaagacttagatttgaagggaggaaacagagaggtccgacaatgaagttttgggaagaagacaatgaaggtttttcaaataccatgaaacatggaaaaattaaatgaatttatcatgtaaatgacatgtgacattgataaaaccatacaactattttaagtaaataaaaataacatttgatattatcatttgttggaaaaaacttagtgtcatttcaaaaatagcatgacatttcgataaacataacgttaatagtatgattagttgcagtaaataaaaatagcgtgtgatattatcatagtcaaaattaggcgattgcagcagcaaacatttagaggatcatcgccattttcacaagagaagacaaattgagaagaagaaaagacaagtaagtttcacttagtatttgacatattgaaaaagacaagtttcatttaaaatatataaacacacattacctttaccttgtttggagagagacaatgcacatctccaactctaagtttgcagcagcaaacatttagagcatcatcaccatcttttttggagccagctctaaaagccaatctctcaatgaaattgatggttatgcgggttgtggtctttcatttttttgcgcatcattctacatgcttatcatacattttatggttctcttaaagtgtacagaagacaatgatttgtccggtaatgtttcttcaagtatgtgtggttgtcttagccggcatgtgttataggatgtgagatttttattattttattaaagatttaagctgtatattagacgatttagttgtttttaaaagaattcagatctatacccccaacaaatcaaattcacacgaattctatgtaaagaataaaaacattttcgctcatttaatcaatgtttaatatttcttaatcaaaataaatcaaatatgttacctaatctaattatcctattccctaagttttttggttttaattgattattttcataatcttcttccaaatgtaaattaagaaaataatttaaaatattcttaaatcaatccacttctatttttcataaataattcctaaagatttccacattttattgattttttaacaaataaaagaaatgatgcatgaaaccctaattaatgattcctatacaaatgttgataacacccatttcatttatcaaatcacatgttttgataactagattccttaaaccatttttgtttccgagaaatattacaatggtaatacttattatgttttttgtttctaattttctttgttatataaactttcattttttataatttgtgagtatactaaacattaaaatgtttatttataagtatatgcaatatttatctatgatatttaaaattagaagattaataaggaacattattcatcataacataaatgtaaaaacaaagatagtttgatataaaaagaaaaaaaaagcaagaaccatatgtggaaaattcgtaagtagatgggttcacgaacatttctactgcaaagagaaaaaaaaacaaatccacacaatcaccccacatatactttaattgttattattttataatacaaaatataaccacttgctacacattttttgaaacgaaattagaaaaaaactaatatagagaaattcggtccaaagaagaaaaataattgagagaaaattattacatctagagatcgacacaatggtaatgtaatattaccattttccatgtctcatgacgcatacatctcatacatcaaaataattatatatctcatgccgcaaggaagagcgagattgcaaacctctttcgcaaattaggtttagaagtttaggaaaatgaaccgggtcgggtcgggttttgcccaattccaagcatacatttcacgttgactgcatcgacatgtctgttcattctcattccttttgtccactatgtcgatctctgatcgaaccttttgtcggtggagtaaaatcgacgatgcatgaagtgctatttcgatttctaacccggtttacggtgacacgaaccattacgaaagaactgagacttccggttattcggttcctgaagattcccagagaaaatcggcggtgattgaaatcccatggaggaatctcggggaaatggagaacgatttgactcggagtcactcattctcatttctcttgtcctctatgttgatctctaatcgaacttttcgccggttgagtaaaatcgacgattaatgaagtagctattacgatttttgaccttatccaaaatttcttaaacttttgagttttatccaaatatgtatgaaaccttattaaggcacagacactgcttttttatacatgtaaaattttataattgccttataaataccttgtaaaatctcttaaacattcttgtaaaaaacttataaaagaccttgcaaaatcttatgaacaattgaaatagtaattaccatcgagaaaaaaccttataaaccttacaaaactttataaactttttcaatttaatgatgggtatttttgaaatagacatctaaacagaaacatgttttttttatgtaaattaaatccatgtctttgtttgccttgcttttgttattttatatctatatgattcttttgtagatacaaatgttctaactatattacggttgcacttacaccacctaaaacttgtatgttcacaaagattgcgtcaaatccacaataaggggtgtgattggttacaaaattagagtaaatgggaagaacaaatagaagaaaagaaaagtcacatcaagaggaaaataaaattttactttttaacattttcacaagaaaagtttttcttccaactttttttgactggtacatatgaagaagaatttgtttcttttttttttaattatagtgaatcaattacaccctaaatatagaccttactgatcatgagcattcaatcattcttatcatgcatggaagttttgtttgtaagaattgttgaatgggtgatgaagtctttacctatgtcttcgatgctgaggagaatagatgggtagaaccaccatttgtgattgctgcacctaagccacttcaccaaagagaaagtgagaatcatgatacattaaaaagaaatgaagaaattggttgcgtcggcgatgaagaagcagcagaccggagtgacaatggagacgagaccagttcacggtgatggtgaggcaatggcgagtctattgatactagatcaaaagaggaggagaagaaaggatagaaaaagggaaaatgagaaagataaacagttgcaagttggggttttaagggtgagtttccgtccatatctatctaaaagaaactagttcattggtggatacatatatagcttatgttattgaagtcacatgatccatctttgatgtcataagagtttaagttctagccgtggtgatgatttcttcctgcgcaagaaaccaacgtgtttgtcaaaaactgctccaacttggaactctagaaatcagttctgagatggcttcttctaatcgggatgaaactttgtgagaatttatggtactactaactaaaattttaacggtgggataagttcatcatttttagtgtgtttctgagactaatcattatagattaaattttgacgagattgcattgtttggttgaggaacaagctcgattgaagccgaaatcttgtagaagctatttcgaatcacggatataagtcttagtgggcaactaactaaattgcaactcaacatgggattgagaatcgtgcagttgaagttgaaacattaaattgatcatgagaaaggagaagtgagatattcttcatcttcaagtggataaagtaaaggtggtactttcaaaacgtagatgcattttattttgctttcaaaacgtagatacatttgactgattagctgtagattatatgatttaatggcttgataattgtggaattaatcttgaaatgtatgatgagaatgtttgatattgtcatggtagtatgaagagggcatatatgtatgtatgtataactggagaaaatcaagcaatggacagtggctttcgtagtaatggataatgattagagcatcatcaccatatttttcgtatccagctctaaaagctaatctctcaatgagattgatggttctgggggctgtggtcttccttgttttgcgcatcattctacatgcttatcatacatttgatggttctcttaaggtgtaaagaagactatgatttgtcctctaatatttttcaagcatgtgtggttgtcttagccggcatttgttataggatgtggagtatttattattttattaaagatttaaggtgtatattagacgatttagttgttcttaatagaattcagatctatacacccaacaaatcaaattcacacgaattttatctcaagagcaaaaaaacattttcgctcatttaatcaatgctgaatatgttttaatcaaaacaaatcaaatatgttacctaatctaattatcctcttccctaagttttttggttttaattgtttgttttcattatcttcttccaaatgtaaattacgaaaataatttaaaatattcttaaatcaatccaattctatttttcataaataattcccaaagatttccacattttattgatttcctaattaatgatttctacccaacaaatgttgagaacacccatttcattcatcaacacacatgttttgataactagattccttaagccctttttgtttatgagaaatattacaatgttaatagttataatgttttttgtttctaattttctttgttatatgaactttcatgttttataatttgtgagtatactaaacattaaaatatttatttataagtatatgcaatatttatctatgtgcatatgcaatatatttaaaattagaagattaataacaaacatttttaatcttaacataaatgtaaaaaaaaagatggattgatataaaaagaaaaaaaaggaagaaccatatgtggaaaattcaaaattagatgggttcatgaacatttctactgcaaaaagaaaaaaacaattcacacaatcaccccacatatactataatggttattattttataatataaaatataaccacttgctacacattgtttgcaacaaaattacaaaacttaaactagagaatgttcggttataagaaaaaaaacaattgagaggaaattattacatcttagagatcgaaacaatggtaatgaagtattaccatttttaatgtctcacgaagcatacatcacatacatcaaactataagtatatgtcccatgtcgcaggggagagcgagattgcaaaacaatcgcaaattaggtttagaagtttaggaaaatgaacctatatcatttaatgtatcatagacctagcttgttattgggccatttgtttttgtttgggattcattgttaacaattatcaaaacagtttcagatttgattcgtaatttgataaaatagaccttcttatctttttaaagaaaattatactccctttgtttcatattataagttgttttcaagttttttttgttacaaattataagttgtttaataacccaatactgaagagtaatcttttaataaaaagattaaaaaacacttactgtcgtttgattccaatacaataattacattttatgaggaaaacaatattacacattttgtaaaaatttaatatttagtcaattaaagttattaatggaaaaataccaacatatagttttagtttattatcaatccaattgtctttctttaaaaaaaatataatgaagaaaaatgaaaaaaaaaggtcaaataagaaaatcgtcagaagatccatcaaacacaatcaagctagcaaatgttcattcgtctatctgaataaaatgtattatgatattggactgcttcatattacagagaaatcaaagacactataccgaagatattggagataattgtcttgagattctagttttaatggtcattgatgatttgtgttctgaatatgaatggaataatgaatataagtgagaaaataatacatttacaaaaattaaacaaaataaaagaagttttaatctaaatataaatcatctatgtaaattttaaaattagagatattcatcctatctaataattttcagatttttttttaaaatcaattataacatgataatacatgacaacaaactaaattcatatatattgtaaatacaacacataatgatagaataatgtaaacaaacatcaaatgcttagatccaacgagttatgcggttgacatatcaaccgaatacaagctatttttgacgcaacttctttgaaatcttgatctccatacacaacatgtgttcttgcattatcttgttgaataaagatactctttctcaattttcccatggccatttctttagtgtaattgatagaacttttttattcaatcatgcttttatatcttctctcttaacagaagtttatgcttttaattctattgttccagtatctctgtttttactccgactcttctttggttgcatagtaacaaatgaaaatattctaaaatttccacaaaatatctcatttccttactcgtcaaacctttgacgagccaactctgctagaaatattacttttcatatgtaattcttactttgacttgtccgatgtggatcttttttgctcttgaagtacataatatttctcatcttcttcgtcatgtagaaccatttttcattgatgtgaactatgttgtacattttgtaccctacctttcatattggcttccttcaaatgtggttgacgctattagtacgacgtcagaaaattgcttctacttttcgtttaaataatgttgtaagactcacgttcatacccatagacatcgacctcaagaatgtcctcttgcttaatagaattttagcaatttgagttggctcaaatgagattcttttaggaccataatttccagtcctccgatgagatacattgacattcacactattagctgtttttcagctagtttccaaatcttttataccattgctataagcaccaaaaaatattacaaacttctcttgttatattttttgccaactttccatcaatactcttctctagtaaaacaccaaaaatcacttgtctctcctcatttgacaaatgttttctggttttttgtaaatttggttgattttgagatacatctttaagttctcttaaagaaaaagaaaaaataaacaattatctaaacaacaattatgcaattactatcttcatggtttgtgataaatcaagaaatcatgagaagacacgagagaagaagattcggaagaaaaaaacaagaagacaacaaaaattacgtcaacaaaatagtccggcaacaaaaacaagataaaatttaagcaattacgacaacaacaaattatgtcaacaaaaaattcaagcaattattacctccacttttattattcaggaaaatataaaatattcctccgaatcttgttgtgattacgtcaacgaattaccgatatattcagaaaataattaattacttaattattcctagtaaaatatggtacggttatttgatctcgttggcccctttcatcataccattctttcaaaaaactcctcttattctcactaccgcctctttttctcaatatctttgaatactaactctatcatttgtcttgatggtgcaccccacttatctttatttattttttcttcttcttttaagattaccattaaagctcacgattttcatctccacatacatatctcctctcttcttctttctttcaaaaacactcttgttttaataaaacaaaagactaaaatacatagatttttggtgacttttttttgatcaaaatatttagatataaattcatattttgtttagagattttttggtcaaaaaatctgattcatacatatactcagatacatagtagtacccaagcatcatagttgtacctaaacgacaagattcatacacaaccttagaaactaaaacaccaaccgaacaatagtacctaaacacgtatatttatacaaaaaacttagataccaaaacacaacccaaactattgtacataaagcaaaatccaatacaattgtatctaaaaaccacaaccctcaaaccaccaaagcctctttttcttcttcttcccattgttatttctttctccttcgcctttgcctttttcttcttttccttctccgcttttcttcagtataaggtttgctgacttgaatggaaggctttagtgtcctatgtgtcaacttacatttcttcttagccattgtaattactatcctgtaatagccattataattagtacatccaacaacaaatacaaattaaatatcaaacatttaaaagcaacctcaaattctacattaacacaaatggttttcagaaactctcacaatcttgttatctaaatttataacaacccgctccatgggacccgcatacatgtaggttattggtgatcaattggtaacatcttgtcctgtgggaaggttgttaaaaggtgaggtcttgggttcgaggaacgccaagcacaccaataacctacatgtgggctttggtggcccaagcagaaaggttagggtcgatgcgctgcagagccagcaggatgccacgtggcagagagtggccacgtgtgcgggtcccacgggacgggttgttacaaaatcaaagatataaaaaatatgaacacaaactcacacaatctcattatttatctacataattataagagataaagtttgttttcaataattttcaaaaacttatctaataaacacattttgaatctatctaaaggaaaaattaaaatccaaaaatagagaaattcaagaccaaaattttgtgaaatccttcttgaattccgtgaaattctttccaccttgttgaggattgcgatggatatcacattaagggtcttataaagttataatcaacttcatccacactttttggccgaccttattagtgaggaaatcgtcgttcataactgtcttggtaacaccatatgtgaaggtaagtagattaactttctcttcgcataaatattttatagtgtttgcatcgtagataaaagaatgttaatcactgccatgaacttattttattcaggtttcgcacgagactgacgaatctaagctatgttacttctacactcaatacgagaaatggaaaaatgaaagatagaaattatctaaacagatggacgatcaaattctacaagggttgctatctgctctaaccattttagagaggatttttttattttgcatactaattgttcatatatatttccaggggtttgggtacaagtaatgagagagaaaaatgtactttctaatgttgatcaaaataagagattttttatttgggatgaaggcagtgaagccgctttagagaatgcttttggtacatccgaagacaaacaaaaaaaatggattgaaaaatatgtggtatgaatgagtgagatatcatttgatcatttgttctctttgcttgttaaatatgcttgttttgatgtcacttatatcgttcagcctggcacatttcttgattcgaagaaacaacaaatcatgtacagtgatttcgtcaccaaaaagctgaaattatatttcactacgagtaatcaaagaaaacatataaatataaataaaaagaattatatattgaagaagaacgacaagaaaagcaaaaaaataattctaaaaaagtacgaaaaaaaagtaattcaatatattataattgttttattaatttaattgtatacacattatctaagttttgatagtaaaacattatcgaacaaacaaagaacttatatttattctcttaatattgataaattatgttgactttaactaaaatattaaactttcaacaatgatttcttatgatgtgaaaaagcacgtcgatggttgaagttaaaaatcttacaaatatgtttttccaagttgggagagctagggaaacctaaagtcttaaaattgttagaatgaaagaaagaacatcttatcaatttgttgccaaataaataaaatatttttgttaaaaacatattgaaaaatatttagatgtgtaaagtaatgtaataaaaaagatgtgactcatagtcgttcctctggtatggtgggggtacgatcgctgatcgattagcataaaacatgccaggcctgttgaaatccccgagagtacgacgtggttccgcagcaagaggaatagctgcaggaatctggggttggtgtcgatcgacacctctgttgtgtcgctcgacaccaatcgcgtcttcattctgctcccaaaggtgtcgatcaatacctctattgtgtagatcaacaatgagccctgctgcgtctctggcagctaattgtgcattgaggcgcgcctgatcctcattggcgtcctcaggtgggatgagtgcatgatcatccaatctctgaccagcctcattgtaggcttgcccatcctcaactctcataactccttttgcatcagctctgatgactctgtcagccattgctaatctctgagttttttggttggtgcgttcaagttttcccaagtccagaacagacaagttgatcaactccttctgttatgtgctccttgtttgcctaggcatacacctgaaacacagaaaagaagaaaacaagaaacgcgtgagtaacaaagtaaaagtaaaaactagacgaaatctgtaaattaaactcaatggtgattcccaagaactttggcaacggcgccaaatttgataaggttcaaattaccctaagaactactctctcaaataagagatcaattgcagtatttaaggatcgatttccacaaagttcatttgttcacacaatgaattcaatgtcaagattaagctagcagggtatgattgaaattataagaaaacaaagtaagaagacaacagattgattggttgtaaacgattaaataaagaggtaggaacagggtattctcagaaaaactattggttagtagatctaatgaaagctaggttgttatcgaaccattcttaaactcaaactctaattatggaataaccggtggtgttctgcgaaactccctatgtctatagcaaagaataaccggagaagccaagagagctttaacctaaacatgcattctaaacgagttcaattgttcaccatagtagataggccgattcttattacacaaggctcatcaaataatagatccaactatagatacctatggtgggcatatctattgtctcgattcaagatctagttaattactctagatctagcattaagcataatcaaagatgaagaattctacaaatatcctagcaaaggggggaatctactaaaccatatgaatccttaatgagaaaccctattcctaacaagcagactactcagacatattgaatgaaacaaacaacataattgagatagaaagcataaacacagcaataaagataagggaaagaaaggatctcttcactgtattgaaaactgaatgaatctctgaagaacaggggatgaatagcttatgtctctcaaaataggattttgcaaaaagcttgataaaagaaaaattaggtctaaaaacaatataaaaaccctataaaacgtgcagggactaataatgcaattaggaaagtcttctggggcaaatttcctcttctgtaaacttgaaagcgtcatggagtttgctgggccgaaactggtgtcgatcaacactctctctgattcctgaatccaaaatcgtccttagcttccttttccttagcttttgctccaaaatgtctcattatctccattgttgtcctattgcatagaatacctgaaaagatactaaaaagactcgagaaataacataaagactcaaaatcctatatctaaaacatagataaaatcagtcgagatatatcagatcacaacctagctatttctagatctactaatcatttatttcttgagaataccctaagtttgacgcttttattatcttgatttacattctcataatctattatttgctttcttgttttattttattttcttacttatttgtttagcttaattcaaaatcattagtctattgtgtgatccgagagctttgtggaattcgagcctaaagtactataatcgatctcttatttgagagagtggtcttaggattaatttgaccgacatcaaatttggcgtcgttgtcgaagttctatacgattcactattagattaggattagaattttgtctaagcttttgttttttctttttctttttagttacttagtctttttcttttctcttgtgtgttttaggtgtttgtctaaccgtagaaccggaaacaagcaaagaacatgaacgagcgtaagattgattgattcatggctaagcttaacgcagaccacaatctagttgttgaggatgtcgattatgttggtagaagaagttttcagaataagagatttgaacaccaacaaggcgacaaaggattttgtgggaatggtccggctagctacactcaaaagtctcagttccagcagcctcccccccccccctctccacccgcaccaagaagcaagatagaatcaatgctggaacagattctcgaaggtcagcagaagatcttaaaaagagctatccctatatgaattgagagtagcctaacaacttcttggcatgctgcttcgatggaaagtgaagatgagatcccgaaagttgaggagagtgatgacgaatttgtagttgcaaaggcagtgtcgaccgaaaccaacccatggtattgatcgacaccaacacatatatacgagacatcaagctgtgatgaagcaaaatcaaccagactcgacattgatctccagaatcgctcgacacacattgatagtgtcgactgaacaatacgaaactgagccagtgtcgacgttcgacagagcataatcgaccgagattgacagagcaggatcgatacaagacagtagtgtcaaccgacactcacctaatgtcgatcgacactggacgcagactgcaccaatcaaccttgactttccacatgttgctgaacaagtctacacgcctaaatttcttgttcaatgcctcaacagtatatgcaagagattcaggaggagagctacaaagctccacagaatcagggagacaaaaggaagacaattattgtctcggaacaggtttcagagctgaattgttgacaggctaagggaagacgagttatagcacgagtgtcgatcgaaacccccactaatgtcgatagacaccaatcactcgttgaagcagaatcatctacgctagctacttttcaagcttgaaatcactgctataagtctaggaactacattcacgtcacccattgcacctctcatactccatccatctcctaaacgacaaaggtactcatatcatcctcctagacctcgtgatttcatcaataagagtttaaaatttcaaaaaacagttttacggttaagaaagccacgagtttctcaacgagcgcttgtttcttcttttgatgattgtgcaggaaaacggagaagatcacccatacctctgtcatgccctgctgatgttctggacttccttggtagacctcacatgccaactgcctatacgccaccatggttgatgagaggttttactccgcggtatttactgccaccatctgatccacctgattcccaaactccatcaaagtcaagctattgactataaacaagcgcttagtgggaggtaacccactggtatgaattttctttttcttttttcttttatttccgtttttcttttattttcttttttgcttattttggctttgaatgtcactagggggaggcgcttactaactatgtttttctttttgaatcttatttttactcttatttttctttttgagttgctttatggagtcaaaattttgtttggaattatgatctctattcttgagattattgcctggttgactaatgctgcaggttaaactcaatccgactattaaaaaatccagatggcaagccaacaaacttgaggatatccttgtttccaacacaatccattaaggctggagctaatctcactactattcctttaacctcatcaaaacggttagtgttcatggaacttgactccttgttcatacctgatagttcgaccgatgtgtaaaagaataagtgttcatagctactatgtagcgactatcaccaaaataattagtctaatttaatccgcaaaatcaagcccaaatagttttggcccaataattttcccccaattcgagaaaccttaagaagaaaacccccaaaatcacatatgatccctcttccatttctctcttcctcttttctctctatctaaccctaatctcttccccaaatcctctcgatctaaccctaatctcattattcttccccaattcttctccaaaccttctcttcaatctatcataactcactaatctctttgaatcttctcacttaatcgaacactaatctcttactcttccatttctcgatcaaatctcttcccagatctcttcccttcgtcgtatctctctctttcttctgacaattctcccctgaagaacacaatgactggtaagcgaaagagaagaaatgttcctaaagcgtctcagagaggcgttggttccaccgttgcaaacataagaccggcaaatcaatcttctcaatacaccttcataccagcagcggtagaagtttctctggacacccaagttccacgccgcgttattcttcaacctacaataggtgtagtgcattttttgcgactatcgacccccataacatcttttctagaacttagacttttagagtcaatcatcacaacgtcattcgtcagaggaagtccacaatagtcgacatctgactctagagcaaacgactccaccgcaacaacctccacaacaaacgccaacacaacaacaacctccacagcaggatcatcctccttctccacatcataactctgatgctcaaagtcacgggcttggatgttcctctcaaggtaacaacttccagaacatgatgtcgtcagatctcgaggaggatacgattgaggctctgaatgctcagcttatggtgccagactgacatatgtataccacctttctctctctaactctgttaccaaagaaaacttggtatgacatattccatctaattatgtttccttatcaatgttttaagaagtcctgtttgtattatgagtttgatgtcttaggttcatttacttgatttttgatatgagtacatgtctgagatgttatcataaatgagatatctaattagtttattagcattgagagttagccagagtcagtttattattaggttgcttaggttatagtggttaatttaagggttcttcttatttgcatttttaatcattcaagtgttgtagacatttgtttttataacttcttgacttttttgatttggattcactctccacttgtttacaaatatttcaaatttactcgcgactatagatcaagactggtaaggaagattacaaaactttttacaaacaaattcgatggtccttactatagttggacatgagtgcctcatggtagagcagaaggaatatttcttggaggttgcggtatagttttctatcttatatcacttgtgttgtttcacatctatagtacttgtgttgtgtcactaactctggccatgttttctttgttttgtagtctacccacacattggattccttgataacagggatagttcaatactattttgaggatattatacaacgcttttggaggacgagtagagagcgaccagtatggatcatggagaccatctgaaaaataatggttgcgtactagtaaactgaagaagcaattcaaaagagtcagacatattccaaatggcgtatgtctgaccatggtggcctcggtcctcacatccacttatcaggcccgaagtcatatcaacaaatccaagatgaattggtaattaacttacagctctctctcttgcaatttgaaactctgtgataatcattgtatattttgtaacattgtaggaggaggaattgggaagaccagtgagtgttggtgaggtcttcagtaagactcatacaaaaccaaaatggtacgtatgtcgatcgaaaggtagaaaagattgctcagacctatcaaaagaaagtgcaagaaaagttgacagagcttgaggcggagacttctgctgtttcagacggtacttcacaacctcgagagctcacagttgatgaatgtacaaccatctttcttcaggtacacgtccaagtagttatcatccgtagttatagaatcttagattgttttctgacttcaagaaatcctctaaacttattgttttttttttctgacgtgtcacagtccactaagaaggattcaagaggaactctttatggagttgggaacatgaaggggatttttctcaatggaaaacacaagcaattgagagattctttttcctctatggcaatgtaagaacagctgaaggaagctcatcataaaatcgaagagcatgctgcatataatgaacaccgtgatgctcgttaagctgagatttccaaagcggttctcgagcaagtagacatgatggagcacttgtccttggtggagaagtaccaaaggcaaactgatccatcccttcaagacttcatcgagagtcattcaacttcaactgccatagagcatgtcgccactgatctcccccaataatttaacgactacgttacgactacggttacgactacgcctaatagtcatagcgtactcgttaaatagcgactaattttaagactattaaatttagcgactctcgatttacgactacattttttatgcgtaactagacttttaacgattatattacgactaaacttgcagtcggaaaatgattgttttcttgtagtacacatttgcagtatattcttctaactttgactcgaaacccctcttttgatatcaacaaaacctttatgtgtggacacattccgccaatacaaccacactcgcagcaagttcaacccttggattctcgtacctaaaaaatattatggtaaatcctccctcccatgttcttaagtgattttgagtatataagaatttaaacttcgtttataaaataaaagaagaaaagactatcgtaaatcctccatcccatatttgtctatcaaaagttttactctacattgattccatcactacataaatttgggttatttaaaaaccaacactaaaaatgtctcccttttatctctttttataaaatatcaataatatttcttttgtctttcttttttattttcttaaatggttaaaataagaagaagcagcttaagcatgagatgctttattatttatggctcttgccaggatttttatcacttatgctacttttccgacacaaaaaaggtaatagtttatgccaccttatgtttttaattttattttacatttatttaagggttggctgaattttcagccctataatcgttgcaatctcaacatttcacctctaaattttttgtctctaaaaaatcataaataaaactacatgtattttcggatttgttcttaaaactatgcctccaattgaaccgatcagttaaccgataatattttatccggtttgacttacatataatgttgatcaaaattcattcattttgactctattttattccaattttgaccccaaaaacaaatataaaaaaacaaatgtcttctctataagaaaattttatttatttatttatttattattgataaacaaaaaataatatataaattttttggtaatataagaatatataccacaaaatagatcacaaattcattttttggtgctatattttgttataaatgtttggtaatataaaaatatatacctttttcttttggtaatcatttgtttttttgttttcaaagtatatattatggtatttataaattcatttttctttatggatttagttttcttataacaccgttatatatataaaaaatgacctttgaatttataatagaaaaatcattgtcaaaagtaaaatgtatatattgttatattaccagaaatttataacaaaatatagcacaaacaataatttgttatataaacaaaagtatagaccaaatattgttatatatatattgtgatatatatcaagaaaattaagctataatatatatttttaactttttatcaaaattaaacacatcaaacaaatttttttatagaaaatatatttttttaatatttatttttgggtcaaaattgggttaaaaaaaagtcaaaatcgattaattttggtcaaaatgctgggtaactcaaaccagatcaaatattactggtatactgatcggttcaattggaggcgtagttttaagaacaaatccgaatgtatatgtagttttattgagaataaaaaaattttgggtggtttttctagtggtaaaaattgtggggtagaatattgagattataactagtatagggctgaaaattcatccaaccttatttaaaaatcaaaataaatagaaaccaactaaaaacacttaacctaatcctaatataacatagcctttccattactttgctaactcaaccacaaaacataactcccttatccttttttcatgctgcttcttcttctttttctggatttgttttattttttattttttatcctacatttccttttttccatcatcatcatcaacaaaactttagatctcttcgcgtttctcatcgacctttgttcttgtcttcttctccatcaccatagcttcacatatgtgagatccaacgacaaccttgatctagatttaaggttttgttgtagaatcggcaatagtaatagagataaagaaaggtcatcaaattacagtgacaggcgataatcagtaacgctgatagaaaaataacagtgctatggtttaggaattataagttgtttcagtacttaggccaagtcaaacgtcacgggaaaacgttaaaataacgtgggcatgtttactttttcactccaatcagacagtataatttgcactataatagtgtggttctctttttttgtacagtgtaacactatatttggtgtactactgtagccacgacaaatattaaaataataatttttcttttgtgttaacattattatatattaaaatagcttatttagttacaatagattatatatgatttgtaatgagatttaagtaatctaattaaggcttgtaactaaaaaataatttataagtactattttgtaatctttaatttaataaaatgatggattagtagaaaatattaaaactaatacagaagttgattgaaaatacaataaaataaattatacattgataacataattaaaaaattaaaaccacacaaacataaaaaccaaatgcaacaagataggttttaaaaacataacaaaagcttgacaaatggttaaggaaaaatattttcggttccgctaagataattataatattgggtaaaatcttcttggttatttggtgatctttggtcttcaccttgatccggttctccttgaacttgttttccatgagatggactttcttgataatgagatgctcgatattgagatccatgatattgagagccttcaccatcttcttcatgttggtttgtttgtgctcttttttccaaaattctttttctctcattttcaatatatgcacgagaggatggatcacttatagaattcaaatctgcaaataatattttattctcttctttcattctatctacctcgatcttctgcctttgaatttcatttctttcagaagtacctttagtaatagctttgataagtttatcattttgctccaaaagttgttttagctttgttttttttaaacccataggtcttgaagataaactaaaattggcatcttcactatccatatttagatcaattgaattcataccaggggaaggtgatgactcggtattgattaaaaatgatgaagatgacgtaacatcacgaccttatccttggaatgcagcgggtgtcatcatgttatcattagcaaatttctcaatacctttaagaataggccatacatgatcaaatttgaatcctctcttgtatttttcatattgagttaataacatctttgcttggtttaactaattacatattgataagaaacaaataaaaataagttagcatgtgcaaataatttaataaagataagttagtaagcacaagaatttataattgagtacttataatatcttctttggaagcaccgctaggatttttattctcaatttggttaacgcatcctctcagctttgagactgcagaaagaattgacgtcattcgagtttgtaaagatctttttggtcttcgttgaagacgaaaaggatcggatttatgatactcagcttcaactcttgtccatagttgatctcctgattggtttatttctattattggattttgggaaacatcaagatacacacgacacaattgtatatcttcttaaatagaatatgacaaagagcgacttgaactcatttttgaaaaatataagaagtaagaaaaagagttggagatgtgtgattattcatagagtagtatacatttatatagagaatagaaagcaataccaacggttagatcttggtaaattcaacggtcaagattaacttatttttttctaaagaagtgatacttgatatagacatgaaatgactaatcaatgcagtggtaagatcttgatcaaagaaattcaacggctaagatgaactcgtctttttctcatgaggtgataattgatttgcgatatgaaatgactaatcaatgcaacggttagattctcttcaaaaaaaattcaatggctaagatgaactcatctttttctcatgaggtgaccattgataaaagacatgaaatgactaatcagtgcaacggttagatcttggtcaaacaaaattcaacggttaagatcaatttgtctttttctgataagatgaatatatcaattccatgcttttctatataatgggcaatatgtttagaactaaaataaatatcactatcatcttctatttcttctcatagaagatgagttttaactacggtagtttatcttatattccgtcttctttttcttcttcttcttcttcagataataattattacgatgatatagaaaagcaagtggtatctcaaattactactaacaataattttctttgctctcaacacctatataactcagaaggttcgcatggtggatctattcatggtcatgtagttatcaatcgtgatcgagaaaatgttgctcgcaatcttttcatagattattttgcagagaaacctgtgtttcctgagacaatgtttcgacgaagattccggatgagtcgttctttgtttcttcgtatttatgatgctataaaaagacatgacaattacttcgtccaaagaagagatggagtcggtaaacttggcttgtctggtttgcaaaaaatgactgccgcatttcgaatgttagcgtacggtgtaccagcagattccaccgatgagtatatcaaaataggagagtctacagctctagaaagtttgaaacgattttgtcgtgccattgttgaggtgtttgcatgttgttatcttcgatcacctgacgctaatgatgttgcacgcctacttcacattggcgaatctcgaggatttccaggtatgttgggtagtttagattgcatgcattagaaaaggaaaaactgcccaacagcttggggaggacaatatgctggttgtagtagatctcctactattattctagaggctgtagctgattatgatctgtggatttggcatgcatattttgggttaccaggatctaataatggtattaatgtgctagaggcatctcatctttttgctaatctagctgaaggtactgctccacccgctagttatgttatcaatggaaaaccctataatatgggttattacctagctgatggtatatatccaaagtggtccactcttgttcaaacaattcatgatccacgtggtcccaaaaagaaattatttgccatgaaacaagaagcttgtagaaaagatgtggaacgtgcattcggagttttgcagttgaggtttgcaatcgtggcggggccatcacgcttatggaataaaacagtattacatgatataatgacatcttgtatcataatgcataatatgatcatcgaagatgagcgtgatattgatgcaccaattgaagaacgggtcgaagttccaattgaagaagttgagatgacgggtgatgatgatactcgatttcaagaatttttggctcgacactgacaaattaaagaccgagaagctcatattgaacttagaaatgctttaattgaacatttgtggtcgcaatatactaattctgaaaattagtacgattgaaattatttttattatgtttggtttatcgattgtaatattatattaattaatgaagaataaaataatatgttgtgtttaataaaataatatgttgtgtttctttattttgtattaaatttgtttaatgtaataatttgttgtctaacatttgtttccaatattattaagtatttttaaagtatcaatattttaggttaataatataataatagagaatagtatttttgatgtgacttttggtgttgtggttggagatgaaaaagaatttagtgtgaaaatcacaccaaatatagtgttattctaacactattttagtgttgtggttggagatgcccttatgtactacttttccttactaaattatatcattttattaattgcaccagcacgagtgtgaattttttgtatgaactaaattgattattttgtttttaaaagtaagtaatagtattgtaattttttattaaatatttcccatacaaagtatgttgtttttctaatttgaataaaatattatattatattacggttttaaacattttagctaatatgggacactgaacacatctttttcatcaattggataatatatatccatttttaaaaaatttaatcaccatatatattgaaaaagaattgagattttttaatctttatgtattatgtgatgtttcaaaacaataaaaaaaattcaaacaaaatcgtaattttaaattttgatcaaatcttctaaatatcaatatttttaaatatggtatatctggttcacaatttgggatttgttttgatccgatccaaagaaaaatatagaatatcaggtgtaagatttcgaagtacatttgttatagggtcgggtacaatatttgtcggatcacaatttaacccacccgcttaaaatgtatttcaaaaatactatagagattagatcatatcccacatgttaatttagtgaatttattttgttacaatattaaaaaatttctaatgacatcctaatgatatttgttacacttttaaggttacaacttatgtttgtactccccaaataatatagtaggatttgtactagttgtccatattcgtatttcagttatattttttgtatcaattgcattattatatttttgttataccatttgtacaaattcgtatttatattattattttttagttataccatttaaactagattgtcatgtgatctctcatttgtaacagctgtattattatcttttagttgtaccaaattgtaccatttcttctgttattttttaaggataatttagagatattatatttataatgacactcagattacaagatggtcacataatggcataagttagcggtgggtgttcaggttgacattgggtatttcagatttttgggtttttagatttagagatatagaacccgtttggatattcctagatttcgggttcggatcagacatttctgattcggattcgaattatctgaaattcccagaaaatcaaatcgtttataactaaatctgtccaaactactaatacacaaaatatctaaaaatcttgaatatttttggaaaaattctttttaatgcccttttcatactaccctttttcaattctacccttttctatttaccattttcatttataccctatttaaaattttaatgaccattttacccttatttgtaaattgatttaggttaacaaaatgaaatattaatatttttcgcttaaaatattccaaaataaaatttccagccaaaatttcccgccaaaaattttccaacaaaaaattcccgccaaaaaatttcccaccaaaaattttgaaaaaaaaaattcctgccaaaaaaaaaatttcccgtaaatttttttttttgggcgggaaatagattttcaagggattttaaaagggttttaaaagagattttaaaacggtttaaaagatttacaagagattttaaaagggtttaaaaagattttctagagattttaaagggctttaaaagacttacaagagattttaaagggctttaaaaggcttacaagagtttttaaagatttttaaagagtttaaaagtgttttaaaagatttacaagagatttttaaaaggttttaaaagatgtacaagagttttaaaaagattttaaaaaaaattataagaaaaccctttaaaaactcttgtaaatcttcttaaaacattttgtaaaggttcacaagagttttaaaatggttcaaaaagagttgtaaatgttttaaatacttacaattctttttctaaaagttaaaaaatgcttgtaaagactttataagagttttaaatggatttacaaatgtttaaaatccttttcaaactcttgaaaaactcttgtaaatcatgttttacccttttataagcttttaaaatccttgtaaatcattctataccacttacttatcttttaaaaacaattgtaaactatgcaaaccttttttaaaatcccttgtaaatcattctttgacacttacttatgttttaaaaacgattgtaaatcatgttaaacacttttaaaatcccttgtaaatcattctatgccacttacttatgctttaaaaacgattgtaaatcatgttttacccttttataagcttttaaaatcccttgtaaaccattccaatgtcacttacttatacttaaaaaaacattgtagaccatgctaaccatttttaaaaatccttgtaaatcgttctatgccacttacttaggctttaaaaatgatagtaaatcatgttttacccttttataagtttttaaaattccttgtaaatcattcaatgtcacttacttatgctaaaaaacgattgtaaaccatgctaacactttttaaatcccttgtaaatcattctatgccacttacttatgctttaaaacgattgtaaatcatgttttacccttttataagtttttaaaatcccttgtaaatcattcaatgtcacttacttatgcttaaaaaacgattgtaaatcttgtaaaactattgtaaaaagttttaaaatgatttacaaaggtttaaaaggcggtttaaaagtatttatctatgtttttaaagactttataaagattttaagaggttttaaaatgatttacaagggtttttggcaactaccaaagcttttaaaaaatttacaaggatttttaaaagcatttttttggttgggaaaaaaaatttacgagaaaaattttggcaggaaattttttttttggcgggaaagttttttttttggtgggaaaaaaggtttggcggaaacttttttttggcgggaaaaataaatttggcgggaaactttcagtttccaattacatgttcttattagatgagggtaatttggtcattctgttcaagggaaatgatatttttaaaaataaacaatataaaagggtattgttgcaaaagagtagtaaaaaaagggtaattttgaaaatctcccatatttttgacccaaatttattcaaaagtgattagatacctataaatattataaatatcacaaaatttatatattttgacacaaattattacaaatataaatattaataataatatattattaatatttatattgtggatatgtacagaaacccgttggaatcggatttgggtttattttttttggatttggaataaaactgggtattttgaaaatttgggttcgggttggatcaggttattattggattcggatcgggtgttgggtttggatattatgcccagcaatggtgagtactcctctcgccatcatcagtctttactctgttccaagtcttccttctttggctcaaatggggtccacgatcatcaatccaaatagattcgactttttgttctggggtttcgtcgagaattcgatttttgggtttctttcgaaacttggtcaaatgtcgaatacgcgttacaaagaacaaacctttctctttatttcgtttgtcttcgtcaacggctgaatcaaccaaatggtccctggaattaataaacctctaataataatggctttgcttttactctgatgacaagttcaaaaatggaacaaagatcactcctttgcttcctttatctgctcctactattcaatttcactctcagagtcgctggaaacgctgaaggttcttcctttttctgctactctcatgaaaagtcccttcctttttggtggttgttagatttcgaaagttcataactttttttgtttgtttgctggtttggattatgaatatgtgtacaggtgatgctttgactcagctgaaaaacagtttgtcatcaggtgaccctgcaaacaatgtactccaaagctgggatgctactcttgttactccatgtacttggtttcatgttacttgcaatcctgagaataaagttactcgtgtgtatgtttctctctctctgtcttcttttttgctctctgtgctggttttgtctgaatgaatggttcaataatccctttgggaatctactgtttgatgtttgcttagtgaccttgggaatgcaaaactatctggaaagttggttccagaacttggtcagcttttaaacttgcagtacttgtaagccatctcttcctcaatgtcgattaattctatagtgttcaagatggacttgaatttgttatgcatatcatatgcttcatcttacttgtttaatgactgtgacatagttgtgtttttgctttcaaaagagaattgtggataaacaatttttttctcagagtagaaaactatgtgtgtgcgctctcttgtggttgatgcatctgaaatatatatatatatgtcgatttatttttgatatcgttggtaatcaccaatcagtgccattttagatctctttagctaggcttctcgagccttgttactggaatcctttataatcatctttcagctagaaccatggcattatgaaagacattttattttttgaattctctatgtcaaatgttctcatttaactctattagataagtaactggagagtttggatctggtatttctctacaggtgatctcaactctacatatttgtgttgcggctgcaaaatgtttttttgaaaatattgcttacaaatatagtttccacgttcatgtatcttagctgtctacgattattatagttcttcatattaatgggtatcttgtttattacatacttcattatgttttctgtagcctgaatttctggtaaaataattttagagattttccaatcgacaataattaagcaaagcttaatgacaggtttgcttaatgacagggagctttatagcaataacattacaggggagatacctgaggagcttggcgacttggtggaactagtaagcttggatctttacgcaaacagcataagcggtcccatcccttcgtctcttggcaaactaggaaaactccggttcttgtatgtaccataaactgcttcttctctttaccgctagctttcattgcttacagtttcaaagtttggttgtatttctttgctaaaaaactattgcgtctaacattcagaccttaatgaaggtcacggtcttgtgtaagtatttcagggagatggttgttataggcagccttgttttgctagtttgctaccccgcatttagtcaagtagaagaaatttgatttctttagtaaaagcttacccattgaatatatgatgaatttagttgtatgtcattatttcgtgcctgtaagatgatatttgataataacctgcctcaggtttggatagaacctgaggccatgtcctatcaaaaaagagacctgtgaatcttctataatcaaaaacttatgtgtacatgtgtatcatgaatttttcagaagtagttagagactcagtgtacaaattcaataaacaaattcagtcactgccctaaaagttctatgcagttggataagatcttacatcagctctaatttctgttattatttttgtagataaatcgtattttgctggatgttaagtgattttaaattcctttagtggttaatttcaatgtttgacattctactatatgtggttaggcgtcttaacaacaatagcttatcaggggaaattccaatgactttgacttctgtgcagctgcaagttctgtgagtgtaactttgtctctcctgattattctgtttaatattttttaatatattctagtgcaatcttgagctctgacaaatggtatcatcctgaaatgcagggatatctcaaacaatcggctcagtggagatattcctgttaatggttctttttcgctcttcactcctatcaggttttccttcgtgttcctagctttattcttgattagagttgtcagaatgaattaccaattgtttggaagttatctgcagttttgcgaataatagcttaacggatcttcccgaacctccgcctacttctacctctcctacgccaccaccaccttcaggttttcacttccattttcttcttagtgtttcttgtcggttattttacattcttcagtttccaacttccttctttattcttatctttaatgggtgaatgctgtatggcattctcacatttagcctaacgttatatctcccttctcatgcactcaattactttttgaaatcttatctacagtggtatgaccttagaccactatattcttttttatttatggctgcacattcgaatgtggaaagaaatttagtggatatgtatatgttttgactgtttcatggttctatatttggaacataattatattcgtatctatatatttcacatgtctttggtaggattggtaacctgctaatgaaaaaatctgacttcttactagagtttttatcattttacactgatcggtgttgaagatgataagtgtgacatagatttgaacctggcagcttgacttagtagaaacagaaattcatggacattgctgaaaaaggaaattatgaaacaagtgtgaacttgctaatttgctgaagtataaagggttaatggacactataagaaaaagagtgtttatagacaatttgtgggacacaaagatctatgtgacacttgtgaaactctttgatctggaaaatgtattagctcttttcacatttgctcaaacgttccacttggttgattaattaactattttcccatagaaactcttcactgcgaatgagttctgtattaataaactttgtgtgttatctcatactatcaggggggcaaatgactgcagcaatagcagggggagttgctgcaggtgcagcacttctatttgctgttccagccattgcgtttgcttggtggctcagaagaaaaccacaggaccacttttttgatgtacctggttagtcaactctcttcatctattttcccattgaagctactttggctgatttttatctgttttggtggaccaaactttgcagctgaagaagacccagaggttcatttaggacaactcaaaaggtttaccttgcgtgaactgttagttgctactgataactttagcaataaaaatgtattgggtagaggtggttttggtaaagtgtataaaggacgtttagccgatggcaatctagtggctgtcaaaaggctaaaagaagaacgtaccaagggtggggaactgcagtttcaaaccgaagttgagatgatcagtatggccgttcataggaacttgcttcggcttcgtggcttttgcatgactccaactgaaagattacttgtttatccctacatggctaatggaagtgttgcttcttgtttaagaggtaccacaactttgtcctatagtattgtttgactggtttttgattggtcagttgggaagtatcttatccttgattttctattttagagcgtcctgaaggcaatccagcacttgattggccaaaaagaaagcatattgctctgggatcagcaagggggcttgcgtatttacatgatcattgcgaccaaaaaatcattcaccgggatgttaaagctgctaatatattgttagatgaagagtttgaagctgttgttggagattttgggctcgcaaaattaatgaattataatgactcccatgtgacaactgctgtacgcggtacaattggccatatagcgcccgagtacctctcgacaggaaaatcttctgagaagactgatgtttttgggtacggggtcatgcttctcgagctcatcactggacaaaaggctttcgatcttgctcggcttgcaaatgatgatgatatcatgttactcgactgggtatgtttttaatagttcccgatcatatttttgagttcaaaactgttattttgcaataaagaagagtgtttcttttctgggtgtgattaggtgaaagaggttttgaaagagaagaagttggaaagccttgtggatgcagaactcgaaggaaagtacgtggaaacagaagtggagcagctgatacaaatggctctgctctgcactcaaagttctgcaatggaacgtccaaagatgtcagaagtagtgagaatgctggaaggagatggtttagctgagagatgggaagaatggcaaaaggaggagatgccaatacatgattttaactatcaagcctatcctcatgctggcactgactggctcatcccctattccaattcccttatcgaaaacgattacccctcgggtccaagataaccttttagaaagggtcttttcttgtgggttcttcaacaagtatatatatagattggtgaagttttaagatgcaaaaaaaacccatgcacttttgaatatcaactcctctataagtagttttgtgtctcttgacgaataaagaatatcattactccacttgagcataaagcaagatgtttaccaaccaataaagcttaacaatatttttccgtgaaattcgaattatgggttcgaacccaccaaaatcttcttgattaaatttattcttttgtttgaaaaagaaattgaaattaaattattgtatatatctagtataaatacgtaatttaacaaaaaaaaaaaaatacattatatcacctatattagtatttttgaggtacattttgtacttggatcaggtcaaatcatatctggaattgtgatcctgatattccatatttaataatccctttgttttactttagttgttgttttagcacttaattttgtttcatatataatatttgttgttttagattttcaatatagatgttcgataaaagtttcaatttatcctcactgttttaatgtcttaaccaatgaaaaagaattagaaaatatattgaacaagggtgaagtagaatatttaattattttcttaatttatgtgcaaaatcctgaaatgacaaataattcgaaacagagagagtaatatagatatttagggtctgttcggttgatcatctgacatttccattcatatgatccatctcaatattctatccaaatgctccatctgaatgatgttcgtttcaatttttggatattcatttggatggatcatctaaatgaatttttgtttgtttgcttaatttttataaatcttcatctccatctagatgagtttaataaccaaatgaccaaaatactcatacttttgtctaatcagttttttttaatcttaatcttagctatattaatctaattgttgctctaaaatatatttacatcaaaataattttcaaaattattaatttaacatatataaactgattttactattttggtgaaaaataagatcttccgatgttagcgggaaaaacattactttattgtttttgcaggaaaacatggtttggcgaaaaacacaattccgtaattttcctatcatctttgattgattattttggaagctattttgaatcatcaaataataaatagagttaagaaaaatctccattttttttgcatatattgtgattcaaaattttaaaatagacatatattttccaactagtaaaaaatgtgtcttccacgtcctatatcggctaaaatgtttagacaatgattcgtagtcatatatgaattcaaattggaatgagcaagaagtgtaacttaacaagcatccaaatttaaaagtttgtattcggtttttagtaagttgtttaattttagcggaaatttttaatttttaattttaaaaaagtcttacatattagaattaatatatttaaaatcaataaaaactctaatattatgaacatttgaacatatagaaaaaataacacgggacacaatatattgcgggccgaggtaattttgccttatgagtttaaatttacattaacaattttttaaaatatcattaatccgccacttcaatactggttaaattttcattttcttaatgttttaacactaccaatggtagacaaatcgaatcagcctaatttagataagattgtataaagaaaaattggctcgtggtataccgttactcaataacaattgtaaactataaaatatatttatgtcttataaaaataataaattttgaaaacttttctatagaatacataattattaaattttaaaagttattaattttaggaaaagagcatcgtctcgtggtgtaccacgggttaaattctagtactagtcaaaacaatttgaactcgagtagcggaaattctttttggattcatattattattttgaacctctaattcaaatttgttttgtttaaattcttttttttttcgttatgaaattgtcaaatttattgatatacataaaactgtttatgtacaaagatataaaagaatagatgggcaagttgaagtggatgggcaagttggggagtctcatgatattgaagtgaaatcactttattgtggatcatcttttctatgacctgaataaggtgatcaactagtcggaatatgtgcttatatcgtctgtcattttgtttacgccagacgtgaaaaattgttgcctggaacaccaaagtccaaaggaaccaagatgaagaaaagcttttacaatgaaatgagatgttgcaaagtcgtttacaagtctctctaatttgttattagaaaaaattagctaaatatatatatatatgaatgggaaaaatgtcgaaaaaatcatgaactttcaaattttggacgagaaaagcatgaactttcaaaatgccataaaaatcctaaactttgttttgacattttgaaaactgaccaactttcgttgaccaggccgtttcggacatgacgttaattttccgttaacggaacaataacagagttaagtttctgttaacagtcttcgtagaacgaaacgacgtcgttttgaattcactaaaaaaaataattgtttgattccctaaagtacttaattttttttcttagtgaatttaaaacaacgtcgtttggttcaacggaaactattaacggaaagtcaattctgttatcgttccattaacggaaaattaacgttatgcctgaagcggcctggtcaacgaaatttggtcatttttcaaaaagtcaaagcaaagtttagaatttttatggcattttgaaagttcatgtttttttatcccaaattttgaaagttcaagcttttttcgacatttttcccatatattaatattacgaaagttcctttaaaaaaaaataacattgctctctgtttaatattactaaccaaagccattagaaatattccaaagaccaaactaattcagttcattattaagaataaacagtcaaattacataagatccatttatttttctagcgtgttaaagattttatatacatgttatgttagaaccattacttgatcaaaccaagaaattctttacttgaccaaaattgcgagttatggatcttatatatagtgctaataattaaccaaccgttacttgatcaaaaccaagaaactcggttctctgaatctctatagcttcgaagtacgcattaaccaacttcttcattatccattgaaatttggcttgatgttttgattaatctgactctaaatctttgaatttctatagatccgaagtacgctttaaacttgactctgaatctctatagctttgaagtggtggagaaaaacaaaaagtaatattttctttttatttaggtctcttgattttgtttctgggtttttgattctgttatatgctttagatatatgagtttggtgttgatcgcttctcatttttgattatgcaaattcgtaaattcctcccgttgttgctaaattttaaatttatctgggttttgatttagaactatgtgtttggtgatgacttgcaaatgaagttgtagagatatattaatgtatagttattgctaaatttggagttttttaaaattgacgtcatatttgtttttcaattttgttaatttgatttatgcgttaacattcaaagtagtggatctgattgttcatagagtagaagactataaaaatcttaccagtttaacaaagagttacttcgctgccttaaccgatcgcatgttgcttttgttatttcattttttgagtcctttgaaaatattggaagtgtaagcagtaaaagttaaataacattttaagtatcaatttcagttattgttagtgtgtatatcgtattgttttcttatgcaggaggtttacataccactgcccaaagaattagaccatatgtctgtttaagtttaccagcttcttagatgttttggtatgataaatggtcttcatttttgggaagcacaagatctcaaggggaaataacgaggagtggaaagttacattaaaatgatatggatttctaatttatatctcactcattgagataaaagagtttcattgtacgcccgaaaaacctaagttgaagttcaagcttattattattgttgatcagattttgtacaaaagttacgttaaagccagcagggatcattgtagaatggatctatgatttatcttgttgtagatttgaacaaatttatggcgatttgaattatttttttcaattaccgttttaatttctattttttttatatataaaaatattgattagttagtttttaggcaaaaatattagtaacaaagattttccttaccattccaatctgtaatggctttgattaagttgtaaattaaaaatttgaagtagattttctatttttttgaaagattttatctattatattgtatatataaaatttgtttaatgattggtttatttatcttgctatatttgttctatttataattcagttagagatcaaatagtgatttgatacctttttaattttctgaatttttgataaatatagatttgttagttttaggcaatatttaataaaacggtttgattacgttttttgataaatatatctttattgttttttattacgttgaatcagatttttatttttgttgtaagatatcgtcaatgattttatcagaaaaggtagttttaagattgatttaatggtcttgctctatttgttatattttataattcggttagagataaaataatgatttgatttgtcctctttataattgtccatgatgacttatttcagattcatagttagcacaaaactttgaacttttttgcctatataagaacaaatcaaacaagaacaccatctatatttgctagataaaaataaaaaaccaacagtggcgacttgaacatcagagacaaaagaacgacctcgatttaatcaaattgtgggtaaaataactttcaaaattgacccatttaaaacagatggtcatgatataaaaacgggaaaaatgtcgtttaatcccccaactttccaaaaatggccaatcaatacgtcaattttgtaggaggccatttaaaacatcaacttacaattgactaacatttaaaacacgaactttgcgttgactaggcctaataagaccgacgttaaatcgattaacagatccattagacgacgttaagaactgttatcatctctctgttagtgaagaaacgacgacgttttaaagcttaatagataacccgattgtttgtcgaaaatccccaaatcaaatacttcaaatccctaattccctaattctcttcttcttctctaaattctccatcaaaagctgaagaaatgagttgcaaatctgggaattctaactaatggcatccacgaacacactttcaagatcgttggagataaattagggtttgtttttgatttggggatgaattcgatttgaggatttcttctcgacaaatccctaattgggttatcaattacgcctaaaacgtcgtcgtttcttcacaaacagagagatgataacggttcttaacctcgtctaatggatctgttaattgatttaacgtcgtgttttattaggcctagtcaacgcaaagttcatgttttaaatgttagtcaactgtaagttgatgttttaaatggcctcctacgaagttgacgtattgattggccattttttgaaagttgggggattaaacaacatttttcccatttaaaaactggccaaaaaccaatgactaagattttatttgatcatcgggtcaaaactcacaagtatcgggttaggcaaccccctcgttcttcaaataaaattatttaaatgaggtttgatatcctaaaacgtttataaatttgattataaaactttagcatttgcccatatgtttgcaaattcattaagacattaaattcaattgtaacaattatttgcaaatgaataatcaacgtaatccacatatttataattttatatgcaaaataatcaaatacaaaatattttaacaacttacattattattagtatattaaaaatataataatattgtctaccacataactataactattttaaaaaaaaatcttaaacaaacttaaaaacagatttttttttatccaacactgtattatgaaagattaaataaaattgtgtactacacaacaacaccaacaattatctaactaaaataaatatttaacaagaataaaataaaaatgtattttttctactacaataacatctagtaaaatataaattcacaatttcgaatctgaaaaaaacattaattattatctagtaaaataaattagtcttacagtcacaataaatcacttacctcacttttagaaaaatagaactttaaaagttgagataagtatctaatggcccagcctcggcccatttacccaattctggatccggatattatcagcatcactttcgtttttttgcaagtagcagagcattctccatgtttgagaaacccaaagttccaaattccaaaattggtcaaagctcgataacgtgtgtattgcttctcttagtcaatggtgatttcgattcattgactgggtttaaaaaccttgctagttctcaattctcatgactttgcttttagtcttagaagtggaaaatggaacatggatcatcccgtggctttatttggctgattctatttctcgattttgtttccagagtcaccggaaaaacacaaggtttctttcttcttcatttgaattttctcattcgggtttcaaaagagagacttttttttgtttgcaattttgtaaaggcaacaactttattcccttgatcccttgttgatgtaaaggcaacaactttgttttttttacagttgatgctctcattgctctaagaagcagtttatcatcaggtgaccatacaaacaatatactccaaagctggaatgccactcacgttactccatgttcatggtttcatgttacttgcaatactgaaaacagtgttactcgtctgtaagtttctttcactctctctctgctggttttataactgaatgattcaagccttttactgctcagtgacctggggagtgctaatctatctggagaactggtgccacagcttgctcagcttccaaatttgcagtacttgtatgcttcatcttattttctgattgctaattatgtatcttgtttgttacatattgcataatgttttctgtaacatggatttttgctagtttaagatatttcctattgacgaattctctctaatcagaaatataattaagcaaatcttaatgacagggaactttttaacaataatattactggggagatacctgaggagcttggcgacttgatggaactagtaagcttggacctttttgcaaacaacataagcggtcccatcccttcctctcttggcaaactaggaaaactccgcttcttgtatgtactctctccttcttctattaaccccttcaatacgcagctttattgtttacagtttcgaagtttggttgtatttttctttgctataaaactattgcgtctaacattcaagaccgtgtcacaatctaatgtacttatttccggggagagggttgtttagggtagcagtgttttctggtaaattatttcatctagtaaaagaattctgaattctttagtaaaatattacccttggaatatattacatcacctataaagaattcacactccttggccttgtgagcacagtcctctgtcaaattgtgatccttaggggaaggcttgaagctattgagttaatgaatttagttgtatgtcattagttcgtttctgtaaggagacatttgatgataaccttccttaggtttcgatagaatccaagaccgggtcctatcgaaagagagaccgtcgaatcttctaaccaaaaacttcagtgtacatgtgtagagtgaatgtttcagaagtagttagaggctaagtgtacaaattctttaaacaaattcagtcattgccctacaagttctatgcagttggataacattatttttatagatcaaacgtgttgtttgtcatttgaactctttagtggttaatgttgttgacatgggatcctgctgtaatgtatttggttaggcgtctttataacaacagcttatctggagaaattccaaggtctttgactgctctgccgctggatgttctgtgagtataacttttattctcctgaattatatatggtgcaatcttgagttatgacaaaaatgttatcatcctgaaatgcagtgatatctcaaacaatcggctcagtggagatattcctgttaatggttccttttcgcagttcacttctatgaggttttccttcttattcttagtttcattcgtgatggagtggtcagaataaattacttattgcctgaaagttatctgcagttttgccaataataaattaaggccgcgacctgcatctccttcaccatcaccttcaggttttcattttatttgatgtatatcttgtcgagtttcgttccacatttttttatttaatggttgggtgcttgtaaagtatggcattttcacattaaggtttgtcatgtctctgctaagattgataaactgcttattaaaaaaaaaggcaacattttgatatcattttccattggttggtgttgaataagacaagtgagacattcagttgaactcgccagtctgctgaagcagaacaatgatgaactctctagtttggtaaagtaacaagggttaattgacactgtaagaaaagaaagtgtttacggaaattatgtgggtagcatgggacatgaagatatatttgacacttttgaaggtctttgatctgaaaaatgtattagctctttcacttttggtcaaacattccacttggttgatgcatcagtaatttttcccttgaaaacttttcaatatatcacacaagtgtgaataatttctgtgctaagaagctttgtgtttatctcaggaacgtctgcagcaatagtagtgggagttgctgcgggtgcagcacttctatttgcgcttgcttggtggctgagaagaaaactgcagggtcactttcttgatgtacctggttagtcaactctcttcatttattttcccattgaagcttcttcggctgattttaatctcgttttggtgaaccaaattttgcagctgaagaagacccagaggtttatttaggacaatttaaaaggttctccttgcgtgaactgctagttgctacagagaaatttagcaaaagaaatgtattgggcaaaggacgttttggtatattgtataaaggacgtttagctgatgacactctagtggctgtgaaacggctaaatgaagaacgtaccaagggtggggaactgcagtttcaaaccgaagttgagatgatcagtatggccgttcataggaacttgcttcggcttcgtggcttttgcatgactccaactgaaagattacttgtttatccctacatggctaatggaagtgttgcttcttgtttaagaggtaccacattctttgtcctaaaggttatttgtcatatatttttgttttgttttgactggtttgtgattggtcagttggtaagtatcttatctttgattttctattatagagcgtcctgaaggcaatccagcccttgactggccaaaaagaaagcatattgctctgggatcagcaagggggctcgcatatttacacgatcattgcgaccaaaagatcattcacctggatgtgaaagctgcaaatatactgttagatgaagagtttgaagctgttgttggagattttgggctagcaaaattaatgaattataacgactcccatgtgacaactgctgtacggggtacgattggccatatagcgcccgagtacctctcgacaggaaaatcttctgagaagactgatgtttttgggtacggggtcatgcttctcgagctcatcactggacaaaaggctttcgatcttgctcggcttgcaaatgatgatgatatcatgttactcgactgggtatgtttttaatagttcccgatcatatttttgagttcaaaactgttattttgcaataaagaggagtgtttcttttctgggtgtgattaggtgaaagaggttttgaaagagaagaagttggaaagccttgtggatgcagaactcgaaggaaagtacgtggaaacagaagtggagcagctgatacaaatggctctgctctgcactcaaagttctgcaatggaacgtccaaagatgtcagaagtagtgagaatgctggaaggagatggtttagctgagagatgggaagaatggcaaaaggaggagatgccaatacatgattttaactatcaagcctatcctcatgctggcactgactggctcatcccctattccaattcccttatcgaaaacgattacccctcggggccaagataaccttttagaaagggtcatttcttgtgggttcttcaacaagtatatatataggtagtgaagttgtaagaagcaaaaccccacattcacctttgaatatcactactctataatactaatcatatctactatactttctctccacttccattaagcaataaaaactattcttaaatctttgtatgcatctttgtagaatatagaaattcatataaacataaatagtaatgttgctttataacccctaatttaaaaatgatgatcttgactacccacaccaccaatacattgtaggaatcatcatgataggagcttttgcttatggaagagaatgaggataaaatgtaatggcaagtatgttataccataaagaatctatcatatccatttaaagttaggcggctttttgtagaattctataatttatgttcataatggcgtcatgcttgcttttggtactcccaaaaataaatcttgatcgaacccatatttgcctaagaaatacaatgtgctcacatacaaacttcatatagatttgatgtatttttatcttgaacaaactacaaagcatatagttgtctggctagttaaaagctagtaatgagaataataatttagttatgtatttggagttttgtttggttatagctgtttaaaccattgattgtattaatattttcgcataaattaatttctgttattttacttaaaattatcttgaaatttaaagattactcaaacatgataatttataaaacgtagacatataacaaattatcaacaattatttagttcttatttttgtatttaatttataacacatattattatttgatctatggaggatgtagaactttttctttcaaaattctaattaacatgtaaactttaaaaactattccttgttccgtatagaattttaggctttgtgttttttttttccgaaactttaactttttaatggaacttacattgatcaattgattaatttatactagcaccaaaaaattgataaagaagaaactaataatagatttgaaatcacgagtgctaacctcaatcttaatcgaagatgatgatggtgatgtatagttatttgatttgtaagcttgaaaaattatggaaactatttgtgtgttcaaattaaaagattgaaataattaaaatacttatcttgaataattcttatgcctaattttttttctcaaaactattttgaatgatattttgacttatcaaaaaatcaacaaatttatgaatgataatgaaatgacatctaactcttattaaaattattattagtgaaatggatcttaaaagaaagatagaaaattgataataattaatttatcaaaaacgttttgaaaaaaaagtatatgtgatttgtagagagtttttaattatgtttggagaagaaaaagaaatttttttaataatatttgtttgaaagcctcatttacctgactttcaaaaaagaagggaaagaaagaaaaaaaaaaggctttaaaaacttcaaaaaagaagtgataaaaatctgatgggaaattgcagtgtataaccatcaaaaactttataattcaacaagtaaccattgagaaaagaaaaacagtgatatttggcatattttatataatatatacacaattctgtatttctcatgactactctgactgcttcatttcttttatctcgattgggtttccaaatcagctaaataacgtgaatgtattatactattgtcgttgtggaattagccatgtaatcaatagaactttatttgatttggaatttttataaacaaatttaacactaaacaaatatttaactaagattatcacaaactatatatactgtttaagttaatactatactattattttgaataattactaattactagattgcatgtttctttttcattgttatgagtgaatattcgatttgattatagaaaattaaaagttatgtcaaaaatatttaattatattttaattatccataaacaagtttacaaaataatttccttgtatttttatgatatatagtccttttttctacatacatttaacttgatattttaaatcttatttattgtatcgtttaaaataaaatgttacatatttaacatgcgtttaatttatcttttgggttccctatatagtatcttagggtatagttttttaaaaaaattgaacacatctatttctcaaaaatttgacatatttattcttttcaatataaatagttaaaacataaattcttgattttgaattaattcatgcttgaaaaatgtttttagcgaaattttttacaactaaaattaatagtcattatcaattatctccactattttattttgtgtgttttatataaatggaatgtgtatgacttacaaccattttttcatattggaagatatttatagctatttttaaaaagctaaccacgaatccactatacattgagatgaaaaaaaaaaaaatcacctacgtggctcctagtttctctcctcgcagcttttcacatccaaaaagagtattttcgtcataatgaagactaaatggttactcgcttcatttctcactttaacatgctatattcttaatttcttttgttgttttggttatacacctaattcaccgaaatctgattggcaaaaaaaaaaaaaaatgcgaaggctttagaatccatttgaagccttgaaaatctcttgctaatcacccccattatctatacaattgtttcccaattttttttaaaacctccttattttgattaaatataagtatatgaaactataatacacattattacatagtatcaatatatacttttgttatcgtccatacgaattgaaactatacacctcctaaatcgaaatcacaactttttttttctttttcaaaacatgtaaaatactaggatttaacccaccacggggtaaatgttttatttatatatataataatattaaaatttatggtttttaatttagtattaaagttatatattttatattaacgttgtaacttcaaaaaattagtgatgataaaataataatccagacccgttctactatatttcatatcaattcaaacttgtcccgctatatttcatatcaatccaaactcgtcccgctatatttctcgtctcatgatattttaatttttttaataagtttaaacattaatattgttttataaagttcaaatatatgaacaatatttaaaaataataactgtttttgactttaatgtgatgacattctttgtaaattcttaatttactaacacttcaaaatttttaatatatataattttattttttgtaaaaattattatatataaatacttagtttactcataatttgggattgatatacttgtgtttttaactaaatttttagttattttaataacctaaatttgggccttttgttaacattatttgagtcagcaatatcagcttaatacatgtacaatttatttttgccaaaaagaacaaaatttaataaaaatcagaattgaaagttttacgaagtgataattattttgtacaattgcaaatttaaaatagaaaatgtggattgagaaataattagatgttaaatgttaattgtttcaaaaaatttaaatgttacgttattaattttcttaatgaaaatattgaagcatatattgtaatataagatttgattcattttattaactgaaaataaatgatttaaaacgacaaatcatggtgatgaatactaattgatccccttaaaagaaatgttaatgtgtagtatattgtagtttagatttgggaagacttaaatgatttttgtgactttttattttagtttcctaaaatttagtaacataatcgatttttatatttagatttaaaaataagtttgttaaaacattaaatgtcagcggcatgacattgtatataagtttcaagtagaggatttatttgctaaaatgactgcaaaaatgtatatgtagatatcgcattgcggtactttcaaaatacaaaccggcgctcaaaaataaaagggagatttgcaaaactacccttttttttactaccattttgcaataatatccttttatgttgttcatttttcaaaatacccctttctttgaacaaaatgaccaaattaccctcatctaataagaacatataattggaaactgaaatttttccgccaaaagttttccgcaaaatttatttttctcgtaaaaacaaaaaaattcccgccaaaacaaaaaatttccgccaaaattttttctcgtaaatagccaaaaaaatgcttttaaaaatccttgtaaattttttaaaagctctttaaaaaaaccttgtaaagtattttaaaagctttgctagttgttaaaaacccttgtaaatcattttaaaacctcttaaaatctttataaagtctttaaaaacatatgtaaatactttaaaacccctttttaaacctttgtaaatcatttaaaaaccttttacaatagttttacaagatttacaatcgtttttttaagtataagtaagtggcattaaatgatttacaagagattttaaaaggttataaaagagtaaaacatgatttacaatcgttttaaaagcataagtaagtgacataaaatcatttacaagagattttaaaagtgtttgcatggtttacaatcgtttttaaagcataagtaagtggcattgaatgatttacaagggattttaaaagattttaaaagaggttaacatgatttacagtcgtttttaaagcataagtaagtgtcaaagaatgatttacaaggaattttaaaaagggtttgcatggtttacaatcgtttttaaaagataagtaagtggtatagaatgatttacaaggattttaaaagcttataaaagggtaaaacatgatttacaagagttttttatgagttttaaaaggatttaaaaccttttaaatctcttataaagtctttacaagcattttttaactcttaaaaaaaacttgtaagtatttaaaacatttataacttttttgaaccattttaaaactcttgtgaacctttaccaaaggttttaaaagaatttacaaaagtttttaaaaggttttcttataaattattttaaatttttttaaaaatccttgtacatctattaaaaccctttaaaatgtcttttaaatcttttaaaaccgttttaaaatcccttgtaaatcttttaaagcacttttaaaccctttaaaaatccttaaaaactcttgtaagtcttttaaatccctttaaaatcccttataaatcttttaaaacccttttaaaatcccttttaaaatctcttgtaaatcttttaaaatcccttttaaaatcccttgtaaacttttaaaacccttttgaactcccttgtaaatctattttccgcaaaaaaaaaaaatttacgggaaaaatgttttttcatttaattttggcgggaaacttttggcggaaagttttttggcgggaaacttttggcgggaaattaattttggaatattttagacaaaaaaatattaatttatcattttgttaacctaaatcaatttacaaataggggtaaaatggtcattaaaaatttaaaaagggtataaatgaaaatgacaaatcgaaaatggtagaattaaaaaagggtagtgtggaaaaggcattttcagcaattattcaaaataaaacacacatacaattacctatcacataagtttttttactttcttccgcactgtaccgtgaatccgataatagtattttacattttctttgttcatttttaccaatttattttttttttttataaaaaaaatcaataatacgttacatgcaatgcatggacgcaaaatcatattagtaaaaattagttgaaaaatgcagttttgtgtaatcttccttttaatctaatgatttgtcttgtttgcgttgttgatttaatgtataattctttactattttaataccaactagattcaaattaacgatgctatatatgccagtttttcttatttttgctatataatgaggtgtcaagggttttttccatcttttatacagtccttcagttttataaatacctaaaacaaacctcaactaatttttatttggacgtttaatacccaattgtttttggttggaagaaaaatatacgaagtaataaaattgtgcaatttaatatccaaacaataaaatgttgttatttcatactgaagatacaacaaaaataaaattccaattttaccgttaccattttaattagagaatattacattgtgagacactttaaaaaaagttatttgtcgatttagacacttttaaggtaggaggcacttttcttagacaaaattcccgatttgccctttaactatatctctcctacatttacgctaacaattcttcttattacgattctctctctttctcgatacaattcatctctctctctccccccccccctccaattcaatccatctcccccaattcaatccatcggttcacggcaatttcacaacaacaaaacaaaaacatttttcttttctccttcctcactccaaaaacaaaatttcacaatcaatcaattgttgtgaaccaagcttctcgctcaaattgattgttcatatcttctttcttatggcgacatgagttagaaagttatcgaccgtttgatcaacatcaccggcgcttctgacgtcgtcgtcgttcataaactcaaggtgatttgagtttactcatctccattcatgtttatttttgtcttgcttcgtgattcttcgtgtttatgccatagtctggttttgatgttattggaagtttctagaatcggtatagtggaaagtttgatgtgacgagatgcaggaagtttcgatgttgcggaaatttgaaaaattgttgtgagattatggatttgattgattgtggaattgaaattgtttggaattgaagctataaactaagcttaactcttatgatgaaattggatgttaaagttgctcaattggattgatttgaacgatttattcagactttgattttgctagtggagagtattagcgtcaatttacacatatatagtatttgattgagacacatttatctctttaggtttgatatggaggagtgaagtgcatcccttgatttttgtgtggttatttctcctataaaactaaagattaatggtttggtttactaaaagcttccaagtgtttggagatcttgttcataattctgtgataatgtttgataacttctctgccccgtttgtttgaaattcagtacttgatgttctctattggactacaacatttggacaatccgtaatggacaatcacgcattttgtttgcagcgtatgtgtctataaacaagtgatcaacccacataatgatgagagtgtctataaacaagtgaactagtggtcaacaaaagatggacgctactcgtgaaattggtgatattcattgatgtatgaacttttgtgtgttggtatgatttgttttgaccaagttgtgattcttccatcaccaatgatactcttattcattcaaattataattgatgaaagctctaaacatgaatcatttgtgttcaagtgtttgtcatgtttcaccattactccatatggtcaagtttaagtggataagttatcatggacacaaactatcattatctacttggatttagtttgttgatgtttgaaagtaatgtctacagattgttcttgtgttttggagacctatatgattattagtttttacataatgaaatcgtgttggaagttttgataataacatgtccacttagacgtgactatgtggaaataattgattctcatatgcaaagtaaaatactcttaacttagaagttcaacgatattatcaatttatcgaaccaaaatcatatgataccaaacaagctgatcaaatggatataaaattcaatactggaattggccaatttggtttatctacaacctggtggttcatggaatcgaaaaataaattatttaagagcaaaaacagaaaacaatggaaaaaacgaagaggatgtgaatatgtgttgatattaccatggcagttctttaaatccaacagatcctctcttataaaaatcagattcatattctgaagttggttatctgaaaaattctccttaatcaaagcagacacggagaaatcgggagatctgattaactggaaaaataaagttgaatctgattgttcaatcaatctctctttttctagaaagctgatgatttattgaagaaggaagaaagaaagaagctgatgatttcttctttgcaaacgttcaaacagcttttttctttttttaatggcgtaaaaaaatgtaaattttgaagtttttttttcttgattttttctttttgataaagcgagagaaagagagagaatggatacgaaaaatagagagacaaaatctcaagggtaattttgtctattttctcagcaaaaacaagataaagtgcctaaactttgaaaagtgtctaaaacggaaaaacatttcttaaaagtgcctcatagtgtcacattcccttttaattaactattaattttaagattttacgacattaattttataattttgtaatttttaaaattaatgtcatataatctaaaaattaatagttaattgagatggtaaggataaaattgtaattttatttttgttgtgagatcgtgagtatgaaaataataacatttaattgtttgcgtataaaattgcacagttttattacttcatgtctttttcttctaagcaaaaacaattgggtattaaatgtccaaataaaaattaattgaggttttttttggtttttttcgttcttctttagttgatgttttataaaaatgcacacctattaagaaataatataattatataattaattttgcattgaaaattaaaaatatcatgtatttaaaaacaaaaataaaagcttaaaacatcatttataagagaacggaaggagtattaagtgtaatcttttgcattttgttttaaaataagtgtcattttgtcatttcaatgtatatgtttgataataagattttcagttttattcatattatattaatgtataaaccaatagaaaatatataatatattaataaaaagtaacatagataattgaatttttttaaatatatgtgtaacaatcttaaaacacatttctaatgaaacaacatttgcagataaattgttttttatcaaccacatgttgttcaaatcgagtaagataaaagtaaagttacatcaatcttcattatcttggttgactttaaaatattttccaaaaaagatataaacttgtctggcgtatttttacttttggattattttatttctctcagttgtttcatatatggacggagtatataggatttcgcacgtcggtttgtaacttttcacaatgataattattcgcatttagttatcatcatactccatgaaaatgccttgttactccatttacgtatttaaattttattgttccttgtcttgtccaactcctaaataatttctgtcaagaagaatttttttatatatttttgtcataaaaaagagaagagttgtctaatattatatagtaacaagtttagagttttcgtgttcgttgaggacttttcgtttccacattgtcaaatactataataagttagaattgttcttttttatttcttcttctttttattgattttcttgacaaatgggtggatgacaataaggagtgttgagtttttctatttggtagtcgtaagccaataaaaactatataacagtctatatcacttgaattctgactgattaaattcttttaaaacgaattattctctttggaaatatttctccaaaacttattttaatattataccttgactatttgattattcttcccttttattattgacttttctcctgagaagaacaaaaccttgtctgattcggtttgtcaaggtgtaatatatatttttttttttttatcaattctcatatatataatgatgttgagatgtattagtcaagaattttctatactttttaagcaaaatcatgaaggtttctatgaggcttctgagtcatttcttgagcatgttcatatgtgacgtccctgtagccctcatagattaagaccacaaaacttggtctacacaagttttaacaaaagaaatagcatcaaaaactttgtctggtaaacttagatactttgaattctgtcataactatggtctatggtataagttatgagtggtgaataaggttcctcataacttggttaaagaacatttcttaattaggacttgtcgaaaaagttgtaatacttcatacttgtagtaatatacgtactagtgatgacatgctataaaagtcatattggtttaagaatgataacataaccatttgtatcattagttgtctaattttacaagagccatttgtcacataaatatataaggttacgtgtggaatcaaaaactaggtagctaacaagtctttaatacctatatgtatcgttaattcaactgctgtgtgtaggtttgattctgatcatgcgctcgtgtgcatgaaagtaccacacatgcatggaagtcaacgtacaagttgataatatccactaggtccgatctaaaaattatgtcacttcaactctgtggcacggcattgaagtcatcagccaccatgcatcatctattacgaaaccgatttctttggaatctgaatctgaatgttagtcctagtcccactaaaggttgcttcgtcgtaaaagttaaagttttttttttcaagttttttctttctttctattctataatttccaaaagatcagattacatcaaattcagaaatagaaggatagtttaagttcatttcaatgaaagttgttgtagcgtcactatttttttaaaatatccgtttttaacaaatttagctaaatgacatttactataatgtttgttttgtctattatacataattaagaatcttttaaatggaacgcaaggagtattaaatattgggtttctgaccaaaagaaaggatggcattgattactagagatttcaaattctttcaaatgatatctaagtacgtacaaataatatctaagtacgtacaaataataatgtatttttaaaaataatatgctcatatattggtccaacatttaatggacaataagaagacatggtgtgaatatatctgactcactagccgtgcatggattggctgcttcagaaatttctgcactctatccacttgaaggtgacatatatatacacattttaatagtggttattggtacttacttggagtataaatatacgcacatatcagatcagattgtatcattattgtctacatatctttttgaagccgtcataacttgcaagtaaagaatggtcagtctaatgttctttagttcggcctcacctttatgctcttctccatcaaaaattcccaaggctaggtacttgtttacaattataatgcaagacatggattcaaatattttacgctattaagaagtctttctcttataatcggcttcttgatacacttaacttcactctttcttctacagtttggacttcgagatgaagaaacttggtaaatttttctcatcttgactctcaaaactatgaacagaatatagttttatagttggttatcataagtctcttgtcctaattatgcttgcttcctcaggtggcagcacaaaacttgttcggaacgtgaatttggagaaactaaagaacaattatttgtttcctgaagtaagttcataacctgatctcatctttattgctttatatatatatattccattatttggttttaattgacagtttgttttcgtgtaaatagatcaacagacgtgaacttgagcacattgaaaagcatccaaatgtacaattgataagccttgggactggtgatacaacagagcctattccagagcaaataacctcacatatgtctaacgtatgaatcttttttttttttttagttctttaaatatttttgcgttaaaccctagctaaaacatatggatcggaatctataagaaaataccagattttctacaacaaatatcgtaaaaaaatgataggaaacagtacgatatttggtcatagcaaatgcatcgtaaaaaatcaaaattagtaggaatttcgtaggaaattttgtggtctataatttcttactaaagggtctaaaatgttgtttttgtcccggatagagtatttcttcttctctaaaactcgtggaaaaatctaaatctgaaaagtatttgtgtgattcaactaatgccttgaatatctttgagatttttctgcatgatagaaaattttgtgagtgatcgtattgccctagttgcatagtaatatcagtgatttactcccccaaatcagaccagccgccggtcagtaaccagtctggtctgagttttatcctaaaccacaagacccacttaaacatagtcaaactctgtttgaaatcagaaatcgaccgttttggattagttatacatagtccgactttcttacatcaatacttaaaactggtcaactcataaaaatcgtcttcgtgactggactatctcaaaagtcagaagtcgttctctttcttgtttttttttttgaaattttcgatattgtcatcgtttttgttttcatgcaaattaattatttttttgaaaatttattttatggtcgtcgacgcatgtgtcgaccttctttttttgtctctagctaacagctcggttggtcgtttgtgtatgagcatctgttacgtatgttataattggatgatatgaaagcttctcgagtattttctttttcggtggataaccaaaaaaatcatgttaatcctttgtcaatttgtatactatggttcattatgtatatatattattattttagtaagtaatatctctagttcaattatagtttttataattgctctggtgcatcaagggaagacatgtgtttctttctcatatatctatgtttttgttattgtccattgtgtctttatagtgcatgtttatctgactttcatatactttggttgtgttaactactttgattaatgtatagtgcttttccggtattttcttatatatgtgaaggtagtgaatttttcttttagaatgaaactatcacttggtaattaagttactaattaaacaaggaaaaaatatgtcaaagagaattttctaaatttttttttggaagacaagaaataatccttagtagtcattaattagtaacatgtgtcttgaactttgattattcagttcgcacatggcctatcgaccgtagaaggatatagagggtatgggttggaacaaggaaataaggtaattatggtcctcttttcattttgctttgacaaaagttgtttcagtttaatttatttttattcatccgacctaaaccctaaactctaaattcatttttttttttagatttcacatctcatctatatgtttataaaccttaagaaggatttaaagtcttagtgagttaattcctttgtactaacatctatttttcctttcttagaccctgcgaaaagctattgctgaaacgttttatagagatttgcacgtaaaaagcaatgaagtttttgtatcagatggtgcacaaagtgatatttctcgtcttcaggtatgcatatagagatttgcgtgtaaaaatcaagtatttgtattgttgttatgctgattcgagtgtcaaatctttcagctactcttaggctccaacgtcacaattgctgtgcaagatcctaccttcccggtaatgttttatgtttacgtcctcactgtttgatgagaagttggttttttattttcttcttcttatgttgctttttgttgtgaatttaggcttacatagattcaagtgtgataatcggtcagactggtcatttccatgaaaaaaccaagaagtaccaaaatgttgtttacatgccatgtgggcctaacaatagtttcttccctgatctggctatgaccccaaggaccgatgtcatcttcttttgttctcctaataaccctactggttatgttgcatccagaaaacaactacatcaactagttgattttgcaaagaccaatgggtccattattatatttgactccgcatatgctgcttttatcgaagatggtagtccacgttctatatatgaaattcctggtgctagagaggtgatagtagtttacatattcatacatattccttgtggttcttttgcattcactaatcatattacttctttgctaggtcgcgattgaagtttcatcattctctaagtttgcgggtttcaccggtgttcggcttggttggtctatcatccctgatgagctcttgtactctaatggttttcccattatcaacgatttccatcgtattgtgaccacttccttcaacggagcttcaaatattgctcaggctggtggattggcatgcctttcttctggtggccttaaggtaacaataatttataccgtttgattacagtatgataaatatcccacattggttagaaatggtactaactaattccttataaagttacatgtgtactttcactaataagccagtttttgggtgtgttctacatatggattttattgggcttggttaaaactctagtatggaatatgttcttatcacatttcacttggcttaatacatgacaggagatacggtcggtgaacaactactacaaagagaacaggaagatactgatggacactctagtctcgcttggcctcaaggtttatggtggtgtaaatgctccatacttgtgggttcactttaagggatcaaaatcgtgggacgtttttaatgagattcttgaaaacactcatataataacagtaccaggctcaggttttggacccggtggagaagagtatttgaggattagtgggtttggacgcagagatcacattgttgaagcatcaaagaggttgcagaatttctttaacacacgaaccaaacattttacttatctctcttccacttctaataccaattaggataaatacatctcgtgttatgtgcatcgtcttgaataatttcttccacctcttgtaccataatgtatattattgaaataataaaagctacgagaccatggaccatggtagtgtttttcataatcgtaatagttttgtgttcgaaaagtgaaggagattttaatttataaatattatatttagtcattcataaatcgcatcacgttctggtgaagagaagaattatatatagggttgttcagctttgagacaaaactaggtaattgtttagcaaagagacaatagggttctttgttgagggcaagggacaaataaacattacaaatgggtctaaaattcaaaatagttacaaacaaaccacagtttctcttttgtctatgcgcgtgggatacattcagttgacttcttggataaaaaaatgaatgagttgattttcaatagggttcaagagtgttaatttatttgtcaattttcagtaccatataatttattttgaaattaattgcataaaaacatctttacaaaagaaaagtaccatatgtattttatagttttccaattttttttttaaaataacattttaatatctgcatttaacacacttgagccactgcatatatgctgcataacgtggatcggatcacatgctaaacaacaattacctttacatttttggaccgtaaatggttcaaaaattattttttataattatttaaactatgaaacgcacataagattttaattattgtgaatagttaacttaaatgcgtagtttccaccaccccatatgaaccacccttctcctgtctcttcattcaagtccatgtgtgtcgagctaatatacaaggtagtgtgagtacgcactataagaaaacacgcaatttgcgagggaaaaatttctagggaattccttgcaaaacgtcaattgcaagaaatttgcaacacataagacttcctcccaaattgcgcctcacaaaaagaaaaacattacaattccctcgcaaaacttgcaagggataatccgcctcataaattgcaggggttttgcgaggaaaacaaaattatcgcaaacagcacgcaaatcttgcacgcaaatcttgtattttcttgtagtgactataacttaattaggtcggataattgagtttgtatgaagcagtactcttgagtgttttcacctacatttgtttttcatttttttggtttaaaaacaagtaccaaagcgcccaccgtggggcacgaacacttacttttttgttttcttttaatttgacaactcgttgacaagataatcacatgtgtcgtcaactcgtaattcatacatgctttagagcccaagaactccttcaacattatgtttatttgtttatatttccaatagacattgagcatttggtttagtcttatatattcttgaaatgtttgaaagccacatagttagtttcaaatttataaacctcacacttgagtaagtttataagatagtttctaagtttgaagacttaagactgtttcaagacctttcagagcatgaatagctcgccatgtccaccgggcactgactagtacttttttgagcatgaccttaccacattatatcgcgtaatatgattattctttttgaagtaagaactcatttaacatgcggcctaatagttttaagttatttggactaacacaaagtcgagcctaccaacttcaaaatcatgtccaaaaatttaatgtaagcaataacgctaaacaattggtctaatctaaataagtggtgataataagaaattcttgtaaattaggagacaatatttaattcatacactttttttcttcattagcactagctaggtatccagtcacatatcaaggtcgaagttaggagccatcgcttgttatttctggtggtgagtgttgctctctagttgattccaaagatagatctcaacaatgaataggcactcctacgttagctatcatcaattcgtttacttaatgcaatttttttacaaatgtgagaatgtgtgagaatggattcaggttaactaaaaggagatttctcattaaaattgacacatgaaaggtaaatatgatcagtaacaccaaactcttcagctacatagcaaacaaaaataactcaacaagaagcaattaaattttaagactcaatagaaagaagaaatgagtgccatgaagatgacaaatgcaaaagatacagagagcaaggacgcatcggaactcctcggggacgaaactggagttgccgcatttgcaccactggacaacgcgggtgctcctgctccggccgtaggagataaacctgttaacatacccaaaatgctaaatcattaaacttctttatatatattatttgttaagacaaagcacaatcttgcataaagctttcaaaactacgtcgtttcgatttaacagagacttttaatggaaatttaactttgttaacggaaacttaacaacatgcccaaaaatgatcaaatcaacgaaacttgattatttcatccaaaagtcaaacaaaacttatgatttaaatgatatttcaaaaattcatgactttttcgtctcaaatttgaaagttcccgcatttgtttgacatttttcccaaaaaaaggtaatgcaattttttaaagggtaatattagtagataatcaaataaaacatacaaattaagaaactagcagagagaaagttttttgttacaaaataaccatggacccacgttgtcggaagaaaggaaataacaaagctacccttcatttgttgtaagatgaacagtaaacgaaacacatccgtgtaatttttcaaaatagcatgtaacattaaaaattttacatgttatatttagttttaaaacatgctatttcaaaaaacgttatgaatttttaagaaaaaacattattatgaaattcttttacatgaacagaatcttaaaaaaaaaaattatatgtgattttaataaaaaccatgtattactaaaaaataagaatttatttttaaagaaatcacgtgtgatcttaataaaaaacgtgtattactacaaaatatcatgataaaaagagatattaaactgaatagaatgttttttccaaaaaataccatgtgctttttataaatactatgtaataagagaaaataacaagataaaaagaggatattatgttatcgcatgtatttcgaaaaaataacatgttacaaaggacatttacgtaattacacgtgttctccaacatatttccgacaagatactgtgactcaaggttagtttgtacattcttttcaaatctatagtcatttattataaatactcttttttaaaagaaaaaattgtttctatgtatataaaaaatataaaaatttaattgaaatttatcagttaaaattttatgtttttaatagctagaataagattcaaacatatctttgaatagattgtatagccagattttatgccatttaaccaaacctaattgaaaaaccggaattcaacaatagttattgatttaattacatagacagaaaatataaatataaataatacttactatttaattataatttgttaatctaaaaccaaaccaaaaaggatcaaatcaaaattctcaaactaaacaataaaaaatctctacttaattcataaattcaccaaaatcgaaaaatctagtctcttgacttaagtatgaaataacacataccaggggcagtagcaggaggatctccagagacagaaactgcaacacaacaatttcaaaagctgattcaacaaagtgaacaaatatataaaaccaatatgaaatttctgataaagaaacttacggccacaacgagcagaaggaggagcagcaactttacaaacagaaggaagagaagcagctttagaaagatcaagagttaaaccaagagaaccactgttcttgaaagcctcacatagacattctggtcctgtcctaaccacagtcttaagccctgaacaacatgttccttccggcttgacaactgtactaccactagtcacaaacgacaaacaatcagccatgtttagtatcaacgatgagcagtccactgctgcatgagctctctcgccggacattagtgccaccaccgagaagatcatgagaatagttgcatatgccattgtgaatgatgagtctcttttggtgctctctagcatgctaaataaatggaattgcctttttcatatattattattgtttatttttttatatttttcgccgaaagagaagacatgaatcattactttctcagtgtgtaaaatgctttatggaataaattatatttgtctaaaatcggtcgttcttccagattggtagaatatttctatgaacaaaattatttatatttgagaataaactgaaatttcaaatttttgtcaagggaaaactgaaatgttaaactaacatctaatattaatgtgttaaatggtaagataacatcataagaatatacaaaataaacgtaaattaaaataaaataaaaacattaattacatattttgttgtatacaaacaaatattagatcccaataattttacataataatttatttcagtcgttttatcccgcacatagtgcggattcttatctagttagtattatttacgttattttgattgcatgtgataaattaatttttttgtagtataggttcatatttagtatatttaggttcattttcacatttttgtagtgtgtaggtctatattgtagtgtagagtttggtataagaagatacaaaaatggcaaaccataagtaaaagagagattgtggctagtttttttttgtttttttgattatgtctattggctagtttattaacaaatttttcatatctaacatagttttgtaacataagtgactttaaatcaaaaagtgtattgtcagaaaataaaaataaattgtatgtaacaatgaactgtaaacaacgagttgcaatgatgggcaagagtggagagagtgccattaaaatgaatgcaaagttggcaaaaggtgcaacgatctccttttacaatcctataaataaaacaattcatgcacttttctccctctccatcttttttctttatttgaaatttgaatgatgcacttacttttgagttttgacacattctttggtttcaaagtagaaaatatccaacaaaataataacttactctcctattttgaagtaccaaaaaattgtcaaagcttagattgataataatttgtgatggaggttctatatagggattattgttgattttgccactttgcatcaaattttttgaaggataatatcactgtatatgctcagaagactggataattagtctcatcaaaatgtactgttgccccaacactgttaactttatttttacgcatgtacccctatgttatagatttactagttgtagagtgtaggctatattattgcatgttgtaggagtagattttattgcgatattgttttcgggagttgtgttttttttttattaatattttcttctttccagttaacgaacagtcgtcttctttcgttcatatatgaagatgagagacggcgttttgaggcggaaggaaataactctcgaccccctaaaattcttgtgttatctggttcggttttcaagtgataacctctctcttagatctgggttttgctccataagactttttaggtaatcaaatttttgggtaattgacacaggtatcttctctatatttcttatccatactcatgctaccaggggtgtatctgaatgtgtggatttcaatattggcggccttcaaagtgaagtgaagaagttagtctcggctttaatccttattggcggttactagctaactgatgtgttactcaaatatttttacatttatgtttatgttctctaatcgaattatgtatcctcttattttttattgtgtttaactatgattatctccaaactctttcgttaatatctttgtatttgaatgtttacttatatatgagtcgttgtttattatcgcatatcatagttatctgattttctttgtggttaagtaggaagatattatcacgtatggaggataagagattatcaaatactaatgttagcagaacatattactaggtttgactgttgttgtaaatcataaatggacgagatgtgtcattgcccttcagatttttgaattacaattttatcttgttaacaatggtagcggatacaatcttatcgttgtgcggatggtttttttatgtaaaacaaggagacaacatgcagtgccgctaacatggagatgttagttttttgtttatctgctaaaagttatatcgactaacattttaaccatttaaaatcgtaggctattgtgttgaataattttttgaataattttttaaataatttaactacagttgtatcatgtttattttcatacaaatgttagcggatacaagcttatcttcatacaaatgttagtcgatataacttttagcagataaacaaaaaactatcgctataaccactttggcaaacccacctttctcacgcagtcggacacctaatgacccatcggtatgcaagatgtgttcaaaaaagccgttttcatcttttttcaattcccaggtaccagtctcaccacgaacaccattttcacctactggaccaatgtcagtaataccaaatttgttagcgttcttgttattcttagctatgaaaccctaaagtaaaaacactctcttcctaaaattaacaataatatctataatattcatgtaacgaccgtgaactggaaaatcaattaaggtttgtatttaaatcgtccggtttaatcggttgggttaattggaaaccctagagtgtgcctataaaagaaggaaactcgaaataagggctttagttagccacttttcgttttataaaggagaaaaagagaaagaaggagaagaaccagaatcgttaggttttaggaggaaacgtttttgacatatcaaatcgttgtcaaaagtaacgaactttggtaggcttttttcccaagtcttttatcgctattctccaatttacagaattggttttggattaaaattggttgagttattcacagtttagtgagacacgttttctcagacgcgaattaggaccagcgagaattgtaactacgatcgtagtctcatatggtttccgatcggcactagtttttgtgggaagctttgtgacgtctaaggctagcgtttcaccggagggatttagtagttaacggttggtttgtattttagggtttcgtctttgagactggttgtttctatttttcatgtccagtttgcttcaaggttgcttttggttttaacttgttgtaggacgtttctggactgtttcagacgcaaggagagtctctcctgggtttaattgttgttagaatcactttgttaaggtgagtgcgtgaccatgagtttatctgagcgattgggttgtatttattgttttgtgtgatggtatgtaggtgtggtgaatgtgttttgggtgaattgttcaatgactggtttgtttatgatgtatttgtgattatacccttttaattgcttgtgtgtatagttcgtagatgagatgatcgcctcactaagtatttgtgataatatttacacatctctttctttttgatgcaggtaaagataaagtgtgatcgtagaatcatgggaaggaagagaggatgatttaggaactcgtttgatttatttttgtgttttggttattggaatccggttagggttgtgttaggattgttagtcatacttggttttgtttggttgaattatttatttattcattaaatagtattttttgacttgctttttaaatattattttattggttggtttaattaagtatttatggaaatatttaattatatattttttttttaaaaagctcgggttgtttcaatttggtatcagagcgctgatgggaggttggctcattaaaacaacccgacccgttttttttttaaacataattaaatattcccataaatacttaattaaaccaaccaataaaacaacatttaaatcgtaagtcaaaaatactatttaatgaataaataaataattcaaccaaacaaaaccaagtatgactaacaatcctaacacaaccctaaccgggttccaataaccaacaaaaataaatcaaacgagttcctagatcatcctctcttccttgccatgattccacgatcacactttatctttacctgcaccaaaaagaaagagatgcgtaaatattatcacaaatacttagtgaggcgatcatcccattctacgagcaatacacacaagcaattaaaaggatataatcacacatacatcataaacaaaccaatcattgaacaattcacacaaaacacattcaccacatctacataccataacacaaaacaaaacatacaacccattcgctcaaataagctcatggtcacgcactcaccttaacaaattgattctaacaacaattaaacccaggagagactctccttgcgtctaaaacagtccagaaacgtcctacaacaagtctcaaccaaaagcaacattcaaacaaattggacatgaaaaacagaaacaaccagtctcaaagacgaaaccctaaaatacaaactaaccattaactattaaatccctctggtgaaacactatccttagacgtcacaaaatttcccacaaaaacccgtgccgatcggaaatcagatgagactacgatcgcggttacaatccctgctggtcctaattcgcgtcttagaaaacatgtctcacgaaactgcgaataacttaaccaattttaatccaaacccaattttgtaaactggaaaaagcgataaaagacttgggaataaccctaccaaatttcgttacctttgaaaacgatttgatatgtcgaaaatgtttcctctcaaaccctaacgattctggttcttctccttttttctctttttttcctttataaaacgaaaagtggctaactaaagtcctaatttcaagtttccttcttttataggcacactctagggtttccaattaacccaaccgattaaacaggacgatttaaatacaaaccctaaccgattttccgattcacgggcgttacaattctcccccactaacataggtttgtcctcgaatctagcttcacccttccactccgaggaactccgtgcaaccatcactacggtccgcactccctccaaccagaccccctctaggtctctctatctaatcgatatactcacaatttactagtcattgttgctcacaactcactctctactctcagacctcaatcttcgagtataaactgtcactctcaggccttggcctacggtatctcgggtatcatacgtattatcttccccactcaaagtcaaaccctgagttgtgtcggctcactctcagccacaaagtcatcgagttacgacacttggagaaaataataccacaaaactcgctctcgggtcatcaccctaaagagtgctctcggatcgtcacccgaagccaccgtacccctcgcactctaaagacagcaagtccctcgagttaccggtacctcaggagcataccccgcttctcacaagttgttgggaccctcatgtccctcgagcaaacaatactaaacgcttccgagcatatctccagactctctcatggattcgcggaagacacctttatgccccaccatccatcatatctccttgggaacatccttatgaccaactcccggccatctcgtaaacacaccttcctcttaggttgtttactcaaactttccaaaaatagacaagtcctttttgggaaattttctatttttggaaaccacataacacattcttaaataagacaactcaagtcaaatctaagaaaaaaaatactaatcttataaatcatcaaatgtcatgattcgttacaactccaaacgaaaatacaaatgaaagagaaataagaacaacaactcaaaagctcaaaaaaaactcaacaacactgaaactgggaaccaaggatagacaaactcatgcagcaatctgcttctcgaaccactttttgaattttgccttcatcctcgcctctggctcctaagtctcctctgtcacaccatcgcagtcccacatgactttgatcaaaggaatcttcttccgccgaagttccttgatcctcctctcgagaaccctcactggtcttgcctccaaagtcatgttgtactgaagatcctctggaatcttagccaacacctcatcatccttgtaaagacacttcctcagcatcgacacatgaaaaatcttgtgaaacccacacttaacatctggcaactctcacatgtatgccactggtcccaccctctcaacaatcttgaactgacccatgtacctcggactcagtttagtctctgagatagacatgttcagacttcgcaacatggccatcttgagatacactctatccccaacctcaactcaagctctctcctcctcttgtcagcataactccgctgtcgatcctgagcttccttcatgttcagcttaagaatccggatcctctccgtggtctcctgaacataatctgcaccatatatggtcctctcccccacttggatccagcataacggtatcctacatggcctcccgtacaacgcctcgaaaggagccatcccaatactcgcctgataggtgctgtaataagcaaactttaccaaactcaagtgctctgcccaatgacctcctcaatccaagacacacatctgcaacatatcctcaagcgtctgaatagtcctcttagattgcccatttgtctgtggatgataagccgtgcttatctgcaccttagtgctcatctctgcctgaaaggctctccaaaatgcagaagtaaacatgaaatccctgtctgacacaatactcacaggtactccatgcaacttcacgatcttgctcacatatttcttcgccaacactgccgctccatcggtttttctgatggccagaaaatgtgttgatttagtcagacggtccacgatcacccaaatagaatctttagttcgcgacacatgcaatccaaccacgaaatcaatagtgataaaatcctacttccactcaggaatgggtaaactctgcaacaggccaccatgcacctgatgctcagccttaactaactggcaaacatcgcattctacgagccaattagctacatccatcttcatcccgacccactgatagtaccgcttgaggtctcagtacatcttagtcgctcctggaatgaatggaaaacatgttcgcatgagcctcactcaagatcttccgttgcaactcctcatccttaggcacacaaacttgccatgcacaaggatagtcccattagctgcgaactgatactcagagccctctgccttagaagccgcaatcaacccctcatccttctcctgagccaaccgaactctattcagaagatctgctcgattcacagcttccaatcccaatggctctcatgccacagcacacaaccgcaaaacaccaatctcactcaccaaggcctcaacactctgccctggagccgcacccacgcgcttacggctcaacgcgtctgcaaccacattagccttaccaggatggtaggctatctccagatcataatcagccaccagctccatccatcgcctttgcctcaggttcagctctgcctgagtgaagatatacttcaaacttttatgatccgtgaacacctgcactttcccgccataaagataagacctccaaatctttaaggcaaagattaccgcagccatctccaaattgtgagtaggatagctgcccttattgttcctcaactgccgcgatgcataggcaataaacttcccacgctgcatcagaacacaacccaaaccaactcttgaggcatcaatatacaccatgtaaggctctccatgctctggcaatgctaacactggtatactcgtcaacatctccttcaggctcacgaaaccctcctcgaacttcggtgaccacacaaaaggaacatccttccctgtcagcttagtcatcggctgtgccatactcgcaaaccccttgacgaatctcctgtaataccctgccaacccaagaaaactcctgatctcagtggcattcgtcggtctaggccagtctctgatagcctcaatcttctctggatccattgaaactccctctgcagaaacaatgtgacccagaaaacccatctctctctgccagaaactgcatttgctcaacttagcgaacaacttctactcccgtagcttctccatcactcttctaagatgtacctcatgctcctcgggactcttagaatacaccagaatgtcatcaataaagatgatcacaaactcatctaaaaactcctggaacacgctgttcatcaacctcatgaacgttgcaggtgcattagtcaaactgaaaggcatcattactaactcaaaatgtccatatctcgtcctgaaagcagtcatgcaaacatccgcctccgctatcgggatctagtgataacccgacgtcaaatcgattttggagaaacaagtagcacccctcaactgatccaacaactcatcgatccttggtaaagggtacttgttcttcacagtgacccggttcgacccccggtagtcaatacataagcggaaactcccgtccttcttcttcacaaataacaccggcgctccccaaggtgaagtacaaggacgaatgaatcccttacccaacaaatcctctatctgcttcttcagctctaccatctctgctggagccatcctgtagggtgccttagacaacgacgctgtccctggttccaactcaatatttaaaggtacagaccgtgatggtgataatccctgcaactattaaaatacattctcgaactcctgaacaacccgaatatcgctcactgctacctgccccacagacaccagcatagatatcgtcacaaggtaagcctcgcagcccttctcgatcattttctctgcctgcactgttgagatgacgagactccttgaggtaggtctcactccctgataaaccaatctcccttctggtcgctcaaaagaaactctcccacggtggcagtcaagatgtactctgtaatgatccaaccaatccatttccagaataacatcatacaactctacagggctaataatcaaatctgctggcgtcgactcccctgcaatctgaatatccacactcttcgctctccccagaaccgctagaaactgccctccagcaaccttgacggctccaaactgctcaccaggatccctacggatgttgccgtgcgaggcactctccgtggtaatgaagcaatgcgatgctccagagtcaaacaacacatgggcctctacaccgcccactaataaggtccctacacaaacctcatgtgctaagaaccctaacaatcatcacaaaacaattatatctaaaaacagctgagataattcacaaagtctgagaaatcatgccattgatcgctctgttgctggtactgcctatctcacgcgtagtgtagccctgtggtgctgctgcaatatgtgttaactgctgcacattttgctgcactccctgctgcacttgcgctccctactgcaccgccggctgtactactgccactgtcattcgctgcagcttaggacaattcggcctgagatgtcctttctccctgcaatggtagcactccctcgtctcagctcgctgcgtgcaatccactattttgtggtcaaccacaagaaaaacatcccgcacgaccaccctgtccagctctagaaggatgatcttacttcctcttctacccctgcgcaggcttggcacccttgctaggtgccagcttctgctgagtcttcttctgttgtaccgctggactcactgccaccacctgcctctgaaggtcctcctctatctcagcagctgtctccaccagtgccgccttcgtggcgtactgtgacactctacaccgcaccctcaaatccggtcgaagtccccttaagaacctcttcatctaggcctggtcatcctccatgcttcgacccgcatacaccaaaagtcggttaaactcccggtcatactcccgaaccgatcgctcatactatgtcagctccagaaaacgcacctccatacggtcgagcgcctcctgtggaaagtacttggcattaaactcagccacgaaatttgcccaagacatatccgcctgcctcctcctggcagtcacactccgccaccacaaatgtgcatctccttcttaaaaatgcactgcttgaactgaagttccgctcaacccgcgacctccaactatcggcctcctcaggactagtaccaccagaaaaatacttggtactaatcctctgcaactgctccatcatcctcaaataagatggaatctcctcagcaaccgcagcccactgctgcacctctgctactcgtggtgcaactggagcctacactggtaccacacctggtaaccgctccaacaactgcctcagcaggcccgccaaaccaacctctggaacctaggctcctccggctgtggcgcccatcattcctgggtcctcagcaccaacggcatgcacaccctaaccggattccaataacaaaaacacaaagataaatcaaacgagttcctagatcatcctctcttccttgccatgattccacgatcacactttatctttacctgcaccaaaaagaaagagatgcgtaagtattatcacaaatacttagtgaggcgatcatcccatctacgagctatacacacaaccaattaaaagagtataatcacaaatacatcataaacaaaccagtcattgaacaattcacccaaaatacattcaccacacctacataccatcacacaaaacaaaacatacaacccaatcgctcagataagctcatggtcacgcactcaccttaacaaattgattctaacaacaattaaacccaggagagactctccttgcgtctaaaacagtccagaaacgtcctacaacaagtcacaactaaaagcaaccttgaagcaaactggacataaaaaacagaaacaaccagtctcaaagacgaaaccctaaaatacaaactaaccgttaactattaaatccctccggtgaatcgctagccttagacgtcaaaaagcttcccacaaaaacccgtgccgatcggaaatcagatgagactacgatcgcagttacaatccccgctggacctaattcgtgtctgagaaaacgcatctcacgaaactgcgaataactcaactaattttaatccaaaaccaattctgtaaactggataatagcgataaaagacttggaaataaccctaccaaattgcattacctttgacaacgattagatatgtcgaaaacgttttctcccaaaccctaacgattctggttcttttccttctttctctttttctcctttataaaacgaaaagtggctaactaaagtcctaatttctagttttcttcttttataggcacactctagggtttccaattaacccaaccgattaaacctgacgatttaaatacaaaccctaaccgattttccggttcacgggcgttacaattcataacttttacgtttaccttttagctttgatttcctgtgtgtttagctccctcttgcattaaagttgtcggaagctaagttatttagtcttatagtttttgggttgttgcagggaagagaatacagtgctcataaatagaccaacgtatataatcgatatacttgcaaccccataaatattagcaatgatggataaaatcttttatgtttctattgtcggtggggtatattcttcaagtatatcttcagcatgtaatgcttccgcaactatattataacctgttattgttattttggttttataggggtatttttgggagaaattatatcgatgaagagagaggattaattattaacttatcatgcatagtttcttaatatttcaatcatctgagcatagatattaatatagcccatttttgaaattaccatttttactaaaatcttacggatgtcattttttaaaacataaaaatgtacgtattgaggattttttttggtaaaaatacgtacttgatacgaaatactaaatcctaagaacaaccacaaccgactaaacccaaacataacgaataaaacgcatgttaaatcacatttttgtagcaagggcaaaatccataaactattcaaaaaagagtaaaatccacaaatgtcatccaataaaacgacaaatccataattgattcttctatatatcttgatatgtgtactattttgttggaacttaaaacttttatgtttgttaaaagtgaaaacaagcatctcttatatttttgtttcttatatccaagtgatcttccatgggatttggtaattactaaaattcgtgtggaaatagcatattgttaggaagtgagtgataaaaagagaccagactaaatatttaaggaccaactgtgacacatgttccgtttgacatgattggtacaaaagagagcttcaatctgagagcctcaaagtcattgctgtttctctcatcactggtcaaccaaatcgctaaacatcggtccatcaactccttaccacaggaccaagctgaatttcctttcagaatccttgccttatcgaaccttaagatattggagaggtttgaatctgatggttggtcaaggaatgctctcatggttgctttaatggcctcacaccatataggacgtccaacgttcaagaagtcctgcaatgccgtcacgggaaggtttacactccccaattctgattcattgcgtccgccttttccatgataatctgatcctcctagctttagcagattgtatgtatcagccaactcgctaaacactgttcaatcaacattaaaattcagtgaactcaaatagatagatagactgatagagagggaacgagggagggagagagtgagagaccttctaacttgccgtcgctcctataaacctcgaccccatgaagtccagcatccttcaatctcctaataataccgacatgattcttcaacgcccacggatgtgcaagcacagctacaccaccggttttgcatataagttttactgcttcctcggccataggctcagtccctctgcaataaggttatgcaaccattcacatagaaaaaagtcagtgtgatactgacaggttttaaacaagtaccaacgaactacaccaaataagaaaactgattagcaatagaagtctctaactatcaaccactgcccaaagcaatatgcaaaaccaatcctacaatatccaaactcattttccctaaactttcttttagcatgttagatctctactctctagtttctctaatatagttgatgagctgtcaacagaggtaaagtccactacaacccacctaaggtaagcactagactagcataagataatcataaacgcttaaatcccgcaaggttcaaaaaaatcaggtaacctagtgaagaactagaacttacgtagcataagcaggtccaccatcatgtaaatatttagtgaaagcttgtctcaaattctccacgtagcctgcttcaagaagcgctcgggctacatgcatcctacccggggcaacatccttgcctgcaatcctggtaacatgctcccattttaaaggtatctttagcttattcaatttcaataccatttctctcccacgaacgaaacgcccatctcttatcttcaccaagaaatcttccaactcatcatataatgctggaccggaagtgccataatacgcaagtatatgcactggctcctcagacccggagtctctggatttcggcaaagaaattcatgactgagttaaagtattacaaacaagtaagaatattttgaatcaagcaatcacaacaaatataaagatgataccttaaaccgaataatgtgctgatctcaatacccggaatgatcttgataccgaatctacgtcctgcttccactgcttccgggacaccagccatagtatcatgatccgttaaagaaagaactttcacctgctttgatcacattgagaagcaatcaaatccctgatatcatcatgccatcaacagctccactgtaaacccatgccggattgtgatatcaaaagcgaaattgatggaaaagataaacctttctctcagtcctacgaactactcctaataatggtacagacgaaacaatcacacaaacaaccaaatctataacctcaatggttatactctacctaaagcagtgaactttgacgacctactaaaacagaggtacaaagctataatctttatggtaaaactctacctaaagcagtgaactctgacccactaaaacagaggtacaaagatataaactttatggttaaactatactaaagcagtgaactttgacccactaaaacagaggtaccacgctataatctttatagttaaactctaccaagtgaacttagtgttaagtggcgaaacatcatcgaattggcgttaccgttgtgatgcacaatctaatcagagcaatagctaatcttaagataattcaccagcaaagcaaaacccagttcagatcttctcctgattcacaaaccataaaatttgaaactaaccccattgttataagccctctccacgacctttgaaggtgatagaaacccatcgctgcgatttgaatgagaatgaagctcaaacacaactttctctccacatcttagagaaccagaattgatgttgacggcaaagtcatcagaggaagaggagagagatggagaagaacctaagatgagccaatcggtgattgacttaaaggcttctgattgctcagtggtcatcttcctcttgttaccagtactacgcttcttcttcttgttccgcttcttcttatcgtcagccattgttggagattgtgagggaagaggtatcaaatttggaggatgagtttttgaggtctgaccgtcggagaaggtgacagtgagacgaaaagagtagaaatttgaaatggtttttaatttctattgggcctgaaaacaaaccaagcccaacaaaagaaaattttggcgataatcataactagaaacaatagcctaaatatgtgttgatttttttaaaaacaaattcacttttttaataacaaatgctttctctctcttttttctctttaaaatttggttgtatttctgcatgcttttattctgacactgatactctacctatttggcttgagcaacaacattgtaatgactctctttaagtaatgaataacgtttgtcgggaaaaagaaaaattcagacaatagtaaaagtttatttcccttcgatgcacagtccgaatgttattttggtgcttatctttccccatttagtcgggtttatcatctagcatctccagcgatctttagtggagatggttggctcatgttcggtaacatcgggtttaataaacggcgttaaccgaattctagttatcttctgccatacttctctggtgtatccggtgacttttgctttcctttcaataatttcataaattatgagttggtaatagcggtttatgtgattagtgtcttaaagattattattacctgggtcgatcttttgaatttttgatttacaggaatcaatccagagatttatgttttaagttgaaaaaaaaaagaaattttcgttgcatatttagattgtctttagctgttaattctctatatggagtttcgattggtttcattcggtgaaatccagaaaaatcaagcttcgattttaatatcggcgatgattttctcaccggaatcgtacttggacggcggaggttgatgacaaaaccctttagattattcatccactgtgtagctgttcagtttagagctattgacatgtgaagttggatagagccacatatcatttattctctattaagtaatgctttgaagcttatgttgggcttaaaaaatgtttcctgtaatcttaatgtttgtagggcttttagcccatgtacggtttgctacctctataataatatttatccataagaaaaaaatgataagacccgcctaaatagacggatatcctttatcttataaatcacaaatcacctaatccataaaaatttgccacatagattttgtttcaatattttgataaaaataaaaatctgttaaaaaacagttctaaaataaaaatattatcgattttgataaaaataaaaatctgttaaaaaacagttctaaaataaaaatattattcttcgatatctatatctgccttctattttgtctaaaactgttcttagatcctaaatttactaatcaatgttcaaaatgaaatatatcatgttttcaaaccgttttatctccgatcctatttaactctcaatcaaatcaatttttttaatcagttttctctccctttccatcgttttgttttatctcatattcatagaatttatcaaagaagctgtttcaagtttatgactactctttctttaatttcactttctctttatctcatattaattattttcccatattttacatgattcaggttaaatatgccaatgccactggattatattcatacttcgtaaaaaaaaaaaattggaaaataagagatacgccaatagcttgtatgaaaagcttaaaccttgaactcttaaatttcattcattctctttcttaagggtttacagcggcttacatagagtatttatacacaacacatgaacttgtaaaacctaagtaaactctccagatgtcttcatcccattgtctctaacccataatggctgagaattggtttaaaagctgtaactcctccgtacgagctttcgtcatgactctgtttcttttgtctgtttgtagaggagatgatcattgaacattgcacgacatcgtttctttgttagacttgatgggttcctgtgtttttcggcccaactcgtttgttttggttacacaaacctttggcccattcgttgtagcagacaaaatattatcgttttgagaagtcggtttgatactccccctcaaacgcggtttgggtggaaaatccacaccaagtttgaaccgcatactgcaaaaagcttcatatggcaaggacttggtgaagatgtcagcaatctgttgatgaccgggaatgtgtttgacaaccaaagagcctagagcaactctctctcgaacataatggtaatcaaactcaaagtgcttacttcgagcgtggaaggcaggattcgctgttaagtagactgaagataggttatcaccatagagctcaggcgtaacaggaagaggaatgcctaattctcgaagaacatgacaaatccaagtcatctcttgagctgtttctgaaagggagcgatattctgcttccgttgaactgcgagagacagttggttgtttcttagaggaccatgatatgagattagtcccaagaaacgtgcaataacctcctgtggaactacgtgtctctttgcaaccaccctagtcactgtcactataagcacgaagacgaaactcactgtcagctgattccttttcactgtaagcccgaagcttaaaatcagagtgcttcgagaagtgaatgcccattgagagagtgcccttgacgtaacggagaattctcttgagaaggttgtaatctaaacctgtgggctgatgcatcttttggcagacaaagttcacagagaactaaagatccggtcttgttaaagtcaaatatttcagttttccttcaagacttcgaaaataagtgggattagagaagagttcttcttgatgaggaaccttatgaagttgaagtggcagtggagtaggcattggggagcattcatccatagctgcaacagtgagaaggtcttcagcatatttttgcggagagagaaagaggccattctcatgaaagtgagcttgtctacccagaaaatagtgcatttgcccgagatctttcatgcggaagtgagtgttcaaatcctctagaagtttggccaatgttgctgagttgtttcctgtcaacaccatatcatcaacatagagacgtaggagtataagatcattccctttgatgtaaatgaatagagaaggatctttaatactgcagcaaaaaccaaactcaagcagataattgctaaatttgtcaaaccaagcacgaggagcttgtttaagcccacataaagctttgtgtaaatgacagacattagtgggattgttcttgtccacaaagccagcaggttgaagcatataaacagtctctgtgagatccccatgcaagaaagcattctttacatccatttgcttcacttcccattccatgactgtaacaatatgtaacaccatccgaactgttgcagacctcaccacaggctataggtttctaaataatcaataccctcttcttgatcaaagccttttgcaaccaatcgggccttgaccttatcaaaggaaccatctgcatttaaatttgttcgaaaaacccatttacttccaagcacattcatatcaggagtataaggaaccaagctccatgtttgtgcctccttgcagttgtcatactcttcattcatagcaacagtccaccccggatgttttaaagcctcagtaacagtctttggttctgcattttttactttgtgtgtaagaagtccataccagggattaggctttgttatacctttcttggatcttgtcatcattggataagtggattgagttgaagtagtcactggcattggatgaatgctcgctgaaacagaaacagcaggaagactcgttgaatctgcaagaatactcggtgaatctgaagcatcacggagagtcgttgaggaagctgcagagctttgagcaggagagttgtcagtgtgatccgtcctgttgtcaagtgaagaagtgcctataggtaagagatcaaagctcttcgtacactcagaactctcttcactggcaacagtagacgacactgatgagttcatcattggtggcagcgatggagaaacactagtggtgttagttctgatactgatcacaggagaaggctgcatacctgcagcattttgcagagagactggattaagagaagcttcaaatcgtggcataaagcattgttgctaaactgaaaataatggtgtaacgccactaggctgcagatgaagataggtgtctgagaaaggaaggactggtcatcaaagataacatgacggctaatgaaaactctgcctgtagtgggaagaagacagctatagtctttatacttctcattgtaacccagaaaaacacacttcaaggattttggatcaaacttttgttgagcataatctctgagagtaggaaagcaagcacatccaaaggttcttaaggcttgataatctggtttattcttgtaaagtagctcatagggactcttagcattgtccaaagcagtatgaggaagcagattactgagaaaatttgcagtatgaaatgcttctacccaatgcctttgaggaactttgctctgaaataacatagagagaccagttcagtaatgtgcctgtgtttcctctctgcaagtccattttgttgaggagtataaggacatgatatgtattgttgaatcccatgttcttgaagatggttgaggaagatcttgctggtgaattc

SEQ ID NO: 218 - DNA, 90161 bp, Arabidopsis thaliana
gaattcatttcaagctcaaagctgctacagataaagagtatgaggaacagtttgaaagaatgaagattgttccttatgcaaatacaattgggagtatcatgtattctatgataggcactagaccggatcttgcttattcattaggtgtgataagtaggtttatgagcaaacctcttaaagatcactggcaagcggtaaagtgggtcttgagatacatgagaggtactgaaaagaagaaattatgtttcaggaagcaggaagactttctgctaagagggtactgtgattcagattatggcagcaactttgataccaggagatcaataactggttatgtgttcactgtgggaggtaacacaattagctggaagtcaaaattgcagaaggtcgtggctatttcatcgacggaagctgagtacatggcccttactgaggcagtaaaagaagcactgtggttaaaaggttttgctgcagagcttggacattcacaggattatgtggaagttcacagtgattcacaaagtgctataacattagcgaagaactctgtgcatcacgaaaggacaaagcatattgatatcaggttgcatttcatcagagatatcatatgtgcaggtttaataaaggtggtgaagattgcaacagaatgcaatcctgctaatattttcaccaaaactgttccactggctaagtttgaaggagcattgaatatgctccgagtcactgaaaactgagaggtaattctcaggttccggagaggagatccaagaactagaacaagttgagacaaggaagacaatcagagtcaaggtggagaattgtaagaagtgactcagattttagtcttcgggtctaagtgtgggagaaactcggtgaaagagagggttcgaagtctgtcgtgattcaagcgtaacacgtgaggcgagctgactaaagtcataacacgtgaggcgagctgactaaagtcataacacgtgaggcgagctgactaaagtcataacacgtgaggcgagctgactaaggtcataacaagcttgagggtgttttggtctttttcgcatgagctctgtaactatatcttcttcttcttctctgtaattctgttagatcggagatagagaaaaagagagaattgtaatcaagttctagagagaactagagagagaaaacttgtaaagatacattgtaaagaaaggttctagtggatttccggagagattctccggcgagacgtagcgattccggttgaggaacgtgaactcgttaaatcgtgtgtgtctttgtttttttaagttctcttcaaagtttcgattcattctcaaagtttaagtcgtttgattcgagagttttgtgagctaagtgttgatcaaaaccttacacctctcatgaaaagtaaacccttcagtcttctaaaatcttctccaaacttctagtatccataaccaacctctataaaccgacttgctaatttccatatgtttgcttcactttgctctgttctcctgaactacttcgtgcggtactttgacttaatacaagaactacttcaacagctttgccttcattatttgccatccataagtatcgctttatgtttctcttcatcttgatataaaactcgttaacaatacatcaacaattaagactggagaatcaataggctcttgactcttctatccgtcccgtctcttctactacaagtttctcacatgcttgttctctgcataccacattttaaaacagaggaaactaatagattagatagcaaactaacagtgaaaacatatatagtccatatagaattgatgaccgaaacaaacaaaaaaaaatatgagatcaaggcaaatggacatagagaagtaccgatttggaaaagataagaaactgacagtagatgtagaaattacaaagcgtttttgataaaaaaaaaaaaagattacaacgttgacaaggaatcaagattacacagcgtttcgtgtaaaacaacggaacgaacaaaatgtcatgtcctccgatttgaaaactactttttgtggacaacggttatcaacatgataatggcataatggtcgagaccgggtattgttgggaaggatatgaacctccctcttaatatacgttatggtttgactaggtttcagcatatacatgtcttctccaagcaaacaatgaacatgaagagtggtgcagcagtcatcacaagcatagaagccatcttctcttgagtatactatttgattttcgcagacctcacaccagccgtattgatcactttcctctttcccttcccagaatgtgaggagatgtgtgtcgtgcttatactttgcctcgtatggtaaagtagcacacttaaaacaaataacataatcacattcgatgcaatttagtttttgaagaaaagtagctttctgttggcagatttgacaagttgcctcaagttcttggtctgggtctaaagctaggaataaaggatgctcatggccttgatattcaaatggttcagaaaccgaggcacaccacaattgttccatcagaaaaatggccttgatgatggtcatgagaaaaatggagtattattccatcagctatcgtctcaaatagctcgagaattatttcaggttcttcaggtactccctcgagatcccttccatcccacacgtcgttgcgcaacgcacatcttgtatgaacaaaatagtggctacacttgttgcaagtgtatgcaccacaattgttgtcaaccttcctacgacagactccacaagaccattttccagatggaagagaagaggtaaaagagatacggtgttggtgacgatatattttgatgacatatggaaaatagatacaatcttgatgggctacaaagatacatcgaggacacacataggtggggaaagcttctttaatgaggccacaaacatcgcaaagtaaggaagcttgtttgggaaaaaaggtgagaaggtggggatgcctttttgagttgtctatgaaaatgggtattggcttcatcgcacaaacgggatgcatactaagttcgtaggtgggacaatgataaaacaagctaaagagagctaaatcacagcacatgcaactcacgcatggtttttgatacgaagggtttttgagctcaagcggagactccacgcattctttgtggaacatttgatcacatgtgagacatatataatagtctgtgtcaatcttgaatgtgtcacatgcacggcaaatgaattgagcataatcaccgtgtttattgttacaccaatagatagggacaacagggagcttacagatattagcatcacggctgtcggaatcaagcaaatgctggacttgttgatcagcgctacttatgctggggaagagcggggaaatattgaacgggagaagttcactataagaatagttttcctcgtcagctttaagacgtaaagaaggacagaggaaaagaggttgttgaaaagagaggtcgtgatcgccatcaatggctgtttcaccagaggaagaagggattgtggtgtctgtttgagaagaaaaagtgacaatgtaaaatggttttccatcgatttccctctcacgaaatgcacccactgaattggaattcatggctgctgctaaggctacaaggatgatattgggtagttgtgatatttctctcgtcttcttctcaccctatttgggaattacattttatgtaaccttaatttttgtaagtaattacataggtatgccattagaaataaaattttaaagagtaaattaattcatctctttaagaattaaaaagtcaaatactaatttaattaattaaatttaattcaaaacgaaatacattattaatttccaaaaaagtaaccaattaaaatcaacaaattagatttgatatctaaattatcatattaattttttattaattattataatttacctctcatctttatatgattctatttttgcgaaaaaaataatatcatcgttataaaaaaataattagagttttttcgcatatgccataatttgaattttcaaaaacgaatataaaatgaaatgattttgggatgtcttatgaaatgattttggcagaagaggatgtaaaatttttcaaataaaaagtagtcggcaaaacatatgtttttttgggagtttttagataattaaatcagagaatagggttgggcataagagtaacccattcgagttcggatagaacccgttcgggtttgggattaacggtatatgatttattactcaatagaataattctaaatattcggttctggttcgggttgggtccagttgggtttgggtcatttggataaaagtttcaggccctaaaaatacccaaaaaaatagaaaccggtattttgtatgtagatagcgggtctccaaacaaaaaaacttttaaatttgttaagttttaataaatttaattatatttgaatatattttactaaattttgacaaacataacaaaagatttttgaatagtttagttgttttggatatttaggtccaaaattaattgacatatttagatttataattataatcttagataattagattatattacgattaaatataaataatattttggatattaaattaatgtttgggtttttgaatactctttttgggtaaccggtaatttccggaccaatcggatatccacgggtttactaaaactctacccaataaggaaatttcctaaaattttaaccagccctaacccggttttttggttcgggtattgggttggttatcggatccgtttttcgtcagtcctatcaaaaataatctaatatagggcccaattaggtccacaaatataaccaaaatactatacaaagactaaattctaagttaggccaaaaattagatcctctaatacaaaggaaacttgtttcttaccaaaacaacttgtatacaaattttacacatttacttaaaactacatatgttgtatttattataaaagtaaaacagtaaaacaaagtttaaataccaatgtttaaaatttttaatgcaaatattcaaaatgagaaaatattgattcacaccaatattcttattttttctttgaaatttgaatgacttgttttggaacaaacaataatatgattttttgatagatcattaattgtattcgaaatataataaataagtttgagtacaatctatctcttataaatgttatgcatacattcacattgcctcacaatcaatctagaatatcgattcttcaaaataatagatagatattcataagtaaattacttcatgttctaatgatgtttatctcctaattttactatctatttatgcgtattcttatggatttttctttcagggtcaacactagattaccagaaactagcggggtgttggtcaatattataacacaaataaaatcatggaattaacaatcaaaatatagttatacaatcttaaacaataaacaaaacaaatataacttaatttaattttttatttttaactaaaatcaacaaatatatcagtttattaaaaaaaaaatataacccgtggtacactacgtgtaaatccctacgatttcatgaggttgcaatatcaatttatataaattttgacttttaatatatacaattattttaacaattatgagaaaagaaaacgtgactatttgtagattaaataagaaattatataagcaatgaacaactttttacaacttacttaataacatgatctcatttctataaatatttaaccatataaaaccaaatactactatactttaattataagaactacatcttattgaaaggtttacactaaaaattggttttatatattacaatatcataaatttataaatcacaaattatttttaaatatattaatccaagatgtatcacatgtcaatccctcgatttttttttatattacaataacaatattaaaaaataacaaaataatatttaattttatggaatgaagttatatggtgaaacgagtttggattgatattaatacgggaagataatctacgagtgaaatcttagaattaacaattataacaaaattatataatcttaaacactaaacaaaagaaacaatatttacaaaacaactataacttaaaattaaaaattttagttacaaaaaaatcgaccaacggtgtaccgcagagtaaatttcacattatatcatctaattgatcaaatttcaaacaaaaacaattgatttatatacacatcaactaacaaaaatacacaaatttccaaatatttctatattattctgcaaattgaaacaaatataacaatctatttactatacaaaatacaaataagacataaataatataaattaataaaaaattaggtattgtattataatttataaataacattatacacttttctatgcacattataatttatacactataatatctttcactaaaaatgtattccaatacattttttaaaatatgaaaccccgcacgtatgtacgagtgagaatatagtattatattaaaacacacacgcccacatgccacagttaaccttaatcgctatgtttatatttttcaattatttcgttagtcctttttatattctttgttattgaaaagtctttctttttctttgtttatgaatctcatgagtttactctttgttattaacagtttatgtgtagaacagtttctgcatctgcatctgttgcatattataattgcaacttgtaactatagtttaaataactcgcacttgcaaaatcttagtattaaatcttcgaattattcggaaatagaaaggcctttttttttttgcgtgagaaggaaatccataagattttttcaattttaaatccataatctaattgtctagtcgataactataccaaattaatatttcaataaaaaaataaagtttagttctacgttactctctagtctctaacatgttctcttagacatgacataatagtcgtttagtattattatctctacagattgtcaaacaaaaaagttgtaatgttgttaaacaagcatacgaattgaagataccccactttaaaatcatattaccgaaaacatggttagtgggatttaacggacgttagatgcagatggtcaacgttgaggacaaatgcttgaacctcaaatggcagttttggttgatgcgttgactatcggatagtttacatacgcaatgaaccgtcggatcatgaagatagctcatcctacggtaatttcttaagctattagcgaatctgcgagagggatattgattaccggtgaaaaccaaagttttgggttcatcttcgatttccaatgtcatggtcgccttaataagcctctcctttgtctcagagaaggcttttttttttttttttttacatcagaaaaggcttttctctttgtgagattttgagccccaaaatgtttttttttttaacagataatgatagatttccatcaagaattaatggactcttaaatgactcgtctatacagatttctttgaatgagaactagattcatccttactcatagaatctttaacaagacatcatcatagagtccaagaccttttgatagacaaaactgcaaaaccatctttttttttcaaattcgtattatctgtaaatgcctatgaattctaaccaaaggcagaaaatttggaagttctccaaatttctaaacagatgagaaacattataaaattataaaacagaaatcaaaaatggttttcttaaagaacaaaaagtgaaaacagagcacatgtagcatcgatcaaaaaacataacaaacttacatataggaagaggacaagaaacaagattacaatgcgttttaatgaagaaatatggagagattaaaaaattgcaaagcgtctggctatgagtaattaattacatgcttctggcaagatatagcacaaaatatatggtgttctttgtatttgaaaactattttctgtcgacaacgctgcccgcatgtactgcaacatggccgagacaaagtattgttgcgaagaatacgaagcttcttctcataatgttcgtcgaaacccgtcatattatacattatggtgtgaccaggcttcatatacatgtcttccccaagcaaacaatcaatatgaagagtggtgcagcagtcgtcgcatgaatagaaccctttcgttcttaaatctgcgttgcaggaatagatccctctcgttcttaaatctgcaattcttccttcgcatgcatcacaccactctgaatgatcatttgcctctttcgtctcataaaatttgaggaaatgcttgtcatgttgataccttgccttatatggtaaggtagcacacctgaagcatatcacaaaatcacattcaatgcaatttagttttctgcaatgagaagactcatcttccctttcgtggcagatttgacatattgctaacttttcttcttctggattcaaagctaggtataagagatgcttatggcctagatattcaaatggttcagaaactgaggcacatcgtaaatctagttggaatttatttcttctataattaccaatctttcctctgagatcctcatagacgaaaccacaactttcacgctgacaagccttacaacaaaaacgtcctatgttgtcttcatattcactagtgacgaccgttagcgtaagtgggtgaggatgcaaagcatgatgtttcttgcaaggtgcatttgcacatgtttcgtggaggatgaagtcacattcatccatacatgaataatagccaccctcgtagatcggaaggatgcacgcttgacaaaccattttttcgtcgtagactctactgatcttgagtttcagatgatggccatgagaaaaatggagtattataccatcagaaatcgtgataaatggctcaacaactatctcaggttcttcaggtactccctcgagttctatcccatcccataagtctctccgcagcgcgcatcttgaatgaacaaaatagtcatcacacttgttgcaagagtaggcaccatagtcgttgtcaaccatttgacgacagactccgcaagaccattttccagatggaagagaggaggtataagatatacggtggtggtgacgggatatttttatgacatacgggaaatagatacaatcttgatgaactacaaatacacatctaacacaaacataggtgggaatatgtccttttatgaggctacaaacatggcaaggtaagaaagattgtttggggaaaatggtgagaggatggggatgcctttttgggtgatctataacaaagggtattggtttgaatgcacaaaatagatgcagagtgaagttgttggtaggactataataattcaggccatcgatacgtttttgacaacatgagcagaatacgcggtcggacggaggactgtaaagttggagagaaagagacggatatgaagggtgtttgaactcaagtggagaaccaatacattctttgtggaactggtcaccacatgtgacacaaacgtaatagcttgtggctggctctagggttgtgcatgcacggcaaatgaaatcgaaaagatgaggttttttattgttgcaccaaaagagagggagtaaaggtagcttacagctgtcggaatgaagcatatactcgggttgttcatgaccactttgtatggtggggaagtgaggggaaacaaccaacgggaaaaagctacgatctgaatctctcgtgtatggtttcaactttttaactttgagacggaaagtaggacagaggatccgaggctcaagagagaggccgtccccaccatcggaatcaaccgctgcttcaccggaagaaaggctctctgtttgagatgacaaagtgtatatgagaaatagttttccatcgatttctccctcacgaaactcacccactgaatttgaatacatggctactactaagagatttttggatagttgtgaacttgtgatattcttcttctcctttctctccctcttacatatagatgtatacaggatacagctaagcttgatcgatatgtttatcatttttaatttagttattgacttattgtaataactagatgaacacccatgctacgcatgggtttttgtttttaaaattgtcggaaaaatatgattatggttttttgttgattttgatgttcattttgataaattcatctatttaatataattattactttttatgattatattcatctataactcgaaatatcaattctactacaatatgaatatttatatatttattattctaatatttcactatcattatcacatactacaacaatatatgatatactgatacaatgtatgtagttatattacttatgtgttttgaaacttgcctaacttaattgtaacaaacgattctttattccatataatcatatagagtctcatgttttttttttttttgtatgtctaatgtcttggatgactattacgtgaaatgtacataaagaaggtcatataataaatcaaattcacaaaacgtaataataaaaaaatatccaactaaaattactaaattaatatgaggttaggtagcaaacatctaaactacaacacaagtaaaattttagccattatgggttaatgactattgataaaacaaaattaataaaataagtagaaaagaatgaaagtagtgcttggtacattattatgattttttatttattgattatttttagaaaattcatttaagactgagattaatggagaatttaatacaacaaaagatttttgattttttctcaattatttttgctagttttttaatttaactaatgtagaatgacacatgtcattttcttgtgtgatgatgtgtcaatcatatggagagtgttggtcaactttcatatatatgatttacatcttggttacaggaaaagtcgttaattattatttctcattttcgatccactagtgttttttatggatcgtctatttattatttagaaagtttaatagagaaacattataagaacatagaaaaaaagaaaaaaacttcaataacagtactatttgttgacgtgctaacgtgttagagcagacttaattatgattaatatactaatttatctttaaaaaattctgttttgtgcaattgattttgtttttccttttagtttttatttattataattaaacatacctccattatttgttcaatgagagcgttctaacatgttctattaattagacatgatagtcgtttagcatattgacagattgataatatcatgagttttcataaacagtttctgtctagatcatggattctctgtttctgcatctattgcatattataattgcaatttgtaataatagtataaacaaaaaagttgtaatgttgttaaacaaacatattactttaaaaatcatattaccaaaaacatcgtgagtggtatattggaactgggaaagtcaacaaaacacatgggatttaagtatttaactgacacggacgttaaatgcagatggtcaacgttgaggaccaataatgcttgaaccctttctaatggcagttttggttagatgcgttgactatcggaaggttacataggcgatgaaccgtcggatcatgaagatagctatcctacggtcttcatggtaatttcttaagcatttagcgagagggttgagtaatgaataaaagattcgacaccgtacgaggatattgattacttagtttcatatgattgtttttcccttttccctggctttttgtgagattttatcaaataaactctgttatatatatatattttttgaatgaatgcaaaatatatttaccaaaaaaaccaaagttacaacaagtgcattttatctgagtttttgaaaaatttaaagacaacaaatgactttacaaattaatgcctagtggaaagccaaaatattaaaatgttatcatatttcgggtttctagtttttcgaagcaatgagattcggttgcgaatgttttatttttgctttcacttgaaaataacggacggtcaaacgtcggtaacaaaagtttgaatatcagagaaccattgatgattctggaccgttggaacataaagatactccatccctcggtcttagggtttgaactttgaatcacggaccgcactataagcggatccgttgaccatccaacacgtacacaatggaaggattcttgaccgtcagatcataaggaggattcatcctactgtcataactgtaatttccttgtcttttagggagaaccgtccgatctcgaagtattaatggccctgtaacaagaacatcattgtggagtccaaaaccctttagtagagcaaaaccatctctttatcaaatgcgtattttcaaaacatatatatatagtccatatagaattaatggccaatacgaattaaacaaacaaaactatgagattgagacaaaataacattaaaaggtacatatgtcgaatacattacaaagcgttattgatagaagaataatattacaaaacgtgtacaaggaatgaagattacaaagcgtttcgacgaagacattttactttgtcaaacaacggtaagaacaaaatatcgtgtactggtcctgccatttgaaaactactttgtgtggacaacggtcttcatcatgatgatggcagaatggtcgagaccgggtattgttgggaaggatatgaacctccctcttaatatacgttatggtttgactaggtttcaacatatacatgtcttctccaagcaaacaatgaacatgaagagtggtgcaacagtgatcacaagcatagaagccatcttttcttgagtatactattcttttttcgcatacttcacaccagtctaattgatcactttcctctttcccttcccgaaatgtgaggaaatgtttgtcatgcttatactttgcctcgtatggtaaagtagcacacttaaaacatataacataatcacattcgatgcaatttagttttcgaagaaaagtagctttctgttggcagatttgacaagttgcctcaagttcttgttgtcgatctaaagctagaaataaaggatgctcatgaccttgatattgaaagggttcagaaactgaggcacaccgtaagtctattctgtaatatccagcttcatagacgtagccacaactttgacgataacaagcagaacactggaagtaatctttatagtattcttgttcgccagggacaatttttagcgtaagtgggtgaccgtgcaaggcatgatgtttcttgcgagaagcatttgcacatgcttcgtggaggatgaagtcacagtcatccatacatgaataatagttaccctcatagatgggaaggatgcacgcttgacaaaacttgttttcgtcgtaaactctactgatctcgagtgttagatgatggccatgagaaaaatggagtattattccatcagctatcgtctcaaatggctcgagaattatttcaggctcttcaggtactccctcgagatcctttccatcccacacgtcttcccgtaacgcacatcttgtatgaacaaaatagtggttacacttgttgcaggtgtacgcaccacaattgttgtcaactttttgacgacagactccgcaagaccattttccggatggaagagaagaggtaaaagagatacgatggtggtgacgacatattttaatgacaaacgggaaatagatacaatctcggtggactacaaagatacaccgaacgcaaacatatgtgggaaaagattctttaacgaggccacaaacatcgcaaagtaaggaagcttgtttgggaaaaaaggtgagaaggtggggatgcctttttgagtggtctatgaaaatgggtattggcttcatcgcacaaacgggatgcatactaagtttgtaggtgggacaatgataaagcatgctacagagagctaaatcacagcacatgcaactcacgcggtggccgggacgattgtaaagtttgagtgaaagaaagggataggaagggtgttttatctcaaggggagactctacgcattctttgtggaacattagatcacacgtgagacagacataatagtttgtgccaatctttgatcgttcacatgcaccacaattaaattgatcataatcaagttctttactattgcaccaatagatagggacaactgggagcttacagattacatcatcatcatcatcatcatcatggctgctgtcggaatgaagcaaatcatggacttgttggctgtcggaatcaagcaaatgctggacttgttgatcaacgcttcctatgctggggaagtgaggggaagtcttgtacgggagaaattcagtataggaattgttttcctcgtgaaccctaagacgtaaagaaggacagaggaaaagaggttgttgaagagagaggtggtcgtcgccatcaatggctgtttcaccggaagaagaagggattgtggtgtctgtttgagatgataaagtgtatatgtgaaatggttttccatcgatttccctctcacgaaatacacccactggattggaattcatggctgctgctaagcctacaaagatgattttggatagttgtgaaatttctcgtcttcttctcacccttcctccatatatacaatattaaagagacacacatacagagctaaccttgatcgatatgtttatatttttcaattattaattaatatctttttttattctttgttatagaaaagtcagtcatttgttttgtttatgcatgagatctttgattttctgtttctgcatctattgcatattataattgcaatttgtaacaatagtatatagaactcccacttgcaaaatcatagtattaataattaattagaaatcatagctccatatatgattttctattgacaaagaaaaagtattaattttataaatataaatgcagcgttactatagattaaaaaatgagcactctgcactcctttgattgtcatggtaataatcaaagatggcaatatcacgggttttttggattggtacgatgacatctttttgacactaaaattgtagtcgatggcatggcactggtgtttttggctgacggtatgtattttcgataattaactacattggcgtcatactcttcaggtgtcttgtgttccaaacaacttatttacaaagctatttttggtcactggctcgctgcctatctatggtcactactcgctagcgtttttatgaacatgcctgattataaactttttctgtgaaatataaaaagtaagaacgagacgttttttttttttttttttttttttctaaaagaacgagacgttaaagctgctagtatatatctgtaggatctgtttcatatttttatggtatgatgaaatgcctatgactatcagactatgcaaaatagctatatattatcatgacatatattctaagctttaaagttaaagttaaagttaataactcttcttgagatctaatccacgttaaagttaaagttaaagttaatgactcttcttaagatctaatccacgttaaagttaaaggcttggactatgttaatgtttgccggtttgaagcttttaatgttttgttttgacttttaactaggattattaacgaaagtgaatagttttgtatagtggcttcgtatattgtgcctcctcattaactgttatatttcttaaactgatatagatatatactagtatatatttttttctttattataagaaaatcaataaaataaaataaagcagcgcaaatttttttttttctgttttttgtcgtcaaactatttcattatttaactttcaagtacaatgtagagtccaacggattacataatcgagagcattacatctagcttgctttgctaacctatccacaatatcattcgctttacgagagatatgaataaaattgaagcgacagagctttgaaattttaagaatatcagcaagataggttgctatagggaggtacttccatgaggttttgtattctggtaacgcacatcgtaaagcagcgcaattttcaacatttagtagaagccgaaattgcgagggaaaactgaaaaataaaataaaactaaagtacacatcgcagcaactcacgtgcccttgctgaacaagaacaccgactgatccttttttagaatttatttgggattttggacgttaaaactttggaaataaaagtttgaatatcagaggtctttgatgattctggaccgtcggatcataaagatacaccatccccggtcttagagtttcatcgcccatgcaagagccgtccgatctctaaatattaaataattaatggcctggaccaagtcgttggggggaacaaacccgtttgaacattgagttggtgattggatgggctgtatctttatgatttagctccaaaacaacttaaaaccctaattttgagcaaatcaagctttagctttttttaaaaatctcatagctcaaaacaactttttttagttttttagctgtaactcttaaaatttgtacaacacatttttttgtgctttaagaactgtaaacattttttatataataacatttaattatctatttaccatatttttattaatataaataacataaataaaaagtacaaaaacaatttatattttctttagttattataaaatttaatattataatatatattttcatcaaaaattatataatgaatatatgaatttaaaatttaaaattttatatttcaaaattttaaaattcatatatttaaaatttaaatctatagtattgaactaattttatctatcatgctttactatcaaaatacctacagaaaaaaatctacagctacagcaaatacagttacagcaaaacaattacagcaaaaattctacatctacagtccaaccaatcgtccactaaatcacggactgcgctattagcgaatccgttgaccatcgaacacgtacacgatgggaggattctcaatgattcttgatcgtcagatcatgtggagaattcatcctacggtcataactatactttccttacttttcagccagaactgtacgatctcgaagtatttatggccgacaaaaaaagtaattgtaggccgagtaatggcccaaaaacagacaacggatcatatgtacacagatggattcgaaaacacctatgaaaatcaaagtgttggattcatcttcgatttcgtcgaccttttagcttctgcttggtctcagataagactttttctttgtgagatttttcctaaacctcagttatcttgagcaccaaaatgggtttttaacagataatgatagcccgagatttcctctatattgattagaacttgatctccaaaacgataggaatcaacggactatctttttattatacaagaggcaagatacattacaaaatctgtagtgttctttgtatttgaaaactattttctgacgacaacgctgcctgcacgtattgcaaaatggccgagacaaagtattgttgggaagaatatgaagcttcatataatatccggtgaaacccttcttatacattatattgtggtcaggcttcatatacatgtcttccccaagcaaacaatcaatatgaagagtggtgcagcagtcttcgcaagaatagaaccctttctgttcttctttcgcatacatcacaccactctgaatgatcatttgccccttccgcttcataaaatgtgaggaaatgcttgtcatgttgatatcttgccttgtagggtaaggtagcacacttgaagcatatcacaaaatcacatgcaatgcaatttagttttctacaataataagactcatctagactttgttggcagatttgacacatcgctgacctttcttcttctggattcaaagctaggtataagggatggtcatgacctagatattcaaatggttcagaaaccgaggcacatcgtaaatctagtcgaaacctggaaccaccattctctcctccaaaattttcataaacgaaaccacaactctcacgttgacaagcatcacaagaaaaatatcctccgttgtcttcattttcacaagttacgacctttagcgtaagtggatatggattcaatgcatgatatttcttgcaaggtgcatttgcacatgcttcgtgtatgctgaagtcacattcatccatacatgaataatagctaccctcgtagatcggaagggtgcacgcttgacaaaccttcttttcgtcgtagactctactaatctcgagtttcagatggtggtgatgtgatcatggaaagcacaaaggatttggaatttgatcaagagctcgtagccgaggaagagcttgaagcagaggagcagcttgaaccggaggagcattttgaagcagaaagtgtacttatagcgatgaaagagtatgtgaaagatgttatcttaacctcattggttttgatacatgatcatcaaatgggcatgtgtctcatttgtactctttttcccttgtcaagttttgtcccaatgggtttcttcacaaggtttttaatgaggcaaatgattcacattcaaatcacccatttgatgatccaaaccatggtataacattcagaagttggcccaatggaatatatatgaagtccagccaattttatgaccatcacaaacccaagaagaacccaaaccaagtgggtaatttgctggtcgagagaagtgacgaaaatagcatttcaagagtcattttggagccaagaagtggaagggttatttttaaactttcaactagtctttatttctttttattttccaaggtagtcttgtgagtgtgttccaagacttccttcttctttataaactccttgtaatctcttgtgagaactcatctatctttttatcaaaaactctctcttaaaatagatcatggatccattttcgtatgtcgaatttttatctttctcgacttatcaaaaggcttttccgcatccttttgtggcgtcattcaatccatcatctcgtctttgagtcgtgtttcgtctctattttgagaatatccaatccagatcttccaagtgccgaaattgggattgattcctcaccaggatcatatcatgaggtcaaatccttttcaagtgggagaggatgatgtgatcatggaaagcacaaaggacttggaatttgatcaagagctcgtagccgaggaagagcttgaagcagaggagcagcttgaacctgaggagcattttgaagcagaaaatgtacttatagcggagaaagagtatgtgaaagatgttatcttaacctcattggttttgatacatgatcatcaaatgggcatgtgtctcatttgtactctttttcccttgtcaagttttgtcccaatgggtttcttcacaaggtttttaatgaggcaaatgattcacattcaaatcacccatttgatgatccaaaccatggtataacattcagaagttggcccaatggaatacatatgaagtccaaccaattttatgaccatcacaagcccaaaaagagcccaaactaggtgggtaatttgctggtcaagaggagtgacgaaaatagcatttcaagagtcattttggagccaagaagtagaagggttatttttaaactttcaaactagtctttatttctttttattttccaaggtagtcttgtgagtgtgttccaagacttccttctcctttataaactccttgtaatctcttatgagaactcctctatctttttatcaaaaactctctcttaaaatagatcatggatccattttcgtatgtcgaattttgatctttctcgacttatcaaaaggcttttccacatccttttgtggcgtcattcaatccatcatctcgtctttgagtcgtgtgtcgtctctatttcgagaatatccactacagatcttccaagtgccgaaattgggattaattcctcatcaggatcatatcatgtgaatttttttttattttttttttgtgatggtcataaaatttgttggacttcatatatattctattgggccaacttctgaatgttataccatggtttggatcatcaaatgggtgatttgaatgtgaatcatttgcctcattaaaaaccttgtcaagaaaacccattgggacaaaacttgacaagggaaacagagtacaaatgagacacatgcccatttgatgatcatgtatcaaaaccaatgaggttaagataacatctttcacatactctttcatcgctataagtacattttctgtttcaaaatgctcctcaggttcaagctgctcctctgctttaagctcttcctcggctacgagctcttgatcaaattccaagtcctttgtgatttccatgatcacatcatcctctcccacttgaaaaggatttgacctcaaatccagttcacctacaatgaaaagaaccaagtaagaattattgaaattggaactcacattatacttaccttgtagctcaagttcataagcatttttgctttttcttcttgttcggttggatggataatcgatctttggcatcaaaacaactccaattccagtccttttaaagagattggaggagagaaattctaagtttggtggctcctcgtttacacctacaatgttgtcaacacctttggcaaaaagcaagtgcgttatcatagtcatgaaatcactataaacaagtaaacatggctcagctttaatcaatgcatcattcttgaaatgttcatgttttacttttatcctaagacaagagtttgattccaaatattctttagataaatctaactctttctcaatgtttcctaaatatgataaactcatagtaacaattattgaaacatgagaaacaaatcgagttaaagagttacttacctgagtaaggttcacaatgtgttcggtgcttggtatcatcatgactaatggaagtggcgttggatccgggagttctttttggatcaaggcattgttggtgaccaactcctcctctctagagctatctaacaactctccttgtcgccactgataagtatgaaaagtactaaatgaagaaatatccatttcaggctcctctatgcattcttccatgtgctttagccgaagttgattttgataatcttcacgaggatctcttgattgactcatatgatgagtgtttatctcctaatcattagtcttcttgattggcctcgaaagtgtacaaccttcaccaagagaaagcaaattagctttaattcgtttttgggagtttagataattacctcgagttttaaatggtggtgtagcatctggtggtttatccttgaaaaaatattgcattcagctctaggtgattgtttgtggaccatgacagcctcaacttgagtgaatcctcctaattcatgtggttcttctttaggtaactctcggtttagaactggttgggatacatatggcggtcctttcttgttcaagatggtgatttttgaaacatagtcagctcgacaagcttgtgaagtggttgacaccaaatgatgagtctcctcttttgtgcttccttcagttttgtcattctcatgctccatagtatgaccagaatcaacatcctttgacaagaacaagtgcatgacacaagaactagaattttttaaaccttgactaactacttcactacttgagtttggtgagctcagtttcgattctaatgaagtattagttagctcaagtttttcagggcaagttgcaactaaatgtcctttcttacgacagttataacaagtgactcccctggattttgaaagattagaagacttacattgcttttgttcaccgcttgattcaagtaatggttgtcggctttgcttgtgaactacaacttcttcggtgaccatctttggttgagatgttgacttagctttcttgggtttgttgtaagcattgagaatcttcagaatttcatccttcaattgttgttctgctatgggtagtgatgttaacttggccacgaaatacctatttaataaatgggtatgtccaaaaaaattaacccatttaaacccatttagaaaaaaatattatgtttatgtttcattcaagcccatttatgtttcattttatattagttatttttattaaaatgtagataacttaattataactaaaataaagagcaaaatattaaataaatttaaaacaaaatgtaaaatcacgttttcccgccaaactcgtaaaatcacgttttcccgccaaaccgtaaaatcacgtttttccgccaaaaccgtaaaatcacgttttcccgccaaaaccgtaaaatcacgttttcccgccaaaaccgtaaaatcactttttcccgccaaaatcataaaaagtattttccgccaaaaccgtaaacaacatttctccgtaaaaccgtaaaatcacgttttcttaccaaaatcaaaaaaattatttttcgccaaatttgaaaatattattattattatatattattgaaatctatgttttagtgaattataaatatttcagatttagctaatgtttatgggctgttattatttatctaattaagtttatgaattaattaataaaaggcaatatctcacttaattgatttaaatgggttcacatgggtttactaaatttaaatgggcagggttaaatggggttcaaatataaatgagtttatatgggtttgaagttaaatgggatgggtttaaatggggtgggtttaattggggtgggttagcccatattaacatcactagctatggggtttttcttcgaatatggggctaagacttctttcttttcttgaactgctaacccttggattttgggattgccttttggagtgcattttagtgcttgtagagcatacttattccttagcagtttcttaagatctctccacaaagtgataggtggctccttataatataagcgatcatcaacttctagcaaccaccatttgtaagcatctcccgtgaggtggctaagtgcacaaacaaatctcatctcactcaagaagtttttgtagggaaaccactcgtccatgtttttctcccactctaggtaatcttcttttcctgaaaatttaaaaagtgcattagtcggtttataatcagaatgaaacacagatttggatttgggagtgtgaggaattttctgtgggctgctctgtgttgatctcagtaagttgtccggtggcttagacttaagcttttgttccttcctttttcgttctctgtgatgcccttgacgaatttgatctaagtggttgtcgaaaatttgctccatttcagtggtaagagcttcaattagacgcttgttgcagttgtggcttgatctctcctcagttgttgacattgcgacctgagaaacaaagcacaaatacaccagtaacaagttctttttataatagaaaggattcaacacaacaaacacaaaatgacgcttcaacttacacaaaactctcgtagaaccctaatcacgactgtttgacttaatcggacgctacaaaattatccaatcgtttccaaaaattctagaaacaattttacaaaatactagactctttttcgaacccttgacaattgatttcacagttttagcacacaccaaataattatgaaaattaaaacaagatgacagacagaaacgactcaatctccaagtgtgctctgataccacatgatatgatcctggtaggaattaatcccaatttcggcacttggaagatttgtagtggatattctcgaaatagagacgacacacaactcaaagacgagatgatggattgaatgacgccaaaaaaggatgcggaaaagcctttcgataagtcgagaaagatcaaaattcgacatacgaaaatggatccatgatctattttaagagagagtttttgataaaaagatagatgagttctcataagagattacaaggagtttataaagaagaaggaagtcttggaacacactcacaagactaccttggaaaataaaaagaaataaagactagtttgaaagtttaaaaataacccttccacttcttggctccaaaatgactcttgaaatgctattttcgtcactcctcttgaccagcaaattacccacttggtttgggctcttcttgggcttgtgatggtcataaaattggctggacttcatatatattccatgggaaaaatgtcatttaatcccccaacttttaaaaaatggccattttatacatcaacttcgtatgtggccgtttaaaacatgaactaaatgtagactaatttttaaaacatgatctttcgttgaccaggcaaaaatagacatgccgttatcagtcattaacggaacttctaacgtccgttatcatccgttaactttattagtcaagtttcaaattgtggccattttaaacaccaacttcttatgtggccatttaaaacatgaactaaacgttgactaccatttaagacatgaaaaattcgttgaccaggccaaaatagacatgtctttatcagtagaacttagaaacccgttaatgactgttaatctgtccaaaacaacgtcgtttgagaataatcgaaagaacataaagatttttcccatatgaaatctccatatcaaaaagttttaagcagaacccaagaacatagtttgatatagagataatcgcagtgccagtaattggaagcaaataaaggtgttttcgtttatatatttgttttaaattttaaaaggaatcatggaagcaaattgaagactcattataagattgttcgtcttgtttgagcggttgtagaaatagatttggggaattgaggttccatttagaaaaaaatcctgattttcttttgattattctcaaaacaaagtcgttttagggatactaatagagtcgttaacaagtgataatgaatgttataagttcttttaatgaatgatgacaacatgtttattttggcttggtcaacgaatttctcatgttttaaatggtagtcaacgcttagttcatgtttaaaatggccacatataaagtcgatgtttaaaatggccacaatttaaaacttgactaataaagtcgtaacggatgataacagacgttagaagttccgttaatgactgataacggcatatctattttggcctggtcaacgaataatcatgttttaaaagttagtcaacgtttagttcatgttttaaacggccgcatacgaagttgatgtataaaatgaccattttttgaaagttgggagattaattgacatttttccctatattccattgggccaacttctgaatgttataccatggtttggatcatcaaatgggtgatttgaatgtgaatcatttgcctcattaaaaaccttgtcaagaaaacccattgagagaaaacttgacaagggaaaaagagtacaaatgagacacatgcccatttgatgatcatgtatcaaaaccaatgaggttaagataacatcttttacatactctttctcactacaagaaaataggcgacttgcgacggaagatttcgttggaaatccctcgcaaatcgttaatcgcgagagatttgcgaggaacaccagttcctcgcaaaacgcgtctcgcaaacggttaacagtagtaattccctcgcaaattttgcgacgaacaaaatctctcgcaaactaattgcaatttgctcgcaaaacgcgtctcgcaaatggttaatagtagtaattccctcgcaaattttgcgactaacaaaatctctcgcaaactaattgcaatttgcgagggacaacaacggtagcaatttaaacaggtgtcgcatttccctcgcaaactttgcgacggacttgcgatattttttaactttagtagcaaatccctagtaacttttgcgacgaatttgtgaattatttgcatcacactgagtttactaattagcgtaattactgttttgtttagctaatagatttagattaaacctttaaatttgatattaaacttagattatttgaaaactaattgaaattgaaaatgaaacttgaattgaaattgaaagcataattgtttttacaaactgaattaaagatccaagtattcaacacataattaaacaaaccaaaaaagtctatgtttcttgacccaaagtaatgcaagttataatcttagaaagcttgagatggagaggatgatcatgtggctccgactgcctcatctctgatcccagcagatggagcagctgcggtattgggctcctccggtatcggattggagctggtcggctcagtccttgtagaggttctggctcgaaagagggcagcgaactctggatccttatcggcaagataatcgaagtagacgtcaaagctagtgatcttctcagcttgggttgcaatagtagcttcagcgacagccagctttcgagagagaacaaccgggtcttccccaggcagcactggaccagcatgagctgaggaggcttctatctgcaatgaaccagccccataaaccctgcctttcttttttggagcaacctgtaacaaactcaaaaccaaaaacacaacaaatcataacaggttcacattcactatgatataatgcaagccataattgccaaatactaaggaaaacaaaatcacgaacacaatgacataatcataatcgtttcatattcagtatatcataatgcaagccacaacaaacactgaaaaagacaatggcatgaactagctacccaagccatacgacaatgacaaagacaaggacatgaacaaacgatgacataacagtttcatattcactatgatttattgcaagccacaatagaaaatactaaggaagacaaaatcacaaacacaatgacataatcataaccgtttcatattcaatatatcataatgcaagccacaagagacatacactaaaaaagacaatgataagaactatctactcaagccatctgacaatgacaaagacaagatcatgaacagacaatgacataatccaagccagccaaaactatattgaagtgaaagacaaatgactgaacacaatgaaatgttgcaagccatccaaaacataatgcaagtaacccaaaacacaatgacaaaacaaaaattttacctgagcataaatcttgttcttagccttaatagataacccccagaagctgtgctctccgtagtgtcccctgaacacagctgagactcctcctctcgaatcctcgaagaaacttctttgtaaacctcctcagactttctatcaatgaaagtcccatcagattttctatgtgtctcatctaagagcacaagaaaatctggacaagtctctccagtcatctcacactacaacagaaaaaaaatatggttagttgtttgttcaacaatgtaaataaagtaaaggtgcgtaggtacttacacgtttgcgagcacgggctttgtaagaagtatggccagagcgatgtttatgtatcccgaggccatccggttcatggtatcttgcatttctactgttgatactctttaattccgacttaggatccttccaaaacttaacaagacctgcccacacatctggatcaatgcactttggtttggcctcatctcccttttccctccactttcccttccaccgacagacttgatcagacatcctatccttcagctttgcttcaaactcattccgcactctctcatttattgcagcgtcccagttatacacttgctacaaaaaaaacaagacacatcataaataaacaattccaacagctttacaaaataaaacacaacttgaaaagacttacagcaaatgtctcaaaccagcgtttgatcactggtgctggtgtctgtgtccaattagcgtgaggctctttgaaatctctttcaaaaatgctccggacagtggctactactaatgtgtcatcgtcaaacctacaaaacaagattccatcagacagagacaagtgacttatcattatgtaaattaacttagaatgcaaaacaagtgacttatacttaccagaaagttcccggaggacggttaggatctaatctaggcaaagatgcacgcccaggactttcaagcaactcttctagtgtcttgtcgttgagcctggcagttagaggattcgaatgattgactgaaggttgaggcgaatgattttgcggttgaggagcagaaccatccggatgattagagttcagattggttggcatctgttgtgcagaggaacgacgagtaccattaacagctgaggtgttcccttcacttacactcgtgtgcggactctgttgctgctgagacagatacctcgtataatcgttcccagagaagctcatcttgcaaataaaaataacacattagtaaagagacaatcaaactcaaattatgaaaccctaataagatctaaagagaaaatcaaacattaaaatgaaactctattataaaagaatcacaattagtcgagatatcctgtgggattaaactaaaaattttgcataaccaacaaaatataaagttgtctaatgctacacacatgctcatcatctcattttgttaaacgaaaccctaatcaaatgaaacataacaaatcgattgagtaaacgaaaccctaatcaaatgaaacataacaaatcgattgagtaaacgaaaccctaattaaatgaaacataacaaatcgattgagtaaacgaaaccctaatcaaatgaaacataacaaatcgattgagtaaacgaaacccaaatcaaatgaaacagaacaaattgaataagtaaaagtaaaccttactaagatctagagaaaatcgataaggtttcaaatagaaacatttctttaccttgcagatcgatgtgagaggagaggcggcaaagaagaccgagttgtcgccggagaagaagaacagagacggaagagactcgatttcaaacctccgaaattagggtttcctggtcagcggcggctatctggatctcctcgcagaggatgtggcacgacggagaagaagaatggagaagaagaacggagaagaacaaaggagaagaagaacggagaagaagatccggagaagaagaacagagaagaagaaaattttagggtttcggtgtgtgcggctaggtttgagcgcagctcaaacacggttgcagtgtatatatatatttaaaaagcctcgcaagtccctcgcaaactttgctacggacttgcgaggaaacgacttattagggttttcaacttatttgcgagggatttgcgtctttcacgtaagtccctcgcaaattgctagggatttgcgaggtcaatagcaactcgtcgcaaagtattcaaaaaacaaaaattaattaaaatatccaaaaacttcagatatttaaaatgagaaatttattaggaatttataagttttgaaattacaaaatctttaaaattagaaaattggaagtatatattaatcattttctgaattatttattcatttatttattatatttagtaaaaacatcaaaagtaaacaatatagtaacatttattcttattcattttttgaatcattactatcattttctgactcaacgctttcagcagatttgctgaattcgtcttattgtttttcttcttcggaaccgtctgtgatgtcttctaattgtctattttgtaggtcaatgtggataacatcttctgttgttatgtctggtatggaaacttctctgagactttcttgttacatcacaacatcatcaactaggccgactatacggcctctgggattaactttaataaccgataaccacacttcacgcctaggcctcacacgcgggtaagatagaaagcttacttgccctgcttgtgatgctaggataaatggtttgaattttgcataagtcttgtttgcattgacatcgaccacgaatgattttgcggttgtgatcttagatcttggttcttgaacgatctcatgcaaccaaagtggtaaaagttcattttcacatccgttagtaacctacataaagtagattttaattaagtttatcatttcaacataagtcattaagatatcaaaatttccaaatattacttacatataattttaaccatccagcgaaattacgatctttgtaagtttcgtcgcaaaaattcccacagaacaatatttgtacttgcaagtccctcgcaatttgcaatgactttgcgaggaattttgtcgtcctcgcaagtttctcgcaaatttcacgcaatattgtgaggaaattatccctcgcaaactttgcgatcggaaaagcgacgtgtctactctccctcgcaaatgtctcacaaatctgtagcaatttgcgaggtattttttccatcgcaaatcgcttgttttcttgtagtgtctccgctataagtacattttctgcttcaaaatgctcctcaggttcaagctgctcctcttcttcaagctctttctcgtctacgagctcttgatcaaatcccaagtcctttgtgctttccatgatcacatcatgtggccatgagaaaatggactattattccatctgatatcgttagaaatggctcaacaacaatctcaggttcttcaggtactccctcgagttctatcccatcccataagtctctccgcaacacgcatcttgaatgaccaaaatactttgattattattttccattgtcggcctgctagtctttttttattgattatttttctatagcatctatctattattttcaaagtttgaaagagattagtggttagtggtaagatattgaacaaaccaattaggtaaacaaaaaaaaaaaaaaaaaaaaaaaaaaactagataatcatgattaatagtattaaaaaaaagttattttcaccgtgatcaccgtcctgagtttttctttcaagtattggcagagtgggctgggccttccaatgtttagccattaaggcaaattcatacgaaaatgccctttaactttgtaacgatgtagagtgcgtacacacaacttagttaggagtgaatagatgtacagtgtttagttgtaaacaaaaacgaaaatcccaaaaaaacaaaaatctgagttcatgtgtaattgaaaacgaaaaaaacgaaagtgaatgtgtcatcgaagaagataaacgagattccggtgagaaagcaagtgttcttccgaagtaattgacttaaccactggacaattaaacaaaactcaaattctttatctttttgaactaaaaatatgctagatgtacaatatttagatgtaataagcattcaaaacgtaaatccaaaaaaatcaagatttctgagataattgttaacaagagactgcaaaattagggttaaagagattgaagacgagtcaaaaattataattatacccttcattaaaaaatttaagtgtacgtatttataatttacaatgtacgtatatgtggacatgtaaatatgtaagattatattttattgtaaaagcggcatacacaattatttattgagtttgtacattagaaatctttggttatttcgattagatggaatatatttttggaggttttcctataaaatctatgcatatataataactaaataaaaatatatggtcaatgtatatttgttcctcatactttctgttcgtcatcaccaccctctttctgttcatcctctttatcgtcctcgacttcttcttcctcatctacttcttcattgttttcaaatacatttggtacctcaaatatggtttttattgtgttttcaccttaacccatggttagtttcatcaagaaggtcccacatcattaacataatattcacactgtatttattggattggacaaaatgacacagaaatgtttacacttagatccctactatgaataaaaaaaatgttcgcattgatgttgtttagatgagaacctatcaacactggaggatcaagtacttggtatgctgcagtaaaattatatctggttctgttaaagagaattatggtctttttacgaatcttcgtaatgtttggtatctacgatagtgcatacggcgagttagccaaatgttatgtagttagtacgatatatgtgatactttttgttttgatgctgttatttctatttaattgttattttgaaattttttagtaagtgttatgttatatgatattatttgtggagaatagataagattttaaattaaacacgtagacgtacacgataatcttgagatacacgtacacgtgtacgactgctccaaacagttacatcctaaaaatacctaaatcacataaatcttatattatgtacgtacataaaaatatttgttgaagcgtacatgacaccacattaaaatgagtataaaaaatttctaacaattgtctacgaggatagatagacagaggatgagaattccgtacacattcattacaattatacccttcattaaatttcttatgtgtatgtatatgcaatttacggtgtacatatatgtggacatgtaaatatgttagattatgttttattaaaggcgacatacacaatatttattgagtttatacattagaaacatttgattattttttggtttttttttcataaatctatttatatataataattaaataaaaatatattgttaaagtatagttgttctcatacttttgaaaaatgttatgtacgtatagggatgtcaaaatgggtaacccaactcaactcaactcataatcaaatgagtttagggttaaatgagttatgggttgacccaacccatttaacaaaatgggttgggtcaacccataactcatttaatttgatgggctgagttgttaaatgggttaacccatttaagtaataatttgtaacgcccgtgaaccggaaaatcggttagggtttgtttttaaatcatccggtttaattggttgggttaattggaaaccctaaagtgtgcctataaaataaggaaactcgaaattagggctttagttagccacttttcgttttataaaggagaaaaagagagaaaaggagaaggagcagaatcgttagggtttgggagaaatcagtttcgtcatataaaatcgtggtaaaaggtaacgaaatttggtagaggtattcccaagtcctttatcgttattctccagtttacagaattgaatttggattaaacttggttgagttattcgcagtttcgtgagacacgttttctcatacgcgaattaggaacagcgaagattgaaactgagatcgtggtctcgtctgttttccgatcggcacgagattttgtgggcagctttctgacgtctgcagctaggatttcaccggagcgattgaatagttaacggttagcttgtattgtaggtttcgtctttgagacggtttgtttctggttttcctgtccagtttgcttcaaggttgcttttggttgtggacttgttgcaggacgtttctggactgtttcagacgcaaggagagtctctcctgggtttaattgctattagaatcaatttgttaaggtgagtgcgtgaccatgagcttatctgagcgattgggttgtgtgatttgttttgtgtgatgatatgtaggtatggtgaatgtgttttgggtgaattgttcaatgactggtttgtttgtattgtattcgtgattatacctttttatttgcttgtgtgtatagctcgtagatgggaggatcgtctcactaagtatttatgataatacttactcatctcattgtgttgttgatgcaggtaaagataaagtgtgattgtgaaatcatggcaaggaaaagaggatgatctaggaactcgtttgttttatgtttggtgtttttggttattggaacctggttaggattatcagttattcttggttttgttgatcgaattatttatttattcataaaatagtatttatgacttgtaatttaattattatgttattggttggtttagttagatatttatgggaatatttaattatatttttttttaaaaaaatgggtcaggttgtttcaatttggtatcagagcgattacggttataggatgtgtagaaaaattaattgatgaattattttcctgttgattgatgtgggatgagctagggtgttagcatattgaggattgattatggagtgtttagtcaattgtgtgttgttggagtcctagcatcatcttctccgagccttaaatgagattccacggtaagttgtttgtgatatattcgtttgttttagtttcttagccatttgttcttgagtagcgcagatggttagaggagctggagttcgtggtcgtggtcgtggtcgtggtcgcggtaggggacgagtcctcgagggtaccggcgagagtgatggccacagtgccacagttgagcagagtgtgggttcgcagcctgagtttgtggagcccggagttaggaacggtcttggtgccgttatagctggtgcagccggagtgggggctggtggaactggtgtcggtaccggtgtgtatgccgttggtgctgagggcccaagagtgatgggtgccgcagccgtaggagcccaggttccagaggttggtttggcgggcctgttgaggcagttgttggagcggttaccaggtgtggtaccaatggaggctccagttgcgccacgagtggcggaggtgcagcagcgggctgcggttgctgaggaggttccatcttatttgaggatgatggagcagttgcagaggattggcaccgggtgtttttctggtggtactattcctgaggaggccgacagttggaggtcgcgggttgagcggaacttcggttcgagcagatgcccggcgaagtattgggtagatctagcagtgcattttctagagggtgatgcacatttgtggtggcggagtgtgactgccaggaggaggcaggcggatatgtcttgggcagatttcgtggctgagtttaatgccaagtactttccgcaggaggcgctcgaccgtatggaggcgcgttttcttgagctgacacagggtgagcggtcggttcgggagtatgaccgggagtttaaccgactcttagtgtatgcgggtcggggcatggaggatgaccaggcccagatgaggaggttcttgaggggacttcgaccggatttgagggtgcggtgtagagtgtcgtagtacgccacgaaggcggcactggtggagacggctgctgaggtagaggaggaccttcagaggcaggaggtgggagtgagcccagcggtacaaccgaagaagactcagcagcaggtggcacctagcaagggcagcaagcctgcgcaggggcagaagaggaagtgggatcatccttccagagctggacagggtggtcgtgcaggatgtttttcttgtgggagccgtcaaggttgctggatggcagtttctagcggttctggggagagcgaagggtgtggatattcagattgtaggggcgtcaatgccagcagatttgattatcagccctgtagagttgtatgatgttgttcttggaatggattggttggatcattacagagtacatcttgactgccaccgtgggagagtttcttttgagcggccagagggaaggttggtttatcagggagtgagcccaacctcagggagtctcgtcatctcagcaatgcaggcagagaaaatgatcgagaagggatgcgaggcttacctggtgacgatatctatgccggagtctgtggggcaggtagcagtgagcgacattcgggttattcaggagttcgaggatgtgtttcaatcgttgcagggattaccaccatcacggtctaatcctttctcgattgagttggaaccagggacagcgccgttgtctaaggcaccctacaggatggctccagcagagatggcaaagctaaagaagcagatagaggatttgttgggtaagggattcattcgtcctagtacttcaccttggggagcgccggtgttatttgtgaagaagaaggacgggagtttccgcttatgtattgactaccggggtttgaaccgggtcactgtgaagaacaagtaccctttgccaaggatcgatgagttgttggatcagttgaggggtgctacttgtttctcccaaatcgatttgacgtcgggttatcaccagatcccgatagcggaggcagatattcgcaagactactttcaggacgagatatggacattttgagttcgtggtgatgcctttcgggttgactaatgcacctgcagcgttcatgaggttgatgaacagcgtgttccaggagtttttggatgagtttgtgatcatctttattgatgacattctggtgtattctaagagtcctgaggagcatgaggaacatctaaggagagtaatggagaagctgcgggagcagaagttgttcgctaagttgagtaagtgcagtttttggcagagaaagatgggttttctgggtcacattgtttctgcagagggagtttcagtggatccagagaagattgaggctatcagagattggcctagaccgacgaatgccactgagatcaggagttttcttgggttggcagggtattacaggagattcgtcaaggggtttgcgagtatggcacaaccgatgactaagctgacagggaaggatgttccttttctgtggtcaccggagtgcgaggagggtttcgtgagcctgaaggagatgttgacgagtacaccagtgttagcattgccagagcatggagagccttacatggtgtatactgatgcctcgggagttggtttgggttgtgttctaatgtagcgtgggaaggtcattgcctatgcatcacggcagttgaggaagcatgagggcaactatcctactcacgatttagagatggctgcagtaatctttgccttgaaaaatttggaggtcttatctttatggcgggaaagtgcaggtgttcacggatcataagagtttgaagtatatcttcactcagccagagctgaacctgaggcagaggcgatggatggagttggtggctgattatgatctggagatagcttaccatcttggtaaggctaatgtggttgtagacgcgttgagccgtaagcgcgtgggcacgactccagggcagagtgttgaggccttggtgagtgagattggtgctttgaggttgtgtgctgtggcacgagagccattgggattggaagctgtggatcgagcaaatcttctgattagagttctgttggctcaggagaaggatgaggggttgattgcggctctaaggcagagggctctgagtatcagtttgcacctaatgggactacccttgtgcatgggcgagtttgtgtgcctaaggatgaggagttgtgacgggagatcttgagtgaggcacatgcgagcatgttttccattcatccaggagcgactaatatgtaccgagacctcaagcggtactatcagtgggtcgggatgaagagggatgtagctaattgggttgcagaatgcgatgtttgccagttagttaaggctgagcatcaggtgccaggtgacatgttgcagagtttacccattcctgagtggaagtgggattttatcacaatggattttgtggttgggttgcctgtgtcgcgaaccaaagatgctatttgggtgatcgtggaccgtctgactaagtcagcacattttctggccatcagaaaaaccgatagagcggcggtgttggctaagaaatatgtgagcgagatcgtgaagttgcatggagtacctgtgagtattgtgtcagacagggattccaagtttacttctgcattttggagagcctttcaggcagagatgggtattaaggtgcagatgagcacgacttatcatccacagacagatggacaatatgagaggactattcagacgcttgaggatatgttgtggatgtgtgtcttggactggggaggtcattgggcggatcacttgagtctggtagagtttgcttataacaatagctatcaggcgagtattgggatggctccttttgaagcgttgtacgggaggccatgcaggacaccgttatgctggacccaagtgggggagaggagcatatatggtgcagattatgttcagtgttgttgagtttttgagcttttgagttgttgttcttatttctcttttatttgtattttcgtttggagttgtaacgatcatgacagttgatgattaataagatgagtattttttttcttggatttgacttgagttgtcttatttaaaaatgtgttgtgcggtttccaaaaatggaaagtttcctagaaaggacttgtctatttttggaaagtttgagtaaacaacctaagagaaaggtgtgtttacgagatggccgggagttggtcataaggatgttctcgaggggatatgatggatggtgaggcatagaggtgtcttacgcgaatccatgagagagtttggagatatgctcggaagcatttagtattgttgctcgagggacatgagggtcccaacgactcgtgaggagtggggtatgctcctgaggtaccagtaactcgagggacatggtgtctttagagtacgaggggtatggtggcttcgggtgacgatccgagagcacgctttagggtgacgacccgagagtgagttttgtggtattattttctccaagtgtcgtaactcgatgactttgtggctgacagtgagccgacacaactcagggtttgactttgagtggggaagataatgtgtgatacccgagataccgtaggccgaggcctgagagtgacggtttatgctcgaagattgcagtctgagagtggagagtgagttgtgagcaacaatgactagtaaatcgtgagtatatcgactggatagagagacctagaggggctctggttggagggagtgcggactgtagtgatagttgtacggagtttctcggagtggaagggtgaaactagattcgaggacgaatctatgttagtggggagaattataacgcccgtgaaccggaaaatcggttaggatttgtttttaaatcatccggtttaattagttgggttaattggaaaccctaaactgtgcctataaaagaaggaaactcgaaattagggctttaattagccacttttcgttttataaaggagaaaaagagagaaaagaagaaggagcagaatcgttagggtttgggagaaatcagtttcgtcatatcaaatcgtggtaaaaggtaacgaaatttggtagagttattcccaagtcctttatcgttattttccagtttacagaattgaatttggattaaaattggttgagttattcgcagtttcgtgagacacgttttctcagacgcgaattaggaccagcgaagattgaaactgagatcgtggtctcgtctgttttccgatcggcacgagattttgtgggcaggtttgtgacgtctgcagctagaatttcaccggagcgattgaatagttaacggttagcttgtattttagggtttcgtctttgagacagtttgtttctggttttcctgtccagtttgcttcaatgttgtttttggttgtagacttgttgcaggacgtttctggactgtttcagacgcaaggagagtctctcctgggtttaattgctattagaatcaatttgttaagatgagtgcgtgactatgagcttatctgagcgattgtgttgtgtgatttgttttgtgtgatgatatgtaggtgtggtgaatgtgttttgggtgaattgttcaatgactggtttgtttgtattgtattcgtgattatacctttttatttgcttgtgtgtatagctcgtagatgggaggatcgcctcactaagtatttatgataatacttacgcatctcattgtgttgttgatgcagataaagataaagtgtgattgtggaatcatggcaaggaagagaggatgatctaggaactcgtttgttttatgtttggtgttttcggttattggaacccggttaggattgtcagttattcttggttttgttgatcaaattatttatttattcataaaatagtattcttgcagtttaattattatgttattggttggttttattagatatttatgggaatatttaattatattttttttttaaaaaagggtcagattgtttcataatttaattaattattattatgaaacaataataaataattatcattattaataattattaatttattatcatcaaacttaaaatatttacggattccacttttttacggatttacgtttttggcggaaaaattacgggtttacgtttttggcaggaaaatcacaggtttacaggtttacgtttttggcgagaaaatcacaggtttacaggttatacgtttctgcgggaaaatcacgggtttacgttttttggcggaaaaattacgggtttacatttttggcgggaaaatcacgggtttacgtttttggcggaaatattatgggtttacgtttttggcaggaaaatcacggttttacgtttttggcggaaaaatcacagattttggtttttggcgggaaaattatgggtttacgtttttggcgggaaaatcacgggtttatgtttttggcaggaaaatcacgggtttatgtttttggcggaaaatcacgggtttatattttttggtggaaaaattactcgtttacttattctcaatttcatcacttgtatatttaagaaatttggaaaatattgattttattaaattggtttagatgtgttggttaagcttaaattgacattggtttagagattttagttggtttaatttaattttacaaaacttgataggttaattgggtaaatcattgaaaccattaaccattacaacccaactcatttgactcatcaaaccaattgactcaataactcatttgacccatcaactcatttgagtcaaaaaatttaactcattagggttcatgggttgagttgagttgagttgacccatgaattttgacccattttgacacctctatgtacgtacatgtataataatgtacgtacatctttgttggtgagataaaattgttgagaacaaataaaattttaaactaaacccgtaaacgtacacgataatattgagatacacgtacacgtgtacgaccaccctaaacaattacgtcctaaaaatatcaaaatcacataaatctaatgttatgtacgtacacgaatatatttatcggaatatacatggtataacattaaaatgagtgtaaaaattctctaaccactgtctattaaaagattttagtttatttttttgacatctaaattaagttattatgtaagttatatgtatgtatgtatattttaatatagattatgcatatataatatttcaacgaatcatactctgattcaggtaaaactgatcttctaatactgaactgcacaccattatcattcatttcacatctaccatgtctgtatgtattcatgtacgtaaatattcacctttacataattcaccgggtacatagttagtagtgtacgtacatattctttgataaatgtattaatgtacgttaacattgattttataattgtaatttgggattcttaggttttaatgtatttttttggtgtaattagtacatggattgaatgtttttttttatattcaaaaattatttaaaacataaatatataaattattttaatatttatgtatatatatggacacaaattacaaccgtgtacgtacaaatgtgtacatgatattgttaagtacagaattatctttaatgtaaaaattaataaataaattattatttataataaaaatgaaaatatgaaagtgggtcttaaatgatagaaaaaaatcaattttaagaaaaaaataaatttttataacataaaaaagaaaaaaaaaactgtaaaaactaatgaactgtacactatacttccgtccgattataactaacgcgtccgtacgtacagttatgagcgacaaaggcattttcgtcagattttgcctcaatggttaattactgaaaggcccaatccactttgtcaagacctgaaattaaaacttggtcaaaggttactgtccataatttacccttaaaaaaatggttactggtaagatattgaaaccggaaaagtcaactaagcacattggatttagcgatcgttaagagccgttgagggcgactgtttcgaagtaacaaacgacagttttggctcgacattgtgaaccgtcggacatggagataactcatctaacggtaatttcttagccttttaccgagagccgtccaatctaaaagtattaatcacccagagcataaatggacccaaaaaggccttttaaaagttttttgagcataagccaattgaaaaataaaaatatcaacggatcactcaaattttgaaattaatcatctctctcctttttttaaacatacagagaatggattattcgaaaaccccagcgaaaacaaaaactgttgggttcgtcttcgatttctaatgtcagggtcgtccttcgagttcgtccttttcttccccgggagatttccgacgagagtggtgacggacgatcgtgcgtttccataatcgccggcgatgaaggagatatcagcgaagtggcggtttaccttaaagatccagatagctggtaatcatttttttgtttcacccttctttaattttgattcttgattactagaaatttgaatttggatttggtgattcggtgtaatttggtgcagtcgaaacgaaagctatcagctggatgcattttacgggagagatgatgaatttacagctgcagggaatcgtcggttcgacactaggttgtgtccgattttcttcttaactttaatttttaaaacgacgtcgttttgaactgttaacggaaagttgactccgttatttttctgttaacggaaatttcacggaatgccttaaatgaccaagtcaacgaaacttagacattttttaagaagtcaactcaaactttgagatttaaatgacatttcgaaagttcatgcttttttcgtcccaaatttgaaagttggcgcattttccgacatttttccccttttttaatactttttccaattttgtagaagccatccatcataattttgtttttctatatacttttttccaatttgcaactgtacaaaataattatcactccctaaaactttcttttctgatttttgttaaattttgttctttttctggcaaagttaaattgtaaatgtattaagttgatattgctaataccaacaatgttaacaaaaatgcccaaatttaggctattaaaagaaaaagcagatagaccaaaacacaagtatatcaatcctaaattatgattacactaaataactatttataatatttttcacctaaaataataacattatacatattaaaattttgaaatacctttttcatgtactattgtgtaagtaaagtaagaacttacaaagaatatcatacattaaagtcaaaaaactattattattgatatattttaactttataaaacattattaatatgatacttataaaaaattaaaataacatgagacgagttttataacgggacgggtttggattgatataatacgggttaaatctctatttattattttatcatcaccaatttttttacttacaacattaatataaattaattaactttaatactaaaatttaaaaaccataaaatttagtattattatatatgtgaaaaaacatttgccttgtggtataccacgagttaaatactagtattcattcgtagctatgaaaaatatacactttaccatatatatagttgtttttaaaagaaaattaaatattctatagtaaatagattgaaaatgtcgatgtcgtttcttttttctctttcatcattttaacctacacgacgacaattcagtttttatgacataaatgaccaaatcaattctcttaaacccttttgcattgttcacatgcaccaacatattttcaaaaattgatgtgttaggtataaagagcccaactaaacaaaagcaaaattgctctcttccagataatcaaattctttctacaaactcaataggatttatgttgatttgtaagttataatttactaagtgtacaagaaaaaaaagatttaaaatagaaaaaaagattaagaaaattatacgtagttattaatcatataccaaaaaggattgtaaatactaacctctatgtaaacaaatagattacctcataatttctcaccaaacaaattagtttctttagaaacaccatcattgctataacttcattatgtattagtaaaacctttccttttgttgggtcaaaaattatttttaggataatattagtaactaacctttgactgaaaaataatttttaaaaaaattactcatgagtcaaaaaagtttgaaactaaagtttttcccatatgtaaaaatttaaattatccctcatacagaagacaaatataagacgcgtattgtaattcggagaaaatacatgaaaaatataatgataacacaaaatctaaaaaaacaaaaattattaatgaatatttgactacgaaagagacaaccaaaaatataatttagtaaaaattataatatactaaaagaaatatgagtagcatgtgattgttgtggaggtggtgatggtgatggtggataaaacgaaggtggtgatatggtaattaaaaaaaatgaatcataaaataaaatgctaataaaaaaatatgtgtgatttactatttagaattcaaataacatcaataagatagaatgtgtagaattaaaatctaatttattataatgaattagatagtaaaagtatataacacaatggattgtgtaaaattacaatttattttaaaacaaaaatgactaaatattatgaaaagtgtatagattattatttcgtactcattaatataatttacaattatttcttactagtcaattagacccgtacttcgtatggaaaaataactttaaagattaaggtgtcaaaaattaaacatgacccaatattttacacataagtaactacgaagtatttagatacatttgaagaggaagaacaaaatgattctatgtaagaatgaatcatttggctaggtccttcctccgatccacattgacacatggatcaattttttcaagggtttgttacactataaggcactttaaacacaactttgtacaatatagacactttttaaagtataggcacttttccatctttttgaaagaaaattggacatttataccctcaaacttgccgagcgatcagttgttctgtaccaaacagttagaaaatcaaaatagttgagttatgtagttttaaatataggccattagatttaaaaaataaatattaaaatttatggttaagattagagaactacaatttttcttttgtagaggttgaattcaattttaactatgttacacagataaggatatgaagccacatttttcaaggacgtgtagtcgattgaatttttatatgaagcagaatggtagacttggagatctgagcttggagttgacataagaaaatttgtttctcaattttacgagcaattgattcatcttactagaaatcgatggaggaattgcttttgtccccgacgatcccagctgcgataactctttactaatttttatagtcgaattttgtaaaatttaggagttttacttactaattctacaagaaagagagacgtcaatccaaagtacattatccatgtttcattgaccatttatccacatgtatagagacagtcccatcagtatatagcatttagtcacaatttggtctgttccgtagctcttataaagaatgtatcgaagaccttgtttgcactaaactcttaagaagtaaattttattgatcttaacattagttcactacctaattggctatttctggacttccattcaaacattcagacattatacattatatagagaggatggaatatcaaagttcaaaacgaaggcttatcttcgttatagtaaactgataatctcttaaaggaacactcccattcactaaaacaccaaacacacaaacaaatatttcatcaccataccacaacttacaaagatatatcataaagttatcaatctcaacaaacctggataaatccaagttttagctgcctcatgatcaattccaactaaaggactattatcgttatcgttacaccactcggaaacaacttgatgattttttggtttatgttcggttctaccgatgaatttacgagagtagattgtcttttcgcaggtggcttagtgagatttgccgtaattggtggatgagcgtttgtggtttttcagacaagccatgtcgatttctttgactgctgcttcccaatcgaatacctgtaggagaaaatctagaagttgaataattaaaaaattgattcaaaaacgcagaaagagattgaacttacgccgtcttcttcgatattggaaccctagatcccacccaagttaacaccaaacacgtcgtatccatgatgatttgtccacactgcattctcatttcaagtataacacaataaaccaaaaccgatattatcttctattaaatgtataacattatatcctaaccaaaacctaataaatccaatcttgtgactcatatggttgattcataccaacacacaaaagttcatacatcaatgaatatcaccaatttcacgagtagcgcccatctttttgttgaccattagttcacttgtttgtagacactctaatcattatgtggattgatcattctagagtatatcgtggatgctgcaaatctcaaaaaatcattagccatgagagaccaaacaaacaagctcaaacttatgtcaaaacgatctagagtgcaaaatgtatcacaatcttaaggaaacctagaactttattatttcgatgcataagtttttaccgaagcgataatcaccaatttcacatacatcatccattttgctttgacaatttgctcacatgtatatggatactcttatcatcgttccttgataaatcttaccaaaactttttatacctcgatataacaataaacatataaagaaagtttgcgtctgaatggacagattcccttggatgacatcaataagtggtggttgagatcgttggtggggatgaatgtatgatggtcgtgaggatcaaaccaagcacgaatcatgggactaagaataaagttgttggctttggccaagcactcgctaaaacgaattcgtcgttgtgtcaaacaaatccttcagaatcccgacgactactgctccctactcgctgaattcaatgtgtcaaaccctaaaggattgctttgcccgtagaatagatcatgctcggaggcggaagcagaggtggtggtggagaagcgatggtggaccatccggaacgattgcagtgagagatgaagtgttgaaaattggacttttagttttgatttggaatattgagattcccgtaaaaaaattggttttgattttggaaagagagagaaatgaggacgatgtagaagagagttgagagagacgacgtcgtgcaatgtgattaaaaggacaatttaggaattttgatttggtaaagtgccttctattttcaaagtgcctaatcccgtaaatagttttctaaaagtgtctcatagtgtaataacctctttttcaaattcctttgttgttggcattccagattaaacaaaaaacagtcgaataatcaaataaacggatgggaatgtgacacgtttaggcatttttaaagaatattattccttttgaggcactttctagggaatagacactttttacactaattcctttttatttggacttttttaccctcaattcaaggaaacgtaattagaaataaaggaaatctctctctctctctctctctctctctctctctctctctctctctctctctctctctctctctctctctctctctctctctctctctctctctctctctctctccccttccatgatttgtagagcctctctctccatagtttctgggctcgattttattccgtctccatcgcttctgggctctattcctctttcgattatggcggcggctcaccagaaatcggtggtaccgattctgcaaacaaataagagaagcttcttaaacaattcgatctcgattatctcaggaatttggtaaaagttctatatccataaggtcttggaggcggaggtctttgcaaactgtaagaaaaatcaacaaacaattttttagtatccataataacaagtccatttaaatatatacattcggaaacctttttactgatccatatccattctatataacatgtccataataacatgagattcgattaaccatggtttgtaaagaaaccaaagttccatgtccataaggccttggaggtggaggtctctgcaaactgaaagaaaaattaacgaacaattttttggtatccataataatgagtccatttaaatatatccattcggaaacctttccactgatccatatccattctatatatcatgtccataataataggagtttccatttaccgtggtttgtaaagaaaccaaagttccatgtccataaggtcttgaaggtggaggtctctgcaaattgaaagaaatatcaacaaataattttttagtgtccataataacgaatccatttaaatatatccattcggatactcgatgctacgtagatgaaacgagttttacctatgagagagagcaaaaatcaaatcaagccgccattgttgaagaagaaaaagtttcttaaagaactgaatctcaaatttatgtcaaaacaaagatttaaattgcaaaataaatcacaatcttaaagaaaccaagggcttgtaccctccaattaagataatttcttctttggcttgagattgaaatcaaaaaccaaaaatcaaattaccagagccacccatttgctcaagacggtggaggagcccgtgatggagttggtggcggataccgcagtggaggcggtaatgaatacgaagatggtggcggaaatggaggacgcgatggtggttacgagagacatagcagaggttacagatctggtggaggttgtgctggaaaaggatacggtggtggtggtcgtgagggaggtggctaaggaggaggtgaaactggaagttacggaggaagcggagtggaggttggtaatcaaagatagtcttgtttattgtcaccgttagattgttgagagatagagaagatgatgataaaccctataagattcaaatttgaatttgaattttgaatattgaggttgtcctataatatttgattttgattctagaacaagagagagatgaagaagagaagttttcgtaagaaagatgacgaagaaaagaagaaatgttgctaaagagaaagagaaaataggtttgagggtaaattagacaatttaacaaggcaaagtgtctactcctttgaaaatgctcaaaacgacaaatatttttgtaaaagtgtccgacagtgtaatattctgtaaacggataccatgaatggactctttgccatgagtcaatcagttatttagcttattactaatgacgacttcgagaaagttacaaaacattatagtagaaatataagtttgcatgtggattttgtctatcctttaaaactaatattataaacatgtatcttgcaatcagtcaaaagataggcatttgaataacacacaaaagatgagattggagttattactccgttagtcgttaccttcatcaaatttaccaagtctctcttatgtggagcaaattatcatgttcccttgatgcgtcttgctagtctgggaagcaaacattcagtacgtacattatttgttagctttaattatatttctctgtcataaataaataagaaatatatatcacagaaacattctgattctaaattacacatatatcataattcaagtaccataatttactaatcaaaaaggatcatcattagaaaactactatgtaagtatttctgatgtagatgactattagcaatggtgtctctatatccttgtacggtcaaaagggaaatcgaatctaagaacactcaatcgtatataccaaaacaaaaccattgttataaaaaatactaattggcgtctaatccttgaaaatcccttttaaattcatatgtgagtaccttttcatggtatcagagcttatggaaaggagatccatggagctttacagtgctccgcaactcaacatttccaactgtgttacagtcactctcacgcagcaaaattacattctttggaagagtcggtttgaatcctttatttctggtcaaggcttgttaggatttatcactggatctcttttagcaccaactcctacgtttcctgttccggatatcaatggcgtcactactgagagaccaaattcggagtttgatgtttggttcaaaacagacaaggtggttaagtcttggcttcttgggtcttttgctgaggatatattgaatgttgttgttaactgtgtcactgctcatgaggtatggattactctcgccaaccactttaatagagcttcttcttctaggttgtttgaacttcaacgacgtttacaaactctagaaaagaaaaataagcctatgcaagtttatcttaaggaattagagactatttgtgatcagttagcttctgttggtagtgcggttccagagaaaatgaagatctttgctgctttgaatggttcaggtagagaatataaacctattaaaacaagtattgaaggttctattgatattccacctacacctaagcttgatgaaatcatatcgcgtctcactggttatgatgacagacttcagggttacgcaacaagttccgatgttagtctgcatcttgccttcaacacggttcaagcaaactctgtcttttactcgactcgtggtagaggacaaggaaatcgtggatctcgtgggtctcgtggttcaaactccttctcaactcaaggccgtggcttccatcaacaactctcttacaatggttcctccaactcttcttccaaacgccctacttgtcaaatctgtggcgagcgtggtcataatgctctcacctgttggcatcggtttaataatagctaccaacctgatgatctgccacaagctctaacggcgatgcaaatcacagacatcacggatcactcaggcagcgaatgggtcaccgacagtgccgccactgctcacataacaaattcaccacgccacctgcaacaaaccaagtcttatgctgggtctgattcagttatggttggtaatgggaactttctccctattactcacactggctcaacaagtcttgtctctacttcaggtaagcttcatcttaaggatgttttggtatgccctctcattactaaatcgttgctttctgtgtcaaaagttacaaaagattatccctacatttttgagtttgattgtgatgaagttcgtgtgcgtgataagggaaccaagaagcttcttcttcagggaagtaacagagatgggctgtatgtgttggataaaccaaagcttcaggtgttctactcttctcgtcaagttgcagcctcagatgaagtttggcacagacgattaggacatccaaattctcatgttctctagcagttatcttcttttaagtctattcatatgagtaaacatagtaaagctatttgtgaagcttgtcagtccggtaaaagctcaagactgtcattctctgcatcttcttttgttgcaactagaaccctagagagaattcactgtgatctctggggtccctctcctattatgtcagttcaaggattcagatattatgtcatatttattgataactactctagacactgttggttctatcctctcaagttaaagtctgatttctacttgatctttttaaagtttcaagctttggttcagaatcaactacaaagtaaaatctctatctttcaatgtgatggtgggggagaattcaccagcaagatcttcctcaaccatcttcaagaacatgggattcaacaatacatatcatgtccttatactcctcaacaaaatggacttgcagagaggaaacacaggcacattactgaactggtctctctatgttatttcagagcaaagttcctcaaaggcattgggtagaagcatttcatactgcaaattttctcagtaatctgcttcctcatactgctttggacaatgctaagagtccctatgagctactttacaagaataaaccagattatcaagccttaagaacctttggatgtgcttgctttcctactctcagagattatgctcaacaaaagtttgatccaaaatccttgaagtgtgtttttctgggttacaatgagaagtataaagactatagctgtcttcttcccactacaggcagagttttcattagccgtcatgttatctttgatgaccagtccttcctttctcagacacctatcttcatctgcagcctagtggcgttacaccattattttcagtttagcaacaatgctttatgccacgatttgaagcttctcttaatccagtctctctgcaaaatgctgcaggtatgcagccttctcctgtgatcagtatcagaactaacaccactagtgtttctccatcgctgccaccaatgatgaactcatcagtgtcgtctactgttgccagtgaagagagttctgagtgtacgaagagctttgatctcttacctataggcacttcttcacttgacaacaggacggatcacactgacaactctcctgctcaaagctctgcagcttcctcaacgactctccgtgatgcttcagattcaccgagtattcttgcagattcaacgagtcttcctgctgtttctgtttcagcgagcattcatccaatgccagtgactacttcaactcaatccacttatccaatgatgacaagatccaagaaaggtataacaaagcctaatccctggtatggacttcttacacacaaagtaaaaaatgcagaaccaaagactgttactgaggctttaaaacatccggggtggactgttgctatgaatgaagagtatgacaactgcaaggaggcacaaacatggagcttggttccttatactcctgatatgaatgtgcttggaagtaaatgggtttttcgaacaaatttaaatgcagatggttcctttgataaggtcaaggcccgattggttgcaaaaggctttgatcaagaagagggtattgattatttagaaacctatagcctgtggtgaggtctgcaacagttcggatggtgttacatattgttacagtcatggaatgggaagtgaagcaaatggatgtaaagaatgctttcttgcatggggatctcacagagactgtttatatgcttcaacctgctggctttgtggacaagaacaatcccactaatgtctgtcatttacacaaagctttatgtgggcttaaacaagctcctcgtgcttggtttgacaaatttagcaattatctgcttgagtttggtttttgctgcagtattaaagatccttctctattcatttacatcaaagggaatgatcttatactcctacgtctctatgttgatgatatggtgttgacaggaaacaactcagcaacattggccaaacttctagaggatttgaacactcacttccgcatgaaagatctcgggcaaatgcactattttctgggtagacaagctcactttcatgagaatggcctctttctctctccgcaaaaatatgctgaagaccttctcactgttgcagctatggatgaatgctccccaatgcctactccactgccacttcaacttcataaggttcctcatcaagaagaactcttctctaatcccacttattttcgaagtcttgaaggaaaactgaaatatttgactttaacaagaccggatctttagttctctgtgaactttgtctgccaaaagatgcatcagcccacaggtttagattacaaccttctcaagagaattctccgttacgtcaagggcactctctcaatgggcattcacttctcgaagcactctgattttaagcttcgggcttacagtgaaaaggaatcagctgacagtgagtttcgtcttcgtgcttatagtgacagtgactagggtggttgcaaagagacacgtagttccacaggaggttattgcacgtttcttgggactaatctcatatcatggtcctctaagaaacaaccaactgtctctcgcagttcaacggaagcagaatatcgctccctttcagaaacagctcaagagatgacttggatttgtcatgttcttcgagaattaggcattcctcttcctgttacgcctgagctctatggtgataacctatcttcagtctacttaacagcgaatcctgccttccacgctcgaagtaagcactttgagtttgattaccattatgttcgagagagagttgctctaggctctttggttgtcaaacacattcccggtcatcaacagattgctgacatcttcaccaagtccttgccatatgaagctttttgcagtatgcggttcaaacttggtgtggattttccacccaaaccgcgtttgagggggagtatcaaaccgacttctcaaaacgataatattttgtctgctacaacgaatgggccaaaggtttgtgtaaccaaaacaaacgagttgggccgaaaaacacaggaacccatcaagtctaacaaagaaacgatgtcgtgcaatgttcaatgatcatctcctctacaaacagacaaaagaaacagagtcatgacgaaagctcgtacggaggagttacagcttttaaaccaattctcagccattatgggttagagacaatgggatgaagacatctggagagtttacttaggttttacaagttcatgtgttgtgtataaatactctatgtaagccgctgtaaacccttaagaaagagaatgaatgaaatttaagagttcaaggtttaagcttttcatacaagctattggcgtatctcttattttccaattttttttttttacgaagtatgaatataatccagtggcattggcatatttaacctgaatcatgtaaaatatgggaaaataattaatatgagataaagagaaagtgaaattaaagaaagagtagtcataaacttgaaacagcttctttgataaattctatgaatatgagataaaacaaaacgatggaaagggagagaaaactgattaaaaaaattgatttgattgagagttaaataggatcggagataaaacggtttgaaaacatgatatatttcattttgaacattgattagtaaatttaggatctaagaacagttttagacaaaatagaaggcagatatagatatcgaagaataatatttttattttagaactgttttttaacagatttttatttttatcaaaatcgataatatttttattttagaactgttttttaacagatttttatttttatcaaaatattgaaacaaaatctatgtggcaaatttttatggattaggtgatttgtgatttataagataaaggatatccgtctatttaggcgggtcttatcatttttttcttatggataaatattattatagaggtagcaaaccgtacatgggctaaaagccctacaaacattaagattacaggaaacattttttaagcccaacataagcttcaaagcattacttaatagagaataaatgatatgtggctctatccaacttcacatgtcaatagctctaaactgaacagctacacagtggatgaataatctaaagggttttgtcatcaacctccgccgtccaagtacgattccggtgagaaaatcatcgccgatattaaaatcgaagcttgatttttctggatttcaccgaatgaaaccaatcgaaactccatatagagaattaacagctaaagacaatctaaatatgcaacgaaaatttcttttttttttcaacttaaaacataaatctctggattgattcctgtaaatcaaaaattcaaaagatcgacccaggtaataataatctttaagacactaatcacataaaccgctattaccaactcataatttatgaaattattgaaaggaaagcaaaagtcaccggatacaccagagaagtatggcagaagataactagaattcggttaacgccgtttattaaacccgatgttaccgaacatgagccaaccatctccactaaagatcgctggagatgctagatgataaacccgactaaatggggaaagataagcaccaaaataacattcggactgtgcatcgaagggaaataaacttttactattgtctgaatttttctttttcccgacaaacgttattcattacttaaagagagtcattacaatgttgttgctcaagccaaataggtagagtatcagtgtcagaataaaagcatgcagaaatacaaccaaattttaaagagaaaaaagagagagaaagcatttgttattaaaaaagtgaatttgtttttaaaaaaatcaacacatatttaggctattgtttctagttatgattatcgccaaaattttcttttgttgggcttggtttgttttcaggcccaatagaaattaaaaaccatttcaaatttctactcttttcgtctcactgtcaccttctccgacggtcagacctcaaaaactcatcctccaaatttgatacctcttccctcacaatctccaacaatggctgacgataagaagaagcggaacaagaagaagaagcgtagtactggtaacaagaggaagatgaccactgagcaatcagaagcctttaagtcaatcaccgattggctcatcttaggttcttctccatctctctcctcttcctctgatgactttgccgtcaacatcaattctggttctctaagatgtggagagaaagttgtgtttgagcttcattctcattcaaatcgcagcgatgggtttctatcaccttcaaaggtcgtggagagggcttataacaatggggttagtttcaaattttatggtttgtgaatcaggagaagatctgaactgggttttgctttgctggtgaattatcttaagattagctattgctctgattagattgtgcatcacaacggtaacgccaattcgatgatgtttcgccacttaacactaagttcacttggtagagtttaactataaagattatagcgtggtacctctgttttagtgggtcaaagttcactgctttagtatagtttaaccataaagtttatatctttgtacctctgttttagtgggtcagagttcactgctttaggtagagttttaccataaagattatagctttgtacctctgttttagtaggtcgtcaaagttcactgctttaggtagagtataaccattgaggttatagatttggttgtttgtgtgattgtttcgtctgtaccattattaggagtagttcgtaggactgagagaaaggtttatcttttccatcaatttcgcttttgatatcacaatccggcatgggtttacagtggagctgttgatggcatgatgatatcagggatttgattgcttctcaatgtgatcaaagcaggtgaaagttctttctttaacggatcatgatactatggctggtgtcccggaagcagtggaagcaggacgtagattcggtatcaagatcattccgggtattgagatcagcacattattcggtttaaggtatcatctttatatttgttgtgattgcttgattcaaaatattcttacttgtttgtaatactttaactcagtcatgaatttctttgccgaaatccagagactccgggtctgaggagccagtgcatatacttgcgtattatggcacttccggtccagcattatatgatgagttggaagatttcttggtgaagataagagatgggcgtttcgttcgtgggagagaaatggtattgaaattgaataagctaaagatacctttaaaatgggagcatgttaccaggattgcaggcaaggatgttgccccgggtaggatgcatgtagcccgagcgcttcttgaagcaggctacgtggagaatttgagacaagctttcactaaatatttacatgatggtggacctgcttatgctacgtaagttctagttcttcactaggttacctgatttttttgaaccttgcgggatttaagcgtttatgattatcttatgctagtctagtgcttaccttaggtgggttgtagtggactttacctctgttgacagctcatcaactatattagagaaactagagagtagagatctaacatgctaaaagaaagtttagggaaaatgagtttggatattgtaggattggttttgcatattgctttgggcagtggttgatagttagagacttctattgctaatcagttttcttatttggtgtagttcgttggtacttgtttaaaacctgtcagtatcacactgacttttttctatgtgaatggttgcataaccttattgcagagggactgagcctatggccgaggaagcagtaaaacttatatgcaaaaccggtggtgtagctgtgcttgcacatccgtgggcgttgaagaatcatgtcggtattattaggagattgaaggatgctggacttcatggggtcgaggtttataggagcgacggcaagttagaaggtctctcactctctccctccctcgttccctctctatcagtctatctatctatttgagttcactgaattttaatgttgattgaacagtgtttagcgagttggctgatacatacaatctgctaaagctaggaggatcagattatcatggaaaaggcggacgcaatgaatcagaattggggagtgtaaaccttcccgtgacggcattgcaggacttcttgaacgttggacgtcctatatggtgtgaggccattaaagcaaccatgagagcattccttgaccaaccatcagattcaaacctctccaatatcttaaggttcgataaggcaaggattctgaaaggaaattcagcttggtcctgtggtaaggagttgatggaccgatgtttagcgatttggttgaccagtgatgagagaaacagcaatgactttgaggctctcagattgaagctctcttttgtaccaatcatgtcaaacggaacatgtgtcacagttggtccttaaatatttagtctggtctctttttatcactcacttcctaacaatatgctatttccacacgaattttagtaattaccaaatcccatggaagatcacttggatataagaaacaaaaatataagagatgcttgttttcacttttaacaaacataaaagttttaagttccaacaaaatagtacacatatcaagatatatagaagaatcaattatggatttgtcgttttattggatgacatttgtggattttactcttttttgaatagtttatggattttgcccttgctacaaaaatgtgatttaacatgcgttttattcgttatgtttgggtttagtcggttgtggttgttcttaggatttagtatttcgtatcaagtacgtatttttaccaaaaaaaatcctcaatacgtacatttttatgttttaaaaaatgacatccgtaagattttagtaaaaatggtaatttcaaaaatgggctatattaatatctatgctcagatgattgaaatattaagaaactatgcatgataagttaataattaatcctctctcttcatcgatataatttctcccaaaaatacccctataaaaccaaaataacaataacaggttataatatagttgcggaagcattacatgctgaagatatacttgaagaatataccccaccgacaatagaaacataaaagattttatccatcattgctaatatttatggggttgcaagtatatcgattatatacgttggtctatttatgagcactgtattctcttccctgcaacaacccaaaaactataagactaaataacttagcttccgacaactttaatgcaagagggagctaaacacacaggaaatcaaagctaaaaggtaaacgtaaaagttatgaattgtaacgcccgtgaaccggaaaatcggttagggtttgtatttaaatcgtcaggtttaatcggttgggttaattggaaaccctagagtgtgcctataaaagaagaaaactagaaattaggactttagttagccacttttcgttttataaaggagaaaaagagaaagaaggaaaagaaccagaatcgttagggtttgggagaaaacgttttcgacatatctaatcgttgtcaaaggtaatgcaatttggtagggttatttccaagtcttttatcgctattatccagtttacagaattggttttggattaaaattagttgagttattcgcagtttcgtgagatgcgttttctcagacacgaattaggtccagcggggattgtaactgcgatcgtagtctcatctgatttccgatcggcacgggtttttgtgggaagctttttgacgtctaaggctagcgattcaccggagggatttaatagttaacggttagtttgtattttagggtttcgtctttgagactggttgtttctgttttttatgtccagtttgcttcaaggttgcttttagttgtgacttgttgtaggacgtttctggactgttttagacgcaaggagagtctctcctgggtttaattgttgttagaatcaatttgttaaggtgagtgcgtgaccatgagcttatctgagcgattgggttgtatgttttgttttgtgtgatggtatgtaggtgtggtgaatgtattttgggtgaattgttcaatgactggtttgtttatgatgtatttgtgattatactcttttaattggttgtgtgtatagctcgtagatgggatgatcgcctcactaagtatttgtgataatacttacgcatctctttctttttggtgcaggtaaagataaagtgtgatcgtggaatcatggcaaggaagagaggatgatctaggaactcgtttgatttatctttgtgtttttgttattggaatccggttagggtgtgcatgccgttggtgctgaggacccaggaatgatgggcgccacagccggaggagcctaggttccagaggttggtttggcgggcctgctgaggcagttgttggagcggttaccaggtgtggtaccagtgtaggctccagttgcaccacgagtagcagaggtgcagcagtgggctgcggttgctgaggagattccatcttatttgaggatgatggagcagttgcagaggattagtaccaagtatttttctggtggtactagtcctgaggaggccgatagttggaggtcgcgggttgagcggaacttcagttcaagcagtgcatttttaagaaggagatgcacatttgtggtggcggagtgtgactgccaggaggaggcaggcggatatgtcttgggcaaatttcgtggctgagtttaatgccaagtactttccacaggaggcgctcgaccgtatggaggtgcgttttctggagctgacatagtatgagcgatcggttcgggagtatgaccgggagtttaaccgacttttggtgtatgcgggtcgaagcatggaggatgaccaggcctagatgaagaggttcttaaggggacttcgaccggatttgagggtgcggtgtagagtgtcacagtacgccacgaaggcggcactggtggagacagctgctgagatagaggaggaccttcagaggcaggtggtggcagtgagtccagcggtacaacagaagaagactcagcagaagctggcacctagcaagggtgccaagcctgcgcaggggtagaagaggaagtaagatcatccttctagagctggacagggtggtcgtgcgggatgtttttcttgtggttgaccacaaaatagtggattgcacgcagcgagctgagacgagggagtgctaccattgcagggagaaaggacatctcaggccgaattgtcctaagctgcagcgaatgacagtggcagtagtacagccggcggtgcagtagggagcgcaagtgcagcagggagtgcagcaaaatgtgcagcagttaacacatattgcagcagcaccacagggctacactacgcgtgagataggcagtaccagcaacagagcgatcaatggcatgatttctcagactttgtgaattatctcagctgtttttagatataattgttttgtgatgattgttagggttcttagcacatgaggtttgtgtagggaccttattagtgggcggtgtagaggcccatgtgttgtttgactctggagcatcgcattgcttcattaccacggagagtgcctcgcacggcaacatccgtagggatcctggtgagcagtttggagccgtcaaggttgctggagggcagtttctagcggttctggggagagcgaagagtgtggatattcagattgcaggggagtcgacgccagcagatttgattattagccctgtagagttgtatgatgttattctggaaatggattggttggatcattacagagtacatcttgactgccaccgtgggagagtttcttttgagcgaccagaagggagattggtttatcagggagtgagacctacctcaaggagtctcgtcatctcaacagtgcaggcagagaaaatgatcgagaagggctgcgaggcttaccttgtgacgatatctatgctggtgtctgtggggcaggtagcagtgagcgatattcgggttgttcaggagttcgagaatgtattttaatagttgcagggattatcaccatcacggtctgtacctttaaatattgagttggaaccagggacagcgtcgttgtctaaggcaccctacaggatggctccagcagagatggtagagctgaagaagcagatagaggatttgttgggtaagggattcattcgtccttgtacttcaccttggggagcgccggtgttatttgtgaagaagaaggacgggagtttccgcttatgtattgactaccgggggtcgaaccgggtcactgtgaagaacaagtaccctttaccaaggatcgatgagttgttggatcagttgaggggtgctacttgtttctccaaaatcgatttgacgtcgggttatcactagatcccgatagcggaggcggatgtttgcatgactgctttcaggacgagatatggacattttgagttagtaatgatgcctttcagtttgactaatgcacctgcaacgttcatgaggttgatgaacagcgtgttccaggagtttttagatgagtttgtgatcatctttattgatgacattctggtgtattctaagagtcccgaggagcatgaggtacatcttagaagagtgatggagaagctacgggagtagaagttgttcgctaagttgagcaaatgcagtttctggcagagagagatgggttttctgggtcacattgtttctgcagagggagtttcaatggatccagagaagattgaggctatcagagactggcctagaccgacgaatgccactgagatcaggagttttcttgggttggcagggtattacaggagattcgtcaaggggtttgcgagtatggcacagccgatgactaagctgacagggaaggatgttccttttgtgtggtcaccgaagttcgaggagggtttcgtgagcctgaaggagatgttgacgagtataccagtgttagcattgccagagcatggagagccttacatggtgtatattgatgcctcaagagttggtttgggttgtgttctgatgcagcgtgggaagtttattgcctatgcatcgcggcagttgaggaacaataagggcagctatcctactcacaatttggagatggctgcggtaatctttgccttaaagatttggaggtcttatctttatggcgggaaagtgcaggtgttcacggatcataaaagtttgaagtatatcttcactcaggcagagctgaacctgaggcaaaggcgatggatggagctggtggctgattatgatctggagatagcctaccatcctggtaaggctaatgtggttgcagacgcgttgagccgtaagcgcgtgggtgcggctccagggcagagtgttgaggccttggtgagtgagattggtgttttgcggttgtgtgctgtggcatgagagccattgggattggaagctgtgaatcgagcagatcttctgaatagagttcggttggctcaggagaaggatgaggggttgattgcggcttctaaggcagagggctctgagtatcagttcgcagctaatgggactatccttgtgcatggcaagtttgtgtgcctaaggatgaggagttgcaacggaagatcttgagtgaggctcatgcgaacatgttttccattcattccaggagcgactaagatgtactgagacctcaagcggtactatcagtgggtcgggatgaagatggatgtagctaattggctcgtagaatgcgatgtttgccagttagttaaggctgagcatcaggtgcatggtggcctgttgcagagtttacccattcctgagtggaagtaggattttatcactattgatttcgtggttggattgcatgtgtcgcgaactaaagattctatttgggtgatcgtggaccgtctgactaaatcaacacattttctggccatcagaaaaaccgatggagcggcagtgttggcgaagaaatatgtgagcaagatcgtgaagttgcatggagtacctgtgagtattgtgtcagacagggatttcatgtttacttctgcattttggagagcctttcaggcagagatgagcactaaggtgcagataagcacggcttatcatccacagacaaatgggcaatctaagaggactattcagacgcttgaggatatgttgcagatgtgtgtcttggattgaggaggtcattgggcagagcacttgagtttggtaaagtttgcttattacagcacctatcaggcgagtattgggatggctcctttcgaggcgttgtacgggaggccatgtaggataccgttatgctggatccaagtgggggagaggaccatatatggtgcagattatgttcaggagaccacggagaggatccggattcttaagctgaacatgaaggaagctcaggatcgacagcggagttatgctgacaagaggaggagagagcttgagttgaggttggggatagagtgtatctcaagatggccatgttgcgaagtctgaacatgtctatctcagagactaaactgagtccgaggtacatgggtcagttcaagattgttgagagggtgggaccagtggcatacatgtgagagttgccagatgttaagtgtgggtttcacaagatttttcatgtgtcgatgctgaggaagtgtctttacaaggatgatgaggtgttggctaagattccagaggatcttcagtacaacatgactttggaggcaagaccagtgagggttctcgagaggaggatcaaggaacttcggcggaagaagattcctttgatcaaagtcatgtgggactgcgatggtgtgacagaggagacttaggagccagaggcgaggatgaaggcaaaattcaaaaagtggttcgagaagcagattgctgcatgagtttgtctatccttggttcccagtttcagtgttgttgagttttttttgagcttttgagttgttgttcttatttctctttcatttgtattttcgtttggagttgtaacgaatcatgacatttgatgatttataagattagtattttttttcttagatttgacttgagttgtcttatttaagaatgtgttatgtggtttccaaaaatagaaaatttcccaaaaaggacttgtctatttttggaaagtttgagtaaacaacctaagaggaaggtgtgtttacgagatggccgggagttggtcataaggatgttcccaaggagatatgatggatggtggggcataaaggtgtcttccgcgaatccatgagagagtctggagatatgctcggaagcgtttagtattgtttgctcgagggacatgagggtcccaacaacttgtgagaagcggggtatgctcctgaggtaccggtaactcgagggacttgctgtctttagagtgcgaggggtacggtggcttcgggtgacgatccgagagcactctttagggtgatgacccgagagcgagttttgtggtattattttctccaagtgtcgtaactcgatgactttgtggctgagagtgagccgacacaactcagggtttgactttgagtggggaagataatacgtatgatacccgagataccgtaggccaaggcctgagagtgacagtttatactcgaagattgaggtctgagagtagagagtgagttgtgagcaacaatgactagtaaattgtgagtatatcgattagatagagagacctagagggggtctggttggagggagtgcggaccgtagtgatggttgcacggagttcctcggagtggaagggtgaagctagattcgaggacaaacctatgttagtgggggagaattgtaacgcccgtgaatcggaaaatcggttagggtttgtatttaaatcgtcctgtttaatcggttgggttaattggaaaccctagagtgtgcctataaaagaaggaaacttgaaattaggactttagttagccacttttcgttttataaaggaaaaaaagagaaaaaaggagaagaaccagaatcgttagggtttgagaggaaacattttcgacatatcaaatcgttttcaaaggtaacgaaatttggtagggttattcccaagtcttttatcgctttttccagtttacaaaattgggtttggattaaaattggttaagttattcgcagtttcgtgagacatgttttctaagacgcgaattaggaccagcagggattgtaaccgcgatcgtagtctcatctgatttccgatcggcacgggtttttgtgggaaattttgtgacgtctaaggatagtgtttcaccagagggatttaatagttaatggttagtttgtattttagggtttcgtctttgagactggttgtttctgtttttcatgtccaatttgtttgaatgttgcttttggttgagacttgttgtaggacgtttctggactgttttagacgcaaggagagtctctcctgggtttaattgttgttagaatcaatttgttaaggtgagtgcgtgaccatgagcttatttgagcgaatgggttgtatgttttgttttgtgttatggtatgtagatgtggtgaatgtgttttgtgtgaattgttcaatgattggtttgtttatgatgtatgtgtgattatatccttttaattgcttgtgtgtattgctcgtagaatgggatgatcgcctcactaagtatttgtgataatatttacgcatctctttctttttggtgcaggtaaagataaagtgtgatcgtggaatcatggcaaggaagagaggatgatctaggaactcgtttgatttatttttgttggttattggaacccggttagggttgtgttaggattgttagtcatacttggttttgtttggttgaattatttatttattcattaaatagtatttttgacttacgatttaaatgttgttttattggttggtttaattaagtatttatgggaatatttaattatgtttaaaaaaaaaacgggtcgggttgttttaatgagccaacctcccatcagcgctctgataccaaattgaaacaacccgagctttttaaaaaaaaaatatataattaaatatttccataaatacttaattaaaccaaccaataaaataatatttaaaaagcaagtcaaaaaatactatttaatgaataaataaataattcaaccaaacaaaaccaagtatgactaacaatcctaacacaaccctaaccggattccaataaccaaaacacaaaaataaatcaaacgagttcctaaatcatcctctcttccttcccatgattctacgatcacactttatctttacctgcatcaaaaagaaagagatgtgtaaatattatcacaaatacttagtgaggcgatcatctcatctacgaactatacacacaagcaattaaaagggtataatcacaaatacatcataaacaaaccagtcattgaacaattcacccaaaacacattcaccacacctacataccatcacacaaaacaataaatacaacccaatcgctcagataaactcatggtcacgcactcaccttaacaaagtgattctaacaacaattaaacccaggagagactctccttgcgtctgaaacagtccagaaacgtcctacaacaagttaaaaccaaaagcaaccttgaagcaaactggacatgaaaaatagaaacaaccagtctcaaagacgaaaccctaaaatacaaaccaaccgttaactactaaatccctccggtgaaacgctagccttagacgtcacaaagcttcccacaaaaactagtgccgatcggaaaccatatgagactacgatcgtagttacaattctcgctggtcctaattcgcgtctgagaaaacgtgtctcactaaactgtgaataactcaaccaattttaatccaaaaccaattctgtaaattggagaatagcgataaaagacttgggaaaaaagcctaccaaagttcgttacttttgacaacgatttgatatgtcaaaaacgtttcctcctaaaacctaacgattctggttcttctccttctttctctttttctcctttataaaacgaaaagtggctaactaaagcccttatttcgagtttccttcttttataggcacactctagggtttccaattaacccaaccgattaaaccggacgatttaaatacaaaccttaattgattttccagttcacggtcgttacatgaatattatagatattattgttaattttaggaagagagtgtttttactttagggtttcatagctaagaataacaagaacgctaacaaatttggtattactgacattggtccagtaggtgaaaatggtgttcgtggtgagactggtacctgggaattgaaaaaagatgaaaacggcttttttgaacacatcttgcataccgatgggtcattaggtgtccgactgcgtgagaaaggtgggtttgccaaagtggttatagcgatagttttttgtttatctgctaaaagttatatcgactaacatttgtatgaagataagcttgtatccgctaacatttgtatgaaaataaacatgatacaactgtagttaaattatttaaaaaattattcaaaaaattattcaacacaatagcctacgattttaaatggttaaaatgttagtcgatataacttttagcagataaacaaaaaactaacatctccatgttagcggcactgcatgttgtctccttgttttacataaaaaaaccatccgcacaacgataagattgtatccgctaccattgttaacaagataaaattgtaattcaaaaatctgaagggcaatgacacatctcgtccatttatgatttacaacaacagtcaaacctagtaatatgttctgctaacattagtatttgataatctcttatcctccatacgtgataatatcttcctacttaaccacaaagaaaatcagataactatgatatgcgataataaacaacgactcatatataagtaaacattcaaatacaaagatattaacgaaagagtttggagataatcatagttaaacacaataaaaaataagaggatacataattcgattagagaacataaacataaatgtaaaaatatttgagtaacacatcagttagctagtaaccgccaataaggattaaagccgagactaacttcttcacttcactttgaaggccgccaatattgaaatccacacattcagatacacccctggtagcatgagtatggataagaaatatagagaagatacctgtgtcaattacccaaaaatttgattacctaaaaagtcttatggagcaaaacccagatctaagagagaggttatcacttgaaaaccgaaccagataacacaagaattttagggggtcgagagttatttccttccgcctcaaaacgccgtctctcatcttcatatatgaacgaaagaagacgactgttcgttaactggaaagaagaaaatattaataaaaaaaaaacacaactcccgaaaacaatatcgcaataaaatctactcctacaacatgcaataatatagcctacactctacaactagtaaatctataacataggggtacatgcgtaaaaataaagttaacagtgttggggcaacagtacattttgatgagactaattatccagtcttctgagcatatacagtgatattatccttcaaaaaatttgatgcaaagtggcaaaatcaacaataatccctatatagaacctccatcacaaattattatcaatctaagctttgacaattttttggtacttcaaaataggagagtaagttattattttgttggatattttctactttgaaaccaaagaatgtgtcaaaactcaaaagtaagtgcatcattcaaatttcaaataaagaaaaaagatggagagggagaaaagtgcatgaattgttttatttataggattgtaaaaggagatcgttgcaccttttgccaactttgcattcattttaatggcactctctccactcttgcccatcattgcaactcgttgtttacagttcattgttacatacaatttatttttattttctgacaatacactttttgatttaaagtcacttatgttacaaaactatgttagatatgaaaaatttgttaataaactagccaatagacataatcaaaaaaacaaaaaaaaactagccacaatctctcttttacttatggtttgccatttttgtatcttcttataccaaactctacactacaatatagacctacacactacaaaaatgtgaaaatgaacctaaatatactaaatatgaacctatactacaaaaaaattaatttatcacatgcaatcaaaataacgtaaataatactaactagataagaatccgcactatgtgcgggataaaacgactgaaataaattattatgtaaaattattgggatctaatatttgtttgtatacaacaaaatatgtaattaatgtttttattttattttaatttacgtttattttgtatattcttatgatgttatcttaccatttaacacattaatattagatgttagtttaacatttcagttttcccttgacaaaaatttgaaatttcagtttattctcaaatataaataattttgttcatagaaatattctaccaatctggaagaacgaccgattttagacaaatataatttattccataaagcattttacacactgagaaagtaatgattcatgtcttctctttcggcgaaaaatataaaaaaataaacaataataatatatgaaaaaggcaattccatttatttagcatgctagagagcaccaaaagagactcatcattcacaatggcatatgcaactattctcatgatcttctcggtggtggcactaatgtccggcgagagagctcatgcagcagtggactgctcatcgttgatactaaacatggctgattgtttgtcgtttgtgactagtggtagtacagttgtcaagccggaaggaacatgttgttcagggcttaagactgtggttaggacaggaccagaatgtctatgtgaggctttcaagaacagtggttctcttggtttaactcttgatctttctaaagctgcttctcttccttctgtttgtaaagttgctgctcctccttctgctcgttgtggccgtaagtttctttatcagaaatttcatattggttttatatatttgttcactttgttgaatcagcttttgaaattgttgtgttgcagtttctgtctctggagatcctcctgctactgcccctggtatgtgttatttcatacttaagtcaagagactagatttttcgattttggtgaatttatgaattaagtagagattttttattgtttagtttgagaattttgatttgatcctttttggtttggttttagattaacaaattataattaaatagtaagtattatttatatttatattttctgtctatgtaattaaatcaataactattgttgaattccggtttttcaattaggtttggttaaatggcataaaatctggctatacaatctattcaaagatatgtttgaatcttattctagctattaaaaacataaaattttaactgataaatttcaattaaatttttatattttttatatacatagaaacaattttttcttttaaaaaagagtatttataataaatgactatagatttgaaaagaatgtacaaactaaccttgagtcacagtatcttgtcggaaatatgttggagaacacgtgtaattacgtaaatgtcctttgtaacatgttattttttcgaaatacatgcgataacataatatcctctttttatcttgttattttctcttattacatagtatttataaaaagcacatggtattttttggaaaaaacattctattcagtttaatatctctttttatcatgatattttgtagtaatacacgttttttattaagatcacacgtgatttctttaaaaataaattcttattttttagtaatacatggtttttattaaaatcacatataatttttttttttaagattctgttcatgtaaaagaatttcataataatgttttttcttaaaaattcataacgttttttgaaatagcatgttttaaaactaaatataacatgtaaaatttttaatgttacatgctattttgaaaaattacacggatgtgtttcgtttactgttcatcttacaacaaatgaagggtagctttgttatttcctttcttccgacaacgtgggtccatggttattttgtaacaaaaaactttctctctgctagtttcttaatttgtatgttttatttgattatctactaatattaccctttaaaaaattgcattacctttttttgggaaaaatgtcaaacaaatgcgggaactttcaaatttgagacgaaaaagtcatgaatttttgaaatatcatttaaatcataagttttgtttgacttttggatgaaataatcaagtttcgttgatttgatcatttttgggcatgttgttaagtttccgttaacaaagttaaatttccattaaaagtctctgttaaatcgaaacgacgtagttttgaaagctttatgcaagattgtgctttgtcttaacaaataatatatataaagaagtttaatgatttagcattttgggtatgttaacaggtttatctcctacggccggagcaggagcacccgcgttgtccagtggtgcaaatgcggcaactccagtttcgtccccgaggagttccgatgcgtccttgctctctgtatcttttgcatttgtcatcttcatggcactcatttcttctttctattgagtcttaaaatttaattgcttcttgttgagttatttttgtttgctatgtagctgaagagtttggtgttactgatcatatttacctttcatgtgtcaattttaatgagaaatctccttttagttaacctgaatccattctcacacattctcacatttgtaaaaaaattgcattaagtaaacgaattgatgatagctaacgtaggagtgcctattcattgttgagatctatctttggaatcaactagagagcaacactcaccaccagaaataacaagcgatggctcctaacttcgaccttgatatgtgactggatacctagctagtgctaatgaagaaaaaaagtgtatgaattaaatattgtctcctaatttacaagaatttcttattatcaccacttatttagattagaccaattgtttagcgttattgcttacattaaatttttggacatgattttgaagttggtaggctcgactttgtgttagtccaaataacttaaaactattaggccgcatgttaaatgagttcttacttcaaaaagaataatcatattacgcgatataatgtggtaaggtcatgctcaaaaaagtactagtcagtgcccggtggacatggcgagctattcatgctctgaaaggtcttgaaacagtcttaagtcttcaaacttagaaactatcttataaacttactcaagtgtgaggtttataaatttgaaactaactatgtggctttcaaacatttcaagaatatataagactaaaccaaatgctcaatgtctattggaaatataaacaaataaacataatgttgaaggagttcttgggctctaaagcatgtatgaattacgagttgacgacacatgtgattatcttgtcaacgagttgtcaaattaaaagaaaacaaaaaagtaagtgttcgtgccccacggtgggcgctttggtacttgtttttaaaccaaaaaaatgaaaaacaaatgtaggtgaaaacactcaagagtactgcttcatacaaactcaattatccgacctaattaagttatagtcactacaagaaaatacaagatttgcgtgcaagatttgcgtgctgtttgcgataattttgttttcctcgcaaaacccctgcaatttatgaggcggattatcccttgcaagttttgcgagggaattgtaatgtttttctttttgtgaggcgcaatttgggaggaagtcttatgtgttgcaaatttcttgcaattgacgttttgcaaggaattccctagaaatttttccctcgcaaattgcgtgttttcttatagtgcgtactcacactaccttgtatattagctcgacacacatggacttgaatgaagagacaggagaagggtggttcatatggggtggtggaaactacgcatttaagttaactattcacaataattaaaatcttatgtgcgtttcatagtttaaataattataaaaaataatttttgaaccatttacggtccaaaaatgtaaaggtaattgttgtttagcatgtgatccgatccacgttatgcagcatatatgcagtggctcaagtgtgttaaatgcagatattaaaatgttattttaaaaaaaaaattggaaaactataaaatacatatggtacttttcttttgtaaagatgtttttatgcaattaatttcaaaataaattatatggtactgaaaattgacaaataaattaacactcttgaaccctattgaaaatcaactcattcatttttttatccaagaagtcaactgaatgtatcccacgcgcatagacaaaagagaaactgtggtttgtttgtaactattttgaattttagacccatttgtaatgtttatttgtcccttgccctcaacaaagaaccctattgtctctttgctaaacaattacctagttttgtctcaaagctgaacaaccctatatataattcttctcttcaccagaacgtgatgcgatttatgaatgactaaatataatatttataaattaaaatctccttcacttttcgaacacaaaactattacgattatgaaaaacactaccatggtccatggtctcgtagcttttattatttcaataatatacattatggtacaagaggtggaagaaattattcaagacgatgcacataacacgagatgtatttatcctaattggtattagaagtggaagagagataagtaaaatgtttggttcgtgtgttaaagaaattctgcaacctctttgatgcttcaacaatgtgatctctgcgtccaaacccactaatcctcaaatactcttctccaccgggtccaaaacctgagcctggtactgttattatatgagtgttttcaagaatctcattaaaaacgtcccacgattttgatcccttaaagtgaacccacaagtatggagcatttacaccaccataaaccttgaggccaagcgagactagagtgtccatcagtatcttcctgttctctttgtagtagttgttcaccgaccgtatctcctgtcatgtattaagccaagtgaaatgtgataagaacatattccatactagagttttaaccaagcccaataaaatccatatgtagaacacacccaaaaactggcttattagtgaaagtacacatgtaactttataaggaattagttagtaccatttctaaccaatgtgggatatttatcatactgtaatcaaacggtataaattattgttaccttaaggccaccagaagaaaggcatgccaatccaccagcctgagcaatatttgaagctccgttgaaggaagtggtcacaatacgatggaaatcgttgataatgggaaaaccattagagtacaagagctcatcagggatgatagaccaaccaagccgaacaccggtgaaacccgcaaacttagagaatgatgaaacttcaatcgcgacctagcaaagaagtaatatgattagtgaatgcaaaagaaccacaaggaatatgtatgaatatgtaaactactatcacctctctagcaccaggaatttcatatatagaacgtggactaccatcttcgataaaagcagcatatgcggagtcaaatataataatggacccattggtctttgcaaaatcaactagttgatgtagttgttttctggatgcaacataaccagtagggttattaggagaacaaaagaagatgacatcggtccttggggtcatagccagatcagggaagaaactattgttaggcccacatggcatgtaaacaacattttggtacttcttggttttttcatggaaatgaccagtctgaccgattatcacacttgaatctatgtaagcctaaattcacaacaaaaagcaacataagaagaagaaaataaaaaaccaacttctcatcaaacagtgaggacgtaaacataaaacattaccgggaaggtaggatcttgcacagcaattgtgacgttggagcctaagagtagctgaaagatttgacactcgaatcagcataacaacaatacaaatacttgatttttacacgcaaatctctatatgcatacctgaagacgagaaatatcactttgtgcaccatctgatacaaaaacttcattgctttttacgtgcaaatctctataaaacgtttcagcaatagcttttcgcagggtctaagaaaggaaaaatagatgttagtacaaaggaattaactcactaagactttaaatccttcttaaggtttataaacatatagatgagatgtgaaatctaaaaaaaaaaatgaatttagagtttagggtttaggtcggatgaataaaaataaattaaactgaaacaacttttgtcaaagcaaaatgaaaagaggaccataattaccttatttccttgttccaacccataccctctatatccttctacggtcgataggccatgtgcgaactgaataatcaaagttcaagacacatgttactaattaatgactactaaggattatttcttgtcttccaaaaaaaaatttagaaaattctctttgacatattttttccttgtttaattagtaacttaattaccaagtgatagtttcattctaaaagaaaaattcactaccttcacatatataagaaaataccggaaaagcactatacattaatcaaagtagttaacacaaccaaagtatatgaaagtcagataaacatgcactataaagacacaatggacaataacaaaaacatagatatatgagaaagaaacacatgtcttcccttgatgcaccagagcaattataaaaactataattgaactagagatattacttactaaaataataatatatatacataatgaaccatagtatacaaattgacaaaggattaacatgatttttttggttatccaccgaaaaagaaaatactcgagaagctttcatatcatccaattataacatacgtaacagatgctcatacacaaacgaccaaccgagctgttagctagagacaaaaaaagaaggtcgacacatgcgtcgacgaccataaaataaattttcaaaaaaataattaatttgcatgaaaacaaaaacgatgacaatatcgaaaatttcaaaaaaaaaaacaagaaagagaacgacttctgacttttgagatagtccagtcacgaagacgatttttatgagttgaccagttttaagtattgatgtaagaaagtcggactatgtataactaatccaaaacggtcgatttctgatttcaaacagagtttgactatgtttaagtgggtcttgtggtttaggataaaactcagaccagactggttactgaccggcggctggtctgatttgggggagtaaatcactgatattactatgcaactagggcaatacgatcactcacaaaattttctatcatgcagaaaaatctcaaagatattcaaggcattagttgaatcacacaaatacttttcagatttagatttttccacgagttttagagaagaagaaatactctatccgggacaaaaacaacattttagaccctttagtaagaaattatagaccacaaaatttcctacgaaattcctactaattttgattttttacgatgcatttgctatgaccaaatatcgtactgtttcctatcatttttttacgatatttgttgtagaaaatctggtattttcttatagattccgatccatatgttttagctagggtttaacgcaaaaatatttaaagaactaaaaaaaaaaaaaagattcatacgttagacatatgtgaggttatttgctctggaataggctctgttgtatcaccagtcccaaggcttatcaattgtacatttggatgcttttcaatgtgctcaagttcacgtctgttgatctatttacacgaaaacaaactgtcaattaaaaccaaataatggaatatatatatataaagcaataaagatgagatcaggttatgaacttacttcaggaaacaaataattgttctttagtttctccaaattcacgttccgaacaagttttgtgctgccacctgaggaagcaagcataattaggacaagagacttatgataaccaactataaaactatattctgttcatagttttgagagtcaagatgagaaaaatttaccaagtttcttcatctcgaagtccaaactgtagaagaaagagtgaagttaagtgtatcaagaagccgattataagagaaagacttcttaatagcgtaaaatatttgaatccatgtcttgcattataattgtaaacaagtacctagccttgggaatttttgatggagaagagcataaaggtgaggccgaactaaagaacattagactgaccattctttacttgcaagttatgacggcttcaaaaagatatgtagacaataatgatacaatctgatctgatatgtgcgtatatttatactccaagtaagtaccaataaccactattaaaatgtgtatatatatgtcaccttcaagtggatagagtgcagaaatttctgaagcagccaatccatgcacggctagtgagtcagatatattcacaccatgtcttcttattgtccattaaatgttggaccaatatatgagcatattatttttaaaaatacattattatttgtacgtacttagatattatttgtacgtacttagatatcatttgaaagaatttgaaatctctagtaatcaatgccatcctttcttttggtcagaaacccaatatttaatactccttgcgttccatttaaaagattcttaattatgtataatagacaaaacaaacattatagtaaatgtcatttagctaaatttgttaaaaacggatattttaaaaaaatagtgacgctacaacaactttcattgaaatgaacttaaactatccttctatttctgaatttgatgtaatctgatcttttggaaattatagaatagaaagaaagaaaaaacttgaaaaaaaaaactttaacttttacgacgaagcaacctttagtgggactaggactaacattcagattcagattccaaagaaatcggtttcgtaatagatgatgcatggtggctgatgacttcaatgccgtgccacagagttgaagtgacataatttttagatcggacctagtggatattatcaacttgtacgttgacttccatgcatgtgtggtactttcatgcacacgagcgcatgatcagaatcaaacctacacacagcagttgaattaacgatacatataggtattaaagacttgttagctacctagtttttgattccacacgtaaccttatatatttatgtgacaaatggctcttgtaaaattagacaactaatgatacaaatggttatgttatcattcttaaaccaatatgacttttatagcatgtcatcactagtacgtatattactacaagtatgaagtattacaactttttcgacaagtcctaattaagaaatgttctttaaccaagttatgaggaaccttattcaccactcataacttataccatagaccatagttatgacagaattcaaagtatctaagtttaccagacaaagtttttgatgctatttcttttgttaaaacttgtgtagaccaagttttgtggtcttaatctatgagggctacagggacgtcacatatgaacatgctcaagaaatgactcagaagcctcatagaaaccttcatgattttgcttaaaaagtatagaaaattcttgactaatacatctcaacatcattatatatatgagaattgataaaaaaaaaaaaatatatattacaccttgacaaaccgaatcagacaaggttttgttcttctcaggagaaaagtcaataataaaagggaagaataatcaaatagtcaaggtataatattaaaataagttttggagaaatatttccaaagagaataattcgttttaaaagaatttaatcagtcagaattcaagtgatatagactgttatatagtttttattggcttacgactaccaaatagaaaaactcaacactccttattgtcatccacccatttgtcaagaaaatcaataaaaagaagaagaaataaaaaagaacaattctaacttattatagtatttgacaatgtggaaacgaaaagtcctcaacgaacacgaaaactctaaacttgttactatataatattagacaactcttctcttttttatgacaaaaatatataaaaaaattcttcttgacagaaattatttaggagttggacaagacaaggaacaataaaatttaaatacgtaaatggagtaacaaggcattttcatggagtatgatgataactaaatgcgaataattatcattgtgaaaagttacaaaccgacgtgcgaaatcctatatactccgtccatatatgaaacaactgagagaaataaaataatccaaaagtaaaaatacgccagacaagtttatatcttttttggaaaatattttaaagtcaaccaagataatgaagattgatgtaactttacttttatcttactcgatttgaacaacatgtggttgataaaaaacaatttatctgcaaatgttgtttcattagaaatgtgttttaagattgttacacatatatttaaaaaaattcaattatctatgttactttttattaatatattatatattttctattggtttatacattaatataatatgaataaaactgaaaatcttattatcaaacatatacattgaaatgacaaaatgacacttattttaaaacaaaatgcaaaagattacacttaatactccttccgttctcttataaatgatgttttaagcttttatttttgtttttaaatacatgatatttttaattttcaatgcaaaattaattatataattatattatttcttaataggtgtgcatttttataaaacatcaactaaagaagaacgaaaaaaaccaaaaaaaacctcaattaatttttatttggacatttaatacccaattgtttttgcttagaagaaaaagacatgaagtaataaaactgtgcaattttatacgcaaacaattaaatgttattattttcatactcacgatctcacaacaaaaataaaattacaattttatccttaccatctcaattaactattaatttttagattatatgacattaattttaaaaattacaaaattataaaattaatgtcgtaaaatcttaaaattaatagttaattaaaagggaatgtgacactatgaggcacttttaagaaatgtttttccgttttagacacttttcaaagtttaggcactttatcttgtttttgctgagaaaatagacaaaattacccttgagattttgtctctctatttttcgtatccattctctctctttctctcgctttatcaaaaagaaaaaatcaagaaaaaaaaacttcaaaatttacatttttttacgccattaaaaaaagaaaaaagctgtttgaacgtttgcaaagaagaaatcatcagcttctttctttcttccttcttcaataaatcatcagctttctagaaaaagagagattgattgaacaatcagattcaactttatttttccagttaatcagatctcccgatttctccgtgtctgctttgattaaggagaatttttcagataaccaacttcagaatatgaatctgatttttataagagaggatctgttggatttaaagaactgccatggtaatatcaacacatattcacatcctcttcgttttttccattgttttctgtttttgctcttaaataatttatttttcgattccatgaaccaccaggttgtagataaaccaaattggccaattccagtattgaattttatatccatttgatcagcttgtttggtatcatatgattttggttcgataaattgataatatcgttgaacttctaagttaagagtattttactttgcatatgagaatcaattatttccacatagtcacgtctaagtggacatgttattatcaaaacttccaacacgatttcattatgtaaaaactaataatcatataggtctccaaaacacaagaacaatctgtagacattactttcaaacatcaacaaactaaatccaagtagataatgatagtttgtgtccatgataacttatccacttaaacttgaccatatggagtaatggtgaaacatgacaaacacttgaacacaaatgattcatgtttagagctttcatcaattataatttgaatgaataagagtatcattggtgatggaagaatcacaacttggtcaaaacaaatcataccaacacacaaaagttcatacatcaatgaatatcaccaatttcacgagtagcgtccatcttttgttgaccactagttcacttgtttatagacactctcatcattatgtgggttgatcacttgtttatagacacatacgctgcaaacaaaatgcgtgattgtccattacggattgtccaaatgttgtagtccaatagagaacatcaagtactgaatttcaaacaaacggggcagagaagttatcaaacattatcacagaattatgaacaagatctccaaacacttggaagcttttagtaaaccaaaccattaatctttagttttataggagaaataaccacacaaaaatcaagggatgcacttcactcctccatatcaaacctaaagagataaatgtgtctcaatcaaatactatatatgtgtaaattgacgctaatactctccactagcaaaatcaaagtctgaataaatcgttcaaatcaatccaattgagcaactttaacatccaatttcatcataagagttaagcttagtttatagcttcaattccaaacaatttcaattccacaatcaatcaaatccataatctcacaacaatttttcaaatttccgcaacatcgaaacttcctgcatctcgtcacatcaaactttccactataccgattctagaaacttccaataacatcaaaaccagactatggcataaacacgaagaatcacgaagcaagacaaaaataaacatgaatggagatgagtaaactcaaatcaccttgagtttatgaacgacgacgacgtcagaagcgccggtgatgttgatcaaacggtcgataactttctaactcatgtcgccataagaaagaagatatgaacaatcaatttgagcgagaagcttggttcacaacaattgattgattgtgaaattttgtttttggagtgaggaaggagaaaagaaaaatgtttttgttttgttgttgtgaaattgccgtgaaccgatggattgaattgggggagatggattgaattggagggggggggggagagagagagatgaattgtatcgagaaagagagagaatcgtaataagaagaattgttagcgtaaatgtaggagagatatagttaaagggcaaatcgggaattttgtctaagaaaagtgcctcctaccttaaaagtgtctaaatcgacaaataactttttttaaagtgtctcacaatgtaatattctctaattaaaatggtaacggtaaaattggaattttatttttgttgtatcttcagtatgaaataacaacattttattgtttggatattaaattgcacaattttattacttcgtatatttttcttccaaccaaaaacaattgggtattaaacgtccaaataaaaattagttgaggtttgttttaggtatttataaaactgaaggactgtataaaagatggaaaaaacccttgacacctcattatatagcaaaaataagaaaaactggcatatatagcatcgttaatttgaatctagttggtattaaaatagtaaagaattatacattaaatcaacaacgcaaacaagacaaatcattagattaaaaggaagattacacaaaactgcatttttcaactaatttttactaatatgattttgcgtccatgcattgcatgtaacgtattattgattttttttataaaaaaaaaaaataaattggtaaaaatgaacaaagaaaatgtaaaatactattatcggattcacggtacagtgcggaagaaagtaaaaaaacttatgtgataggtaattgtatgtgtgttttattttgaataattgctgaaaatgccttttccacactacccttttttaattctaccattttcgatttgtcattttcatttataccctttttaaatttttaatgaccattttacccctatttgtaaattgatttaggttaacaaaatgataaattaatatttttttgtctaaaatattccaaaattaatttcccgccaaaagtttcccgccaaaaaactttccgccaaaagtttcccgccaaaattaaatgaaaaaacatttttcccgtaaattttttttttttgcggaaaatagatttacaagggagttcaaaagggttttaaaagtttacaagggattttaaaagggattttaaaagatttacaagagattttaaaagggattttaaaagggttttaaaagatttataagggattttaaagggatttaaaagacttacaagagtttttaaggatttttaaagggtttaaaagtgctttaaaagatttacaagggattttaaaacggttttaaaagatttaaaagacattttaaagggttttaatagatgtacaaggatttttaaaaaaatttaaaataatttataagaaaaccttttaaaaacttttgtaaattcttttaaaacctttggtaaaggttcacaagagttttaaaatggttcaaaaaagttataaatgttttaaatacttacaagttttttttaagagttaaaaaatgcttgtaaagactttataagagatttaaaaggttttaaatccttttaaaactcataaaaaactcttgtaaatcatgttttacccttttataagcttttaaaatccttgtaaatcattctataccacttacttatcttttaaaaacgattgtaaaccatgcaaaccctttttaaaattccttgtaaatcattctttgacacttacttatgctttaaaaacgactgtaaatcatgttaacctcttttaaaatcttttaaaatcccttgtaaatcattcaatgccacttacttatgctttaaaaacgattgtaaaccatgcaaacacttttaaaatctcttgtaaatgattttatgtcacttacttatgcttttaaaacgattgtaaatcatgttttactcttttataaccttttaaaatctcttgtaaatcatttaatgccacttacttatacttaaaaaaacgattgtaaatcttgtaaaactattgtaaaaggtttttaaatgatttacaaaggtttaaaaaggggttttaaagtatttacatatgtttttaaagactttataaagattttaagaggttttaaaatgatttacaagggtttttaacaactagcaaagcttttaaaatactttacaaggtttttttaaagagcttttaaaaaatttacaaggatttttaaaagcatttttttggctatttacgagaaaaaattttggcggaaattttttgttttggcgggaatttttttgtttttacgagaaaaataaattttgcggaaaacttttggcggaaaaatttcagtttccaattatatgttcttattagatgagggtaatttggtcattttgttcaaagaaaggggtattttgaaaaatgaacaacataaaaggatattattgcaaaatggtagtaaaaaaaagggtagttttgcaaatctcccttttatttttgagcgccggtttgtattttgaaagtaccgcaatgcgatatctacatatacatttttgcagtcattttagcaaataaatcctctacttgaaacttatatacaatgtcatgccgctgacatttaatgttttaacaaacttatttttaaatctaaatataaaaatcgattatgttactaaattttaggaaactaaaataaaaagtcacaaaaatcatttaagtcttcccaaatctaaactacaatatactacacattaacatttcttttaaggggatcaattagtattcatcaccatgatttgtcgttttaaatcatttattttcagttaataaaatgaatcaaatcttatattacaatatatgcttcaatattttcattaagaaaattaataacgtaacatttaaattttttgaaacaattaacatttaacatctaattatttctcaatccacattttctattttaaatttgcaattgtacaaaataattatcacttcgtaaaactttcaattctgatttttattaaattttgttctttttggcaaaaataaattgtacatgtattaagctgatattgctgactcaaataatgttaacaaaaggcccaaatttaggttattaaaataactaaaaatttagttaaaaacacaagtatatcaatcccaaattatgagtaaactaagtatttatatataataatttttacaaaaaataaaattatatatattaaaaattttgaagtgttagtaaattaagaatttacaaagaatgtcatcacattaaagtcaaaaacagttattatttttaaatattgttcatatatttgaactttataaaacaatattaatgtttaaacttattaaaaaaattaaaatatcatgagacgagaaatatagcgggacgagtttggattgatatgaaatatagcgggacaagtttgaattgatatgaaatatagtagaacgggtctggattattattttatcatcactaattttttgaagttacaacgttaatataaaatatataactttaatactaaattaaaaaccataaattttaatattattatatatataaataaaacatttaccccgtggtgggttaaatcctagtattttacatgttttgaaaaagaaaaaaaaagttgtgatttcgatttaggaggtgtatagtttcaattcgtatggacgataacaaaagtatatattgatactatgtaataatgtgtattatagtttcatatacttatatttaatcaaaataaggaggttttaaaaaaaattgggaaacaattgtatagataatgggggtgattagcaagagattttcaaggcttcaaatggattctaaagccttcgcatttttttttttttttgccaatcagatttcggtgaattaggtgtataaccaaaacaacaaaagaaattaagaatatagcatgttaaagtgagaaatgaagcgagtaaccatttagtcttcattatgacgaaaatactctttttggatgtgaaaagctgcgaggagagaaactaggagccacgtaggtgatttttttttttttcatctcaatgtatagtggattcgtggttagctttttaaaaatagctataaatatcttccaatatgaaaaaatggttgtaagtcatacacattccatttatataaaacacacaaaataaaatagtggagataattgataatgactattaattttagttgtaaaaaatttcgctaaaaacatttttcaagcatgaattaattcaaaatcaagaatttatgttttaactatttatattgaaaagaataaatatgtcaaatttttgagaaatagatgtgttcaatttttttaaaaaactataccctaagatactatatagggaacccaaaagataaattaaacgcatgttaaatatgtaacattttattttaaacgatacaataaataagatttaaaatatcaagttaaatgtatgtagaaaaaaggactatatatcataaaaatacaaggaaattattttgtaaacttgtttatggataattaaaatataattaaatatttttgacataacttttaattttctataatcaaatcgaatattcactcataacaatgaaaaagaaacatgcaatctagtaattagtaattattcaaaataatagtatagtattaacttaaacagtatatatagtttgtgataatcttagttaaatatttgtttagtgttaaatttgtttataaaaattccaaatcaaataaagttctattgattacatggctaattccacaacgacaatagtataatacattcacgttatttagctgatttggaaacccaatcgagataaaagaaatgaagcagtcagagtagtcatgagaaatacagaattgtgtatatattatataaaatatgccaaatatcactgtttttcttttctcaatggttacttgttgaattataaagtttttgatggttatacactgcaatttcccatcagatttttatcacttcttttttgaagtttttaaagccttttttttttctttctttcccttcttttttgaaagtcaggtaaatgaggctttcaaacaaatattattaaaaaaatttctttttcttctccaaacataattaaaaactctctacaaatcacatatacttttttttcaaaacgtttttgataaattaattattatcaattttctatctttcttttaagatccatttcactaataataattttaataagagttagatgtcatttcattatcattcataaatttgttgattttttgataagtcaaaatatcattcaaaatagttttgagaaaaaaaattaggcataagaattattcaagataagtattttaattatttcaatcttttaatttgaacacacaaatagtttccataatttttcaagcttacaaatcaaataactatacatcaccatcatcatcttcgattaagattgaggttagcactcgtgatttcaaatctattattagtttcttctttatcaattttttggtgctagtataaattaatcaattgatcaatgtaagttccattaaaaagttaaagtttcggaaaaaaaaaacacaaagcctaaaattctatacggaacaaggaatagtttttaaagtttacatgttaattagaattttgaaagaaaaagttctacatcctccatagatcaaataataatatgtgttataaattaaatacaaaaataagaactaaataattgttgataatttgttatatgtctacgttttataaattatcatgtttgagtaatctttaaatttcaagataattttaagtaaaataacagaaattaatttatgcgaaaatattaatacaatcaatggtttaaacagctataaccaaacaaaactccaaatacataactaaattattattctcattactagcttttaactagccagacaactatatgctttgtagtttgttcaagataaaaatacatcaaatctatatgaagtttgtatgtgagcacattgtatttcttaggcaaatatgggttcgatcaagatttatttttgggagtaccaaaagcaagcatgacgccattatgaacataaattatagaattc

SEQ ID NO: 219 - DNA, 95765 bp, Arabidopsis thaliana
gaattccaatccagtgggtgtatttcgtgagagggaaatcgatggaaaaccatttcacatatacactttatcatctcaaacagacaccacaatcccttcttcttccggtgaaacagccattgatggcgacgaccacctctctcttcaacaacctcttttcctctgtccttctttacgtcttagggttcacgaggaaaacaattcctatactgaatttctcccgtacaagacttcccctcacttccccagcataggaagcgttgatcaacaagtccagcatttgcttgattccgacagccaacaagtccatgatttgcttcattccgacagcagccatgatgatgatgatgatgatgatgtaatctgtaagctcccagttgtccctatctattggtgcaatagtaaagaacttgattatgatcaatttaattgtggtgcatgtgaacgatcaaagattggcacaaactattatgtctgtctcacgtgtgatctaatgttccacaaagaatgcgtagagtctccccttgagataaaacacccttcctatccctttctttcactcaaactttacaatcgtcccggccaccgcgtgagttgcatgtgctgtgatttagctctctgtagcatgctttatcattgtcccacctacaaacttagtatgcatcccgtttgtgcgatgaagccaatacccattttcatagaccactcaaaaaggcatccccaccttctcaccttttttcccaaacaagcttccttactttgcgatgtttgtggcctcgttaaagaatcttttcccacatatgtttgcgttcggtgtatctttgtagtccaccgagattgtatctatttcccgtttgtcattaaaatatgtcgtcaccaccatcgtatctcttttacctcttctcttccatccggaaaatggtcttgcggagtctgtcgtcaaaaagttgacaacaattgtggtgcgtacacctgcaacaagtgtaaccactattttgttcatacaagatgtgcgttacgggaagacgtgtgggatggaaaggatctcgagggagtacctgaagagcctgaaataattctcgagccatttgagacgatagctgatggaataatactccatttttctcatggccatcatctaacactcgagatcagtagagtttacgacgaaaacaagttttgtcaagcgtgcatccttcccatctatgagggtaactattattcatgtatggatgactgtgacttcatcctccacgaagcatgtgcaaatgcttctcgcaagaaacatcatgccttgcacggtcacccacttacgctaaaaattgtccctggcgaacaagaatactataaagattacttccagtgttctgcttgttatcgtcaaagttgtggctacgtctatgaagctggatattacagaatagacttacggtgtgcctcagtttctgaaccctttcaatatcaaggtcatgagcatcctttatttctagctttagatcgacaacaagaacttgaggcaacttgtcaaatctgccaacagaaagctacttttcttcgaaaactaaattgcatcgaatgtgattatgttatatgttttaagtgtgctactttaccatacgaggcaaagtataagcatgacaaacatttcctcacatttcgggaagggaaagaggaaagtgatcaattagactggtgtgaagtatgcgaaaaaagaatagtatactcaagaaaagatggcttctatgcttgtgatcactgttgcaccactcttcatgttcattgtttgcttggagaagacatgtatatgttgaaacctagtcaaaccataacgtatattaagagggaggttcatatccttcccaacaatacccggtctcgaccattctgccatcatcatgatgaagaccgttgtccacacaaagtagttttcaaatggcaggaccagtacacgatattttgttcttaccgttgtttgacaaagtaaaatgtcttcgtcgaaacgctttgtaatcttcattccttgtacacgttttgtaatattattcttctatcaataacgctttgtaatgtattcgacatatgtaccttttaatgttattttgtctcaatctcatagttttgtttgtttaattcgtattggccattaattctatatggactatatatatatgttttgaaaatacgcatttgataaagagatggttttgctctactaaagggttttggactccacaatgatgttcttgttacagggccattaatacttcgagatcggacggttctccctaaaagacaaggaaattacagttatgacagtaggatgaatcctccttatgatctgacggtcaagaatccttccattgtgtacgtgttggatggtcaacggatccgcttatagtgcggtccgtgattcaaagttcaaaccctaagaccgagggatggagtatctttatgttccaacggtccagaatcatcaatggttctctgatattcaaacttttgttaccgacgtttgaccgtccgttattttcaagtgaaagcaaaaataaaacattcgcaaccgaatctcattgcttcgaaaaactagaaacccgaaatatgataacattttaatattttggctttccactaggcattaatttgtaaagtcatttgttgtctttaaatttttcaaaaactcagataaaatgcacttgttgtaactttggtttttttggtaaatatattttgcattcattcaaaaaatatatatatataacagagtttatttgataaaatctcacaaaaagccagggaaaagggaaaaacaatcatatgaaactaagtaatcaatatcctcgtacggtgtcgaatcttttattcattactcaaccctctcgctaaatgcttaagaaattaccatgaagaccgtaggatagctatcttcatgatccgacggttcatcgcctatgtaaccttccgatagtcaacgcatctaaccaaaactgccattagaaagggttcaagcattattggtcctcaacgttgaccatctgcatttaacgtccgtgtcagttaaatacttaaatcccatgtgttttgttgactttcccagttccaatataccactcacgatgtttttggtaatatgatttttaaagtaatatgtttgtttaacaacattacaacttttttgtttatactattattacaaattgcaattataatatgcaatagatgcagaaacagagaatccatgatctagacagaaactgtttatgaaaactcatgatattatcaatctgtcaatatgctaaacgactatcatgtctaattaatagaacatgttagaacgctctcattgaacaaataatggaggtatgtttaattataataaataaaaactaaaaggaaaaacaaaatcaattgcacaaaacagaattttttaaagataaattagtatattaatcataattaagtctgctctaacacgttagcacgtcaacaaatagtactgttattgaagtttttttctttttttctatgttcttataatgtttctctattaaactttctaaataataaatagacgatccataaaaaacactagtggatcgaaaatgagaaataataattaacgacttttcctgtaaccaagatgtaaatcatatatatgaaagttgaccaacactctccatatgattgacacatcatcacacaagaaaatgacatgtgtcattctacattagttaaattaaaaaactagcaaaaataattgagaaaaaatcaaaaatcttttgttgtattaaattctccattaatctcagtcttaaatgaattttctaaaaataatcaataaataaaaaatcataataatgtaccaagcactactttcattcttttctacttattttattaattttgttttatcaatagtcattaacccataatggctaaaattttacttgtgttgtagtttagatgtttgctacctaacctcatattaatttagtaattttagttggatatttttttattattacgttttgtgaatttgatttattatatgaccttctttatgtacatttcacgtaatagtcatccaagacattagacatacaaaaaaaaaaaaaacatgagactctatatgattatatggaataaagaatcgtttgttacaattaagttaggcaagtttcaaaacacataagtaatataactacatacattgtatcagtatatcatatattgttgtagtatgtgataatgatagtgaaatattagaataataaatatataaatattcatattgtagtagaattgatatttcgagttatagatgaatataatcataaaaagtaataattatattaaatagatgaatttatcaaaatgaacatcaaaatcaacaaaaaaccataatcatatttttccgacaattttaaaaacaaaaacccatgcgtagcatgggtgttcatctagttattacaataagtcaataactaaattaaaaatgataaacatatcgatcaagcttagctgtatcctgtatacatctatatgtaagagggagagaaaggagaagaagaatatcacaagttcacaactatccaaaaatctcttagtagtagccatgtattcaaattcagtgggtgagtttcgtgagggagaaatcgatggaaaactatttctcatatacactttgtcatctcaaacagagagcctttcttccggtgaagcagcggttgattccgatggtggggacggcctctctcttgagcctcggatcctctgtcctactttccgtctcaaagttaaaaagttgaaaccatacacgagagattcagatcgtagctttttcccgttggttgtttcccctcacttccccaccatacaaagtggtcatgaacaacccgagtatatgcttcattccgacagctgtaagctacctttactccctctcttttggtgcaacaataaaaaacctcatcttttcgatttcatttgccgtgcatgcacaaccctagagccagccacaagctattacgtttgtgtcacatgtggtgaccagttccacaaagaatgtattggttctccacttgagttcaaacacccttcatatccgtctctttctctccaactttacagtcctccgtccgaccgcgtattctgctcatgttgtcaaaaacgtatcgatggcctgaattattatagtcctaccaacaacttcactctgcatctattttgtgcattcaaaccaataccctttgttatagatcacccaaaaaggcatccccatcctctcaccattttccccaaacaatctttcttaccttgccatgtttgtagcctcataaaaggacatattcccacctatgtttgtgttagatgtgtatttgtagttcatcaagattgtatctatttcccgtatgtcataaaaatatcccgtcaccaccaccgtatatcttatacctcctctcttccatctggaaaatggtcttgcggagtctgtcgtcaaatggttgacaacgactatggtgcctactcttgcaacaagtgtgatgactattttgttcattcaagatgcgcgctgcggagagacttatgggatgggatagaactcgagggagtacctgaagaacctgagatagttgttgagccatttatcacgatttctgatggtataatactccatttttctcatggccatcatctgaaactcaagatcagtagagtctacgacgaaaaaatggtttgtcaagcgtgcatccttccgatctacgagggtggctattattcatgtatggatgaatgtgacttcatcctccacgaaacatgtgcaaatgcaccttgcaagaaacatcatgctttgcatcctcacccacttacgctaacggtcgtcactagtgaatatgaagacaacataggacgtttttgttgtaaggcttgtcagcgtgaaagttgtggtttcgtctatgaggatctcagaggaaagattggtaattatagaagaaataaattccaactagatttacgatgtgcctcagtttctgaaccatttgaatatctaggccataagcatctcttatacctagctttgaatccagaagaagaaaagttagcaatatgtcaaatctgccacgaaagggaagatgagtcttctcattgcagaaaactaaattgcattgaatgtgattttgtgatatgcttcaggtgtgctaccttaccatataaggcaaggtatcaacatgacaagcatttcctcaaattttatgagacgaaagaggcaaatgatcattcagagtggtgtgatgcatgcgaaggaagaattgcagatttaagaacgagagggatctattcctgcaacgcagatttaagaacgaaagggttctattcatgcgacgactgctgcaccactcttcatattgattgtttgcttggggaagacatgtatatgaagcctggtcacaccataatgtataatatgacgggtttcgacgaacattatgagaagaagcttcgtattcttcgcaacaatactttgtctcggccatgttgcagtacatgcgggcagcgttgtcgacagaaaatagttttcaaatacaaagaacaccatatattttgtgctatatcttgccagaagcatgtaattaattactcatagccagacgctttgcaattttttaatctctccatatttcttcattaaaacgcattgtaatcttgtttcttgtcctcttcctatatgtaagtttgttatgttttttgatcgatgctacatgtgctctgttttcactttttgttctttaagaaaaccatttttgatttctgttttataattttataatgtttctcatctgtttagaaatttggagaacttccaaattttctgcctttggttagaattcataggcatttacagataatacgaatttgaaaaaaaaagatggttttgcagttttgtctatcaaaaggtcttggactctatgatgatgtcttgttaaagattctatgagtaaggatgaatctagttctcattcaaagaaatctgtatagacgagtcatttaagagtccattaattcttgatggaaatctatcattatctgttaaaaaaaaaaacattttggggctcaaaatctcacaaagagaaaagccttttctgatgtaaaaaaaaaaaaaaaaaagccttctctgagacaaaggagaggcttattaaggcgaccatgacattggaaatcgaagatgaacccaaaactttggttttcaccggtaatcaatatccctctcgcagattcgctaatagcttaagaaattaccgtaggatgagctatcttcatgatccgacggttcattgcgtatgtaaactatccgatagtcaacgcatcaaccaaaactgccatttgaggttcaagcatttgtcctcaacgttgaccatctgcatctaacgtccgttaaatcccactaaccatgttttcggtaatatgattttaaagtggggtatcttcaattcgtatgcttgtttaacaacattacaacttttttgtttgacaatctgtagagataataatactaaacgactattatgtcatgtctaagagaacatgttagagactagagagtaacgtagaactaaactttatttttttattgaaatattaatttggtatagttatcgactagacaattagattatggatttaaaattgaaaaaatcttatggatttccttctcacgcaaaaaaaaaaaggcctttctatttccgaataattcgaagatttaatactaagattttgcaagtgcgagttatttaaactatagttacaagttgcaattataatatgcaacagatgcagatgcagaaactgttctacacataaactgttaataacaaagagtaaactcatgagattcataaacaaagaaaaagaaagacttttcaataacaaagaatataaaaaggactaacgaaataattgaaaaatataaacatagcgattaaggttaactgtggcatgtgggcgtgtgtgttttaatataatactatattctcactcgtacatacgtgcggggtttcatattttaaaaaatgtattggaatacatttttagtgaaagatattatagtgtataaattataatgtgcatagaaaagtgtataatgttatttataaattataatacaatacctaattttttattaatttatattatttatgtcttatttgtattttgtatagtaaatagattgttatatttgtttcaatttgcagaataatatagaaatatttggaaatttgtgtatttttgttagttgatgtgtatataaatcaattgtttttgtttgaaatttgatcaattagatgatataatgtgaaatttactctgcggtacaccgttggtcgatttttttgtaactaaaatttttaattttaagttatagttgttttgtaaatattgtttcttttgtttagtgtttaagattatataattttgttataattgttaattctaagatttcactcgtagattatcttcccgtattaatatcaatccaaactcgtttcaccatataacttcattccataaaattaaatattattttgttattttttaatattgttattgtaatataaaaaaaaatcgagggattgacatgtgatacatcttggattaatatatttaaaaataatttgtgatttataaatttatgatattgtaatatataaaaccaatttttagtgtaaacctttcaataagatgtagttcttataattaaagtatagtagtatttggttttatatggttaaatatttatagaaatgagatcatgttattaagtaagttgtaaaaagttgttcattgcttatataatttcttatttaatctacaaatagtcacgttttcttttctcataattgttaaaataattgtatatattaaaagtcaaaatttatataaattgatattgcaacctcatgaaatcgtagggatttacacgtagtgtaccacgggttatattttttttttaataaactgatatatttgttgattttagttaaaaataaaaaattaaattaagttatatttgttttgtttattgtttaagattgtataactatattttgattgttaattccatgattttatttgtgttataatattgaccaacaccccgctagtttctggtaatctagtgttgaccctgaaagaaaaatccataagaatacgcataaatagatagtaaaattaggagataaacatcattagaacatgaagtaatttacttatgaatatctatctattattttgaagaatcgatattctagattgattgtgaggcaatgtgaatgtatgcataacatttataagagatagattgtactcaaacttatttattatatttcgaatacaattaatgatctatcaaaaaatcatattattgtttgttccaaaacaagtcattcaaatttcaaagaaaaaataagaatattggtgtgaatcaatattttctcattttgaatatttgcattaaaaattttaaacattggtatttaaactttgttttactgttttacttttataataaatacaacatatgtagttttaagtaaatgtgtaaaatttgtatacaagttgttttggtaagaaacaagtttcctttgtattagaggatctaatttttggcctaacttagaatttagtctttgtatagtattttggttatatttgtggacctaattgggccctatattagattatttttgataggactgacgaaaaacggatccgataaccaacccaatacccgaaccaaaaaaccgggttagggctggttaaaattttaggaaatttccttattgggtagagttttagtaaacccgtggatatccgattggtccggaaattaccggttacccaaaaagagtattcaaaaacccaaacattaatttaatatccaaaatattatttatatttaatcgtaatataatctaattatctaagattataattataaatctaaatatgtcaattaattttggacctaaatatccaaaacaactaaactattcaaaaatcttttgttatgtttgtcaaaatttagtaaaatatattcaaatataattaaatttattaaaacttaacaaatttaaaagtttttttgtttggagacccgctatctacatacaaaataccggtttctatttttttgggtatttttagggcctgaaacttttatccaaatgacccaaacccaactggacccaacccgaaccagaaccgaatatttagaattattctattgagtaataaatcatataccgttaatcccaaacccgaacgggttctatccgaactcgaatgggttactcttatgcccaaccctattctctgatttaattatctaaaaactcccaaaaaaacatatgttttgccgactactttttatttgaaaaattttacatcctcttctgccaaaatcatttcataagacatcccaaaatcatttcattttatattcgtttttgaaaattcaaattatggcatatgcgaaaaaactctaattatttttttataacgatgatattatttttttcgcaaaaatagaatcatataaagatgagaggtaaattataataattaataaaaaattaatatgataatttagatatcaaatctaatttgttgattttaattggttacttttttggaaattaataatgtatttcgttttgaattaaatttaattaattaaattagtatttgactttttaattcttaaagagatgaattaatttactctttaaaattttatttctaatggcatacctatgtaattacttacaaaaattaaggttacataaaatgtaattcccaaatagggtgagaagaagacgagagaaatatcacaactacccaatatcatccttgtagccttagcagcagccatgaattccaattcagtgggtgcatttcgtgagagggaaatcgatggaaaaccattttacattgtcactttttcttctcaaacagacaccacaatcccttcttcctctggtgaaacagccattgatggcgatcacgacctctcttttcaacaacctcttttcctctgtccttctttacgtcttaaagctgacgaggaaaactattcttatagtgaacttctcccgttcaatatttccccgctcttccccagcataagtagcgctgatcaacaagtccagcatttgcttgattccgacagccgtgatgctaatatctgtaagctccctgttgtccctatctattggtgtaacaataaacacggtgattatgctcaattcatttgccgtgcatgtgacacattcaagattgacacagactattatatatgtctcacatgtgatcaaatgttccacaaagaatgcgtggagtctccgcttgagctcaaaaacccttcgtatcaaaaaccatgcgtgagttgcatgtgctgtgatttagctctctttagcttgttttatcattgtcccacctacgaacttagtatgcatcccgtttgtgcgatgaagccaatacccattttcatagacaactcaaaaaggcatccccaccttctcaccttttttcccaaacaagcttccttactttgcgatgtttgtggcctcattaaagaagctttccccacctatgtgtgtcctcgatgtatctttgtagcccatcaagattgtatctattttccatatgtcatcaaaatatatcgtcaccaacaccgtatctcttttacctcttctcttccatctggaaaatggtcttgtggagtctgtcgtaggaaggttgacaacaattgtggtgcatacacttgcaacaagtgtagccactattttgttcatacaagatgtgcgttgcgcaacgacgtgtgggatggaagggatctcgagggagtacctgaagaacctgaaataattctcgagctatttgagacgatagctgatggaataatactccatttttctcatgaccatcatcaaggccatttttctgatggaacaattgtggtgtgcctcggtttctgaaccatttgaatatcaaggccatgagcatcctttattcctagctttagacccagaccaagaacttgaggcaacttgtcaaatctgccaacagaaagctacttttcttcaaaaactaaattgcatcgaatgtgattatgttatttgttttaagtgtgctactttaccatacgaggcaaagtataagcacgacacacatctcctcacattctgggaagggaaagaggaaagtgatcaatacggctggtgtgaggtctgcgaaaatcaaatagtatactcaagagaagatggcttctatgcttgtgatgactgctgcaccactcttcatgttcattgtttgcttggagaagacatgtatatgctgaaacctagtcaaaccataacgtatattaagagggaggttcatatccttcccaacaatacccggtctcgaccattatgccattatcatgttgataaccgttgtccacaaaaagtagttttcaaatcggaggacatgacattttgttcgttccgttgttttacacgaaacgctgtgtaatcttgattccttgtcaacgttgtaatctttttttttttttatcaaaaacgctttgtaatttctacatctactgtcagtttcttatcttttccaaatcggtacttctctatgtccatttgccttgatctcatatttttttttgtttgtttcggtcatcaattctatatggactatatatgttttcactgttagtttgctatctaatctattagtttcctctgttttaaaatgtggtatgcagagaacaagcatgtgagaaacttgtagtagaagagacgggacggatagaagagtcaagagcctattgattctccagtcttaattgttgatgtattgttaacgagttttatatcaagatgaagagaaacataaagcgatacttatggatggcaaataatgaaggcaaagctgttgaagtagttcttgtattaagtcaaagtaccgcacgaagtagttcaggagaacagagcaaagtgaagcaaacatatggaaattagcaagtcggtttatagaggttggttatggatactagaagtttggagaagattttagaagactgaagggtttacttttcatgagaggtgtaaggttttgatcaacacttagctcacaaaactctcgaatcaaacgacttaaactttgagaatgaatcgaaactttgaagagaacttaaaaaaacaaagacacacacgatttaacgagttcacgttcctcaaccggaatcgctacgtctcgccggagaatctctccggaaatccactagaacctttctttacaatgtatctttacaagttttctctctctagttctctctagaacttgattacaattctctctttttctctatctccgatctaacagaattacagagaagaagaagaagatatagttacagagctcatgcgaaaaagaccaaaacaccctcaagcttgttatgaccttagtcagctcgcctcacgtgttatgactttagtcagctcgcctcacgtgttatgactttagtcagctcgcctcacgtgttatgactttagtcagctcgcctcacgtgttacgcttgaatcacgacagacttcgaaccctctctttcaccgagtttctcccacacttagacccgaagactaaaatctgagtcacttcttacaattctccaccttgactctgattgtcttccttgtctcaacttgttctagttcttggatctcctctccggaacctgagaattacctctcagttttcagtgactcggagcatattcaatgctccttcaaacttagccagtggaacagttttggtgaaaatattagcaggattgcattctgttgcaatcttcaccacctttattaaacctgcacatatgatatctctgatgaaatgcaacctgatatcaatatgctttgtcctttcgtgatgcacagagttcttcgctaatgttatagcactttgtgaatcactgtgaacttccacataatcctgtgaatgtccaagctctgcagcaaaaccttttaaccacagtgcttcttttactgcctcagtaagggccatgtactcagcttccgtcgatgaaatagccacgaccttctgcaattttgacttccagctaattgtgttacctcccacagtgaacacataaccagttattgatctcctggtatcaaagttgctgccataatctgaatcacagtaccctcttagcagaaagtcttcctgcttcctgaaacataatttcttcttttcagtacctctcatgtatctcaagacccactttaccgcttgccagtgatctttaagaggtttgctcataaacctacttatcacacctaatgaataagcaagatccggtctagtgcctatcatagaatacatgatactcccaattgtatttgcataaggaacaatcttcattctttcaaactgttcctcatactctttatctgtagcagctttgagcttgaaatgaattcccaatggtgttgaaaccggcttagcattgtccatctgaaatgatctcaggaccttttttacatagccttcttgtgacaaagtcaacaaaccagcatcacgatctcgagaaatctccattcccaaaatcttcttagcatctcctaaatctttcatttcaaattctctgcttaataactgttttagctcattaacctcagacttgttagctgaggctatcaacatatcatccacgtacaaaagtaagtaaatgtatgtatcaccattgcatttcttgaagtacacacaactatcataagcactcctagtgtacttaattcctctcatgaattcatcaaaccggagattccactgcctaggtgattgtttaaggccatagagagatcgtttcagtaaacataccttatttgatcctctcttgatttcaaatccctccggttgagccatgtagatctcttcttctagaaatccatgtaagaatgccgttttgacatccatctgttgcagctccatgttgtagtgtactaccattgacaagagatacctgatagacacatgcttaacaacaggtgagaagatttcattataatcaactccttctttctgtgtaaagcctttagctaccaatctggctataaatcttggtgcctcaactccaggtattccagcctttctagtgaacacccatctacaaccaatcaatttaaccttttcaggctttgttacaagatcccaggtgtgatttttactcatcgacaccatctcttctttcatagctgcattccacttttcccaatcaggatccaaaagagcttcctggtaagattttggttctggcttaccatcatcttctgagtaataagcaaagccaaccatgttcgactcattatactttggatttgctttaatggttctgcgaaccctgtctctgaccaactgataagtactcagatcttctactgcatcagaatcttcttcttctgattcttcgtcttgactgtgtgtaggtgagttaaggactggattatgacttgtagttgcttcacttggatttgagttatcttgggttgctccaccttgatctgtaaactcttgatcattcatatccgggttaactcttaaatcctctaagtcactttcacttatagtgttctgtgaatcccctttcaagtctttaaacatcacctgttctctgaaaataacatttctgcttatcacacatttcttatcttctaaaacccagactttatatcctttaactccctcaggatagctggtgaagatccctttcttggatctcgggtttaactttccttggtctgcatgaatatatgctaaacatccaaactttcttagtgaacttagatccggaagagctccagtccacttttcttctggtaaatcgaagtttattgctgtagagggtgacctgttgatgaggtaaactgctgtggaggctgcctcagcccagaacttcttctccataccactcctactcaacatactcctcactttatccattattgttcgatttaacctctctgcaatcccattctgctgaggtgtgtaagcacaagtcttatgcctcactattccttcttctttgcaaaacttttcaaagtagtgattgcagtattctagaccattatctgttcttagcttcttgacctttctgtctgattggttttccaccatctttttccattcaacaaacttctcaaatgcttcatccttctttcttaggaaatagatccaaacttttcttgagtaatcatcaacaaaagagatgaagtattgactgttcccaagtgatgcaggattatgtggtgagccccacaaatctgaatggacgtatgccaatttttctttagtaacatgttgtgcaggagcaaaactgactctgtgttgtttaccatacacacaatcttcacagaactcaagttctttaatcacttcccttctcaggcatccctttttaaccaaaatttccattcctttctgactcatgtgaccgagtctactgtgccataaggcagtctcatctttaacttctgcagaagaatgtgattctccttcttcagtcacaccatctagtatgtatagagtatctcttttctgaccttttaagatagtagagcaaccttttacaatcttcagaatgccatcctgagacttgaaccagcatcctctatcttctagtgtaccaagagaaatgagattcctagtcatattgggcatgtatctcacatcagtaagaatcacttgagatccatcagagtttctaatcttgatactgccaattcccttaaccggagagtaagtatcgtttcccatcttgacataacctgaactcaactctttaaaatctttaaaccagtctttccttggagtcatgtggaacgagcatccagtatcaagaacccactcatttgcaatgctatctgtcaccaccaacgtttcatcagtagccagtagaaccatagcaggattaaaagcttcagtggacttagccaaactagactctccattatctgaaccctgctgttttgacttgttcctttctatccacttataacattgcttcttgaagtgtccttctttgccacagatccaacatactctcttaccatctgctgacttagaccttgacctattcttgcctttattcccttggttattgttcttaccatctggtcttcctctagcaaaatgaccttctacaactggtctattgttctgagacaattctctctctttatctcttgctgcaaccatcacatcatcgagtctaagcttttctctgctattactgtacttcatagtttcaaccaaaccatcatatcttgcaggcaaagaactcaacaacaatatcgcttgaacctcatcagttacatcaatctgaagatggttaagatctgcaacgatcttgagaaaatcatcaatattctcatcgatcttcttattttcttgcatcttgaatgtatagaaactcaattgagtatatactctatgcggtaaagatcgaatcatgaatagtcgatccaacgtttcccaagcttctgctgcggttttacatagctcaatctttctcaagaccttatctgcaacattcagaaaaatcacattcttcgccttgtcacagcgctcgagccttgctacttcatccgcatctcgcttcttacgtttctctggatcttcttcttcttcctcggttagaggtttcggagtggtcccaagcacaacgtctttcaaaccaatgacgctgagatgagccatgatccttgtcttccagagtgagaaatcaccggatccatcaaagatcgcgattggattaccagccatactccgattcgaactggctcaagaaccttgagctctgataccaatttgtaaggttttgatcaacacttagctcacaaaactctcgaatcaaacgacttaaactttgagaatgaatcgaaactttaaagagaatttaaagaaacaaagacacacacgatttaacgagttcacgttcctcaaccggaatcgctacgtctcgccggagaatctctccggaaatccactagaacctttctttacaatgtatctttacaagttttctctctctagttctctctagaacttgattacaattctctctttttctctatctccgatctaacagaattacagagaagaagaagaagatatagttacagagctcatgcgaaaaagaccaaaacaccctcaagcttgttatgaccttagtcagctcgcctcacgtgttatgactttagtcagctcgcctcacgtaagaaagtataacgcttaaggggactgaggggtttgtcttgagaggttcttggattgtataggaatccatgaacgttagagattagataattgtttgagtgaaacttgtaagtttactaaacagattttctaataaagaagctttttgttttgaagaaactacgtcttagcttgtgactcagttcttgaatcgatttccatatacataaatagctcttgcgttttcattaatgatatgcccaattcaaatttctgtgactccatgatgatattcttgaaactggtacgacgagttaggattaatctggctatgattcaaagaaacatgtagtttgtgctggcagtagaaaccaagttttaagcaatctagaaaaaaaaaaaaaaaaaaaagaaaccccaaaatagtcaacaggataaatttttccaatgatctgatggttttaagttgatcaggggacatctgcattgccgacgacgcgttcgatggtcaacgcattaagcttgtaactcctggactgaaacattaactttgttctgtaagttttatacaagttgtaaatatgaattgcaacttttttgtttgatcaacttcctttttttgtttgacaattgtaaacatattaaacgacttgtctgatcttatattatgactgaaaaataaaacagatttttatattatacacataataattatgtctaacgtgtgagagagtcagagattgtgatacttttttaattgagaaaattagtagaaagatttatacacattgatcaaggttagctgtgtgtttcaagttgaacatacgaaagaggagagaaggagacagaaaaaaatatcacaacatcgtttttagaagcaaccatgaacctagtcggtgaatttcgtgaggaagaaattgatgggaaaacgtttttcttatacaattcttcaacctcctccggtgaagacattcctctccaacctcttttcctttgtcccctcttacgtgtcaaatattgggccatatgtatggaccttatatgttttgggctttaactgtaacttatcgatgaagtctcataaacccttgtgtaaaccctagcagctttgtgtatataagcaattgtatgaatgatcaataaagcaagtcagttcgatatctaattctacatggtatcagagcttaagatctctcaaaaaaaaaaaaaaaaaaaacttaaatttcttccgcttgttacatcgatagtttcgattagtgtgttttgaaaaaaaaaaaaaaaaaaaaaaaaaaaaaaattttttttcgatagtttcgatctggttttctcttgaagttgtgttctaacaagagatgtcagaaaaagaaggagagattacctctggaagcacaacaaagatgggtgcatctggtggttctcgtgttgattccctgatggtgtctccgtacacattggcaagctcagataatccaggagctgtgatctcgtcggtcgagctcaacggtgacaactacaaccagtgggcgacggagatgttaaacgcactccaagcaaagcgtaagacaggcttcatcaacggtacgataccgagaccaccccctaacgatcccaattatgaaaattggactgcagtcaattcaatgatagtgggttggattcgcacttctattgaaccaaaggtgaaagcgactgtcactttcatatctgatgctcatctgttgtggaaagatttgaaacaacgtttctctgtgggaaacaaggtgcgtattcatcagattagagctcagctttcgtcatgtcgtcaagatggacaagctgtcattgaatactatgggcgtttgtctaatctgtgggaagagtacaatatctacaagcctgttacggtgtgcacttgtggattgtgtaggtgtggagcaacctctgaaccgacaaaagagagagaggaggagaaaatccatcagttcgtgcttggtcttgatgaatccagatttggtgggttgtgtgctacgcttatcaatatggatccactcccttctcttggtgaaatttactcaagagttattcgtgaagaacagaggttggcttcagttcatgtgcgtgaacaaaaggaagaggcagtggggttcttggctcgacgtgagcagctcgatcatcactcccgtgttgatgcttcttctagtcgatctgaacacactggtggaagtagatcaaattccataatcaagggccgtgtcacgtgctcaaactgtggacgtacgggacatgagaaaaaggaatgttggcagatcgtgggttttccagactggtggtcggagaggaatggtggtcgtggttcaaatgggcgaggtcgtggtggtcgtggctctaatggcggtcgtggacaaggtcaagtcatggcagctcacgctactagctccaattcctctgtttttccagaatttacagaggaacatatgagggttctcagtcaacttgtcaaagaaaagtcaaacagtggatccacttcaaacaacaattctgatcgcttgtctggtaagactaaacttggagatattattttggattctggtgcttctcaccacatgactggcacgctttctagcttaaccaatgtggtaccggttccaccatgtcctgtgggattcgccgatggaagtaaagcgtttgctttaagcgtgggagttttgacactttcgaacacagtctcgttgactaatgttctttttgtgccttctttgaactgcactttgatttcagtttctaaacttttgaaacaaacacaatgtctcgccactttcactgatacactttgcttcttacaggaccgttcttcgaagactttgattggaagcggtgaagagcgtggtggtgtgtactatcttacggacgtgactccagcgaagattcatactgcaaatgtcgattctgatcaagcattatggcatcaacgtttaggacatccgagtttctcagttctttcgtctttacctttgttttcaaaaacttcatctactgttacttctcattcatgtgatgtgtgtttccgagctaaacagacgagagaagtttttccagaaagtattaataaaacagaagaatgtttttctttaattcattgtgatgtatggggtccatatcgagttcccgcttcttgtggtgcagtttatttcttaaccattgttgatgactactcaagagcggtatggacctatttactgcttgagaaatctgaggtgcgacaggttctcacaaattttttaaaatatgcggagaaacagtttggaaaaactgtgaagatggttcgtagtgacaatgggacagagttcatgtgcctctcttcttatttccgtgagaatggtatcattcatcaaacatcatgtgttggtactccacagcaaaatgggcgggtggaacgcaagcaccgtcatattctcaatgttgcgagagctttgttgttccaagcaagcttacccattaagttttggggtgaaagtattctcacggcggcatacttaataaatcgtactccatcttccattctctctggtcgtacaccatatgaagttctccatggcagtaaacccgtttattctcagttgcgtgtatttgggtcagcatgctatgttcatcgagtaacacgtgacaaagacaaatttggtcagcggagtcgctcttgtatttttgttggctatccgtttggtaaaaagggctggaaggtttatgacattgagcgcaacgaatttttggtgtcaagagacgttatttttcgtgaggaagtgtttccttatgctggtgtcaactcctctactcttgcgagcacatcacttccgacagtttctgaagatgatgattgggcgatcccacctctagaggtgagggggagcattgattctgttgaaacagagagggtggtgtgtaccactgatgaggtcgttcttgacacctctgtttccgactccgaaattccaaatcaagaatttgtgcctgacgacacaccgccgtcgtctcctttgtctgtatctccttccggttctccgaatactcctacaacaccaatagttgtgccggtggcaagtccgatccctgtgtcaccacctaaacaacgaaagagtaaacgtgctacacatccgcctcctaagctcaatgactacgttctctacaatgctatgtacacaccatcgtctatacacgctcttcccgctgatccatcacagtcttctacggtcccaggtaaatctttgttcccgttaaccgattatgtctctgacgcagctttctcttcatcacatcgtgcttatttggctgccattaccgataatgtggagcctaagcattttaaggaagctgtccaaattaaagtatggaatgacgctatgtttactgaagttgatgcgttagaaattaacaagacatgggacatagtcgatttgccaccaggaaaggtcgctattggaagtcaatgggttttcaagactaaatataattcagatggaacggttgaaagatataaagctcgtcttgtggttcaagggaacaagcaagttgaaggagaagattacaaggagacttttgcgcctgttgttcgaatgactacggttcgcactcttctccgtaatgttgctgccaatcaatgggaagtttatcaaatggatgttcataatgccttccttcatggtgatcttgaagaggaagtctatatgaaacttccacctggatttcgtcattcacatccggataaagtttgtcgtcttcgtaagtcattgtatggtttgaaacaagctcctcgatgttggttcaagaagctgtccgattctctcttacgttttggatttgttcaatcatatgaagactactcacttttttcgtatacacggaacaatattgagcttcgcgtgttgatatatgtggatgatcttttaatttgtggtaatgatggatacatgcttcaaaagttcaaggattacttgagtcgctgtttttctatgaaggacttgggcaaattaaaatactttctcggtatcgaagtaagtcgtgggcctgaagggatcttcctctctcagcgtaagtatgctcttgacgttatagccgatagtggaaatcttggttctcggcctgcacacactccattggaacaaaatcatcatcttgcttcagacgatggacctcttctctccgatcccaagccttatcgtcgtcttgttggccgcttgctctacctactacatactcgtcctgagttgagttattcagttcatgtgttggctcagtttatgcagaatcctagagaagctcacttcgatgctgcattgcgtgtggttaggtatttaaaaggttctcctggtcaaggcattttgttaaacgctgatccggatttaacgttagaggtgtattgtgattctgattggcagtcatgtcctttaactcgacgatcaattagtgcgtatgtggtgttgcttggtggttcccctatttcatggaagacgaagaagcaggatacagtttcacactcctcggctgaagctgaatatcgtgctatgtcctatgctcttaaagaaatcaaatggctacgtaagttgttaaaagaattaggcattgaacagtctactccagctcgtttatattgtgacagtaaagcggctatacacattgccgctaatcctgtgttccatgaaaggaccaaacacatcgagtcggattgtcattcggttcgcgatgcagtacgtgacgggatcatcacaacccaacacgttcgcacaactgaacaacttgccgatgtttttacaaaggctctcggtcgtaatcagtttctctacttaatgtccaagttgggcgttcagaatcttcacactccaacgtgagggggagtattgggccatatgtatggaccttatatgttttgggctttaactgtaacttatcgatgaagtctcataaacccttgtgtaaaccctagcagctttgtgtatataagcaattgtatgaatgatcaataaagcaagtcagttcgatatctaattctacatcaaaactcacagccaaaaagatccggaggctaattctgatgaccaaggctttgtcctgttcgatatttcccctcacttccccagcgctgatccacaagtccactatatgcttgattctcacaaccgcggtcttatctgtaagctccctgttgtccctctcttttggtgcaacaataaagaacctaatggtgccgacttctgttgtagtgcatgcaaactcacaaatcttggcacagcctactatttttgtgccacatgtcgtaagaagttccacaaagaatgtgtggagtctccacttgaaatcaaacacccttcctatccctttcaatctctccaactttatagttctccctttgctcttgtgaattgcatatgttgtgatataagtttccaagacattatttatcattcttctaatcacaaactgagtatgcatcctgtttgtgcgatgaaaccagtacccatttttatagaccacacaaaaagacatccccaccctctcactttttcccctagggaagctttcttaccttgcaatgtttgcggcctgattaaagaatctattctcacctatgtttgtgttccatgtgactttgtagtccatcaagattgtctatatttcacgcatgtcataaaaatatctcgtcaccaccaccgtatcatttttacctcttctcttccatatggaaaatggtcttgcggagtctgtcgtagggaggttgacaatcattatggtgcttactcttgcatcaagtgtggtgattattttgttcatacaagatgtgcattgcgaaaagatgtgtggaatggagaagatctcgagggagtacctgaagaacctgagatagatgttgagccatacgagacgatagctgatggaattatactccatttttctcatgaccatcatctaaaactcgagatcaatagagtttacgatgaaaacaagttttgtcaagcgtgcatccttccaatctatgagggtacgtactattcatgtttggataaatgtgaattcatcctacatgaagcatgcgttaatgcccctagaaagaaacaccatccgttgcatactcacccgcttacgcttaaggtcgtcagtattggatacgatcattacagaagaagaggaaattacttcgactgtggtgcttgtaagcgtgcaagttgtggttttgtctatgatagtcaggatttctcacttgatttgcggtgtgcctctatttccgaaccatttcaatatcaaggccacaagcatcccttatttctagccttagagccagatgaagaaaaagcggcgatatgtcaaatttgccaagaagatggtgatggaaataactatattagaaaactaaattgcatggaatgcaagtatattatttgtttcaggtgtgctacattgccatacaaggcaaagtacaagcatgacaaacatttcctcacatttcgggaaggggaagagggaagtgatcaattagactggtgtgaggtatgcgaaaagaaattaatatactcaagaaaaggtgggttctatgcgtgtgatgactgttgcaccactctccatgttgattgtttgcttggggagatgagtgtatgttgaaacctggtcatactgtaatgacttataggtcaaacattcatattcttcccaacaataccatgactcgacctttctgccatcgtcataaagaagatcgttgtccacacaaagtaattttcaaatgacatgaaatgacattttgctcttacagttgttcgatggattaaatgtcatcatcgccggtgcttcgtcgtttacttctagatctctacttttctagttccccatttgcttcatcttcttgttgtctggttgtttacgttttatcaaaccacgaattaaactcgttgttttcgtttctattcgaaagaatattataattagcccagtcacataaataaattttgtaaaaaacacatgtttctcgattcatttaaccggtttattccaaaccgactcgaaagaactataagaaaaacatttgagtcggttttgaataaaccggccggtgccaggttaacggcggttagcagttatgtcggcggaagaagtattcgttacaatatttgttttaatcccaattagtctccttctcctttctctctgctctctcgttcaacgggcaaagtttttttcgaataaagttttggtttttcttttaacgttcccttcttcttcctcctcctcgcgaattcgcttatctgtcgatcacgatgagctcaagttcgaatccaccggtttgttcaccggaaaaggtcagatttttccctgaaatctgattagggcttttcatttcttgtgatcagattgttatcttcgcctactttggtgtgagttcatgggttttaggtctgaatcggaacacgttttaacgtgtcttggaacagggtctgaattggtttctaatgattaggattgtataaaccctaaacatccatcttgtgcttgaaagaaatcgactcgttttttttggtgagatctggcttctattttgcggccgttgagtttttagggttttgtgagttttgattaattatttgtataaagatacgttcttgttcattttgtgctcaatccatgtttttaacgaaaattctggattttggtgattttcatggggttttaggaggaaagaagtgaaatgaagattgagattcaatgtatggagaataagcaaccattagctgcttcttgctcctctgcatccgaaggcagtggctgtttcttcctcaagtcacctgaaatcgcaactcctgccacagtatcttcatttcctcggtacttttactatcttttacatttcatcttctatctgtgtgtttatacaacttattatgaaattgattgattggaaagactgtgctttgatgacttacaccgaactcattttgggtttctgcaatgttttaatgttgatctgcaggaggactagtggacctatgagacgagcaaaaggtggttggactccagaggaggttagtggttgcttttgtttcattattttgttggtgtctggagcaacctcattcgactatgtatcttgtatgtataaggattactgttcacttgaatgaaagaggaggctagcattattgtggtctgtaattggtttctatcactattcaggatgagacacttagacgagcagttgaaaagtataaggggaagaggtggaagaaaataggtaaatttcttttcttgaatctgtttcctgaaaaagtagtattgcaatacattagaatgagattataggtcttctaatcacactcttgtatgtatacttgaatgtataatttatacatttttaaaactgaactcgtatcttaaatctgctgagaattttgtgaatttttctcattcagtaaacatgatctctgctgtgcactgtgcaagagaaccatgatttcttttttgtctcttaaatgttaaagtagctggtttcggtcaatgttctgtttgtttgatttttttgtatttcatcttacagcggaatttttcccagagagaacacaagtccaatgcttgcacaggtggcagaaagttcttaatccagagcttgttaaaggaccttggactcaagaggttctcttatcattttcatgttctgaaactttttttggttttcattttacgtaaatatttggtagctctaaaattctcttcaacaagtttacagtggctccatcgttgaatccatctgtgtacatatgatccgttgtctgtgtatattaatatgggaaaaatgtcgaaaaaatcatgaacttgcaatttttggacgatttaatcttgaacttcaaggaagactaataaatcgtaaagttattgttaactttctatataaatgacgaagtttctgttgacttgtctatttagtcacgtcgttaaataggtttaatagaatcgattacgacgttaatactcccgtttagctgctctgttagaataaaacgacgtcgtttctttctcagacaaagcgagataaaacaacgtcgttttatctgttacccaattttaatccctaaaatccctaaatcaaatcgacatctctctttcttctcttctcaaactcgacatctctcttatcaatttctctgttcgatcgaaatggctaaaactcgtgggggggaagagaagagatccggttcgtcgatcacggagactgagtcaagcatccgccgaatcaaatcctactgaagctgaaccaattttaattccttctgtcgacgaggctaatcgaaagaaaagaaaaaggaagaaggtagttgaagtagatattgaggaagatcgtgagcctgtgagtggcgatgattgtgaggttgttggtgacgaagattgcgaagaggtttgctatgcagacaagagaatcgggaataacgaagaacatggtggagaggaacaatgggacattgacattgtttctgttcagcaagaagacgatagaagtgctgtcggggaagaaggaaacgttgcagctggggttgaggaagaaggaaacgatggaggtggtgttggggaagaagaaaacaatggagttggggtcgaggaagaagaaatcaatgaagttggagctgtaggtgtggaagaagcacacgttggacaagatgttgaagaagaagacgacgatggaggtctaggtgtggaagaagaagattgtgaagattttgaagcagaatttggagcacaggcgagagaggaggaagacgaaagcgatggtgacagtggtgacgatatctgggatgacgagaagattccagaaccagtgtaccatagtgatgatgaagaagttcatgacgccagaatttgacgatcctgaaaagcttttgaggttggggaaaacattcaataacccagaagatttcaaaatagctattttgaggtactctcttaagactaggtatgatattaagctatatagatcacaaagcttgagagttggagcaaagtgcacaaatactgatgttaagtgtcaatggagatgctattgctcctatgataaaaagaaacagaaaatgcaagtgaagatattcgtagatgaacattcatgtgttaggtcgggttactcaaaaatgttgaagcaaggaacaatagcttggttgtatagagatagactgataaagaatccgaaaataaccaaaaaggcgatggtggatgagatccaaagagagtataaactcactgtaacagaggatcaatgttccaaggcgaagacaatagtaatgagagaaagaaaagcaactcatcaggagcacttttcacgtatttgggattaccaagctgagatcttccgcactaatccgggaacaaagtttgagatcgagactatcccggggccaaccattggaagcttgcaaaggttttatcggcttttcatttgctttaagtcacaaaaagattcttggaaacaaacatgtaggcctattataggaattgatggtgcattcctcaaatgggatataaagggacatctattggctgcgactgggagagatggagataatagaattgtaccaatcgcatgggcagttgtagagatacagaatgatgacaattgggactggtttgtgaggcaactctctgaatctttggatcttcaagatggaagaagtgtagcaatcatctcagacaaacaatcggtgagtacactaactcttttggtttatttgtttcaagaatcaaactcttctcacatgttaggtttattcttatcaatgattttcagggtttaggtaaagcaatccacactgtcatcccacaagctgagcatagacaatatgctagacacatcatggacaactggaagaaaaatagccatgacatggagttacaacgactcttctggaaggttgctaggagttacactgaaggataatttcaagcgcatatgagagcattgaagagttacaatccaagtgcgtatgaatctttactgaagactaatccgctgacatggtctagagctttcttcaggattggtagctgctgcaatgacaacctcaacaacctcagtgagtcgttcaatagaacaattagaaatgcaaggaggaaaccactgctagacatgttggaggacattaggaggcagtgtatggtgcgaaatgagaagaggtttgtcattgcttacaggttgaagagtagattcaccaagagagctcacatggagatagagaagatgattgatggggctgcggtttgtgatagatggatggcaaggcacaacagaattgaggtcagggttggacttgatgattcattctctgtcgacatgaatgatagaacttgcggctgtagaaagtggcaaatgacaggtataccttgtattcatgctgcatctgtcataataggaaataggcaaaaagtggaggactttgtcagtgactggtatacaacttatatgtggaagcaaacatactatgacggtattatgcctgttcaaggcaagatgttatggccaatagtcaacagagtgggagtgctgccacctccatggagaagaggcaatcctggaagaccaaagaatcatgataggaggaaaggcatttatgaatctgcaactgcctctacctcaagtaacacagagttatcacgcatgtatcgagtcatgacatgtttaaattgttaaggagaaggacacaacaaggcaggatgtaaaaatgagacggttgcacctccaccaaaaagaccaaggggtcggcctagaaaagatcaggttcggtttatatcctctttggcatcataatgtggcttcaatctttttgaattctattgaattaatcttgtttgcaaacaggattcgaggactatcttgtttgggcatggacaatcatggcaaggatcacaaggtgaaccatctgtagcatctcagccagctcagccatcgcagccatctcagccatctcagccatctcagccagctctgtcccaaccgtctctgtcccaacagtcccaaagagcaccatctgcaccatctgaaccacctgcaccacctgcaccatctgcaccatctgcaccatctcaacgagtttcaccaagaggagtagcacagagaagagggtcacagagaggagtgtcaagtagaggaggatcgcagagaagaggatcacagagaggagggtcacagagaggaggattagaagggtgggggtcatggtttgaatgttcaaacaatcggtgaatttgggttgtcttgtttgcttttgtgggttactcggataagaaactgcagtttgtcttcatgcagccagaacttatgtgtgtgtttttgtgtgtttgtgggatcatgtgttcctttttgttttagaccaagatacataacctgtttggtgcttgtgtttgtttcggttaatgttcaaaaacatgtttcattttgcattttgtctttaaatttgtcattccataataagtttcaattcctcattctttaaattcgaatcaaaccaaacttgcattgatataaagtcaaatgttacaacacacaacacactaataaccaactacaagcttcttctcattaacgaggccaaacaacacgaagaaaatcacaatggtgataacaaacatccacacaatacacactttcaagccacaccagtttcttcgggtcttcatgtcgttgaccattgcttcttctctcatttcttgaatcatagcctttaactcatttgcctcagatttagctttgcttatctcatttgcaatgatggctaatcttggcaaagcatcttctacttcttcaaacacagcatcttcgacccatttgaacacatgatccttagaaacaaacaatttacacattctcagcttatacaaaaagctccaaccaagaacaaattttatacataagtcaacttacatcccttttggttgaccacgaattagcattccttttgctaatacaccggaagaacggtcgtcatgggttctcttgcgtttttgagacgaacatcgtgacctctaagccacacacacatttcgtcggcataccccgttctctggcgacacctgaggttatagaacttgaactcattgtaacagattgaaagaaagctatactagtaggaaatttcaacaaaaacagagagagatcgattttgaagtttcggatgtcgagtttgagaagagaagaaagagagatgtcgatttaatttggggattttagggatttaagtttggtaacagataaaacgacgtcgttttatctcgctttttctgagaaagaaacgacgtcgttttgttctaacagagcagctaaacgggagttttaacgtcgtaatcgattctgttaaacctatttaatgacgtgaccaaatagacaagtcaacagaaacttcgtcatttatatagaaagtcaacaataactttacgatttattagttttccttgaagttcaagattaaatcgtcccaaaattgcaagttcatgatttttttgacatttttcccatattaatatatacatatatatatatatatatatatatatgtagtagcttaattaaacaccaaaagcgtgagtagctcaacggtttaatgcttgactatagatccaacaatctaagttttgactctaggttgtgtaagctttttatttatttttaatttttaaacgacgtcattttgagctgttaacggaaaattaagtctgttatttttccgttaacggaaatttcacggcatgctttaaatggccagtttaacaaaacttagacatttttttaaaaagtcaacccaaactttaagatttaaatgatattttgaaagtttatgcttttttcgtcccaaatttaaaagttgacgcatttttcgacatttttctaattaaaaagtgtataggttttgtttttaattgtgatgaatggcttctaatggatgatttaaaacaaatcgttcaaaaaaatataatcaaacatatgaaaatagaagaaatttgaaaactaaaacatatatttttttttaatgaagaattaggacaatagagagtctatatctcgtaatgaagagaagcttaagaaatggattttaatatataggggattgcgaaagtattagggtttcaaattttaaaaatatgtgtaattatgttttatgaaaataataaagtaatatgagatttgattctttgtattcactgaaaataaatgattttaaacaaaaaaatcaggatgattaatgctaattgatcaagtgtgttatatattttagtttagatatggaaagatttaaatgttgcaagaatttatttcataaaagtgttgcaaaaatgtatatgtagataggttacattgtaaccacatttttcatttcttttttctgtcaaaagattttcactccatatataccaccgaccatcacatatatggtaatgtgtaatctatacattagctatgatttttaatcaatgtttgaattttttttccgataaaagtatctttgaatttttaataactgaaagttgaaaaatagattgtatatttgcatgttatagtgtggtccatttcttataactatttaatatacactcaataaaacaatattcattgattttcaattttagaaaacaaaatgaaagttataattagtatattggtttatgactgaaaaaaagaaagtatattgccacatcttaaatgagctcccatcgaacttgtcgaacttgtcgggaaggaggcctgctgaatttgccgctggatgttgaaattgctcaagggcttcagtttgcatagattcatgtacaactactttcaccggagggagcgtaccaaattggatttcagcttcagtttcacccccattgttggtgacctcgtcgacgttcgagatgttgacgttctcagttgacacaaaaccagatcagtaccaaagttataatatgtgagttaatcaagagaaaatacgacaagttacaatctttctatttgaacacaaatgaaagcaaaaccagttgcatgtttctaattaagacgtcatcctataaacaattacacatatattttcaggtttcactctacacaattgataataaaaaaaaaacaatttgcaaacatgtgataacaattttgcaaaaaccaaaaaaattacaagcaaaaaaactgcaggttatgacaagaatcccaattcaaagtctaataacaattttaattttgcataacaacaaaccaaaaaaactggagattacatatatatatatattatatataagcattaaaatcatgtttagttatatttctctgtttataacataagaaatagaaaacatagacttctatttaagatgcaagttttgataatcttaaatttcaaaaaccaagctgcagtttgttgatgctctagagtcgcaactctaagggtgcgctttggtcaaatccgatttgacatttatttggccgcagacaataaactactctgaggctcgcaagctctcgtcacagtgagtttgaagtttagccaatcgcaattggtaaactcaatccgatacttgtaagcaatcacaattttcccacgtttatgaatctcaattccaatctgttactgttttttaaaacaaaacgaaagggttaagactataggagctaaaattaacaaacgctacgtaaagtaattgaaatcgaaattataaacgtttaaggaaagacaagagaggagttgagctgatgaactcttttcttaaccctttgaatcactcgttgtgtgacggattcggtgtgattcaaggattccagcatacagctctaacgaacatagtttccacgatactctcgagacttactttaagacagtgagagattgctggagatgttttgcttttgaaatatgtgtgaatgtgcaactgtttctctgctagtgtcaacaaagacttgaagcgtaactttcttatatatgtttgagatacttaggtttaaatttgtttcttcagaaaattaaaaccaagtcaaacagaaatataggagttagttggtgacttgatacttcaacgactcatattctcaaggagttgaggaagtgaagaagacatattctttagggacgtgaggaatggagtgacttgtttcctcctttcaagacccgacaaccaccggagctccaacttgagatataggccatctcttaagcccatttcttttcacacaagcttgacaaaaattgtggggagatgattctgatgaacgaaaaggggcacatcatggactgtagacttgacacgaaagaaatcatgtgcacctacatacatcaaatgaggatggagaagttgattgctcgagtaattgctcgatacacttaactgctaggtagtatatgcgaggtcgatccacaaggaccaaagatactctaaggatttctgagactcgtttttagctaaagcgaaaaggttgtttgtttggttttcggattgtaaattaaaatgcaaaaaaataatcgattaaacttttgtgataaaaagcattggacctatttcagagatcaatgattaatagagataagaaacaagaaattcagcataaagaaccgttctcgaacatgaacacaagtttagactaattctctctcgagacattaatcactaaatttgactacttaactacttaacttttgtttgtaattttctagtcaaattcgcattagaattaggttcacaatgcattcaaacatcaactcttgttggttagaaatatattgctcaattcacattgattcaggcattctatcgaacacttttgatacatagaaaaacctagaatctaaaacagggtgatcaatcctattctagcattaagaacatgtgaatcaaagaacttaaagattaagaactccaaacaacaatcaaaccataatagtgaattatttgtattttcttaactaagaatttttttggactttcattcgtactataactaacaaatcaggcttaactactactcctttttaatttcatttgttttttttttgtttttttctttaaactactagatattaacccgcggtataccgtaggcctatattttcattaaataaaaaataattgaatatttttaggatgatttaataaatttatgctattgtttgatttaaatgtataattcaccggaagacgaaattttataactcaaattttaaagttttaagttgtatttgtttattttgtcaaatgtttaatattgtataattgtattttgattgttgtttctcggatttcacccgtagtacaccatcccatattaatatcgaatcaaacccgtcaattctaggatttcacccgtggtaatatttaattgtataataataacttgattgtcattctaggatttcactcctacttctatcgcaaattattatcaacccaaaccagtctttttttttttttttttttttttcaacaaagaaatttatttattaaccaaagtcattacaatagtgttgatgtaaccaaataggtaaagtacaagaatcagaataaaaacatgttgaattgcaaccaagctttgccaactcatgtgctactttgtttcctccccgacgaacaaaactaaactgaacatttgaaaacttcttcgcccagatccgaatgtcatcaagaagatttgccagatggttgtgggaagaagatcctgagactaaattggttagagtttcacagtcaccctccataatcactcgtagatagcctctaatccatgtttgttgtaaggcagccagaagcgcctttgtttctgcctctaacggagtacttgtgttgtcgagttgcagtgatccccaatgctgtgcaataccatcatggtttcgaataatccatctagcagtggagtctaaattttggacattgaaaccggcgtcataattacatttgatgtgtgtatcaggcggagctttccacttcgtattgtgaaccacggtaatacaccatcccatattaatatcgaatcaagcacgtcaattctaggatttcacccgtggtagtatttaattgtataattatagtttaattgtcattctaggatttcactcctaattctatcgcaaattattatcaacctaaaccagtcaattctaaaatatcacccgtagtacaccatcccatattaatattgatttaaacccgttaattctaggatttcacccgtggtagtactgcgagagaaatcttataaaagaatcaaaatgtgtttaaaaaaaattaaagttttaagtgtttttttaatattgttaattttgtgtagtgtttaagattatataattatattatgattgttaattataggtttttttccgtagcataccatcccatgttataatccactcaaacccgtcacaccatataaccccgtcccgtgaaattaaacacaaatttgtcattttattataattataaaatttataaaattagaaacttctaaaaagattaatattgacccaaacttcatcattgaattttgagtgttatatctaagatttctctcgcagtatatcgtcccatattaatatcttttatattgtttaatttcttgtaaaatttaatttataattttttgaaactttttaaagttttaattctttaaaataaataaccctaataaacaaactattttaattttggacacctcataaatcaagtttcatgctcattcgtaatcgaaatcattttggtcctttttatagtatgggtctgaaccattgtccaatttttgtaagcgatgtgggacattgtacaatcgtaattattatctacctgaaacccgtcctaccatataacccagttccgtgaaattaaacataattttttcattttcttataaatttcaatattataaaatttgaaacttagaaaaaatacaatatcaaccttgattatatttaagatttttcctgtaatatatcgtctcgtattaatatattttatatatatttataatttttaaatttcttgtaaaattcaatttataattttgaaaactttataagttttaaaattataaatatttaaagcagtttttaaagataaactttataaaaagtttttaaaattataatatttaacttttgataaagttataatatttataatttcttgaaacattttaaagtttcaattctttaaaataaaaaacccgagtaagtaggataactattttaattttggacgcctaataaatcaagtttcctgctcattcgtaatcagaatcattttggtccttttataatatgggtctgaaccattgtccaatttttctaaacgatgtgggacattgtacatatattatttcttcataggttgaataatatatgtccgttttaaaaaaaattcaattacatcatatgcagaaaaaatataatattttattaaatatatatattttatataaattcaaaataaatagagtataagatcaaataaaagtgaaagaagaattatatatttatgtttaaattaggtagaaatattttaggaaatatggttagtttagagatattgtttatattaaatttggtaattaaatcattaattttcgtttttaattattagtttgtagttaacttttccaaaaattaatgttatcaaagatcagaacagaattaaacatgttatccaagatccgaacagagttaaaccgggttatacccacccattgcaggtttaagattatcaaaacttgcatcttaaacactatatatatagattcattccacctttttggaaatttaagattatcaaaacttgcatcttaaacactatatatatagattcattccacctttttcttctctattacactattactctcattctttaccaatcaaaacctaaggtgatttctatttgggaattctttagctctcaaaccagttctcacagtcgttttaagcagaaggaaaatacataattaccatcctccaattcttttaaatttaaggctcaatggtgtagctttgaatccgccgtagatcaccacaacatcatttgcacatttttgttattttgttaagaaaaatggttgtttacttacctaaaagcgtaaatgtatttttgaaaacatagtagccgtaaacgttcatttattataaaaaaaagttaaggtaaaccaatacaaggtgcaagtaaaattaataacccaatgaaaaatgacaaaatctcaacatggagacttgaaactaggatacattcaataacactctcatagagttttaaccactagactataaagaatgtttgaaaatgtatctcatttttctttgaataatatgaatggacgggccgggcctgcgtaagcaaaatgtaaccactagacattcaataagcataatgctttacttgccttatggacgggccgggcctgcgtaaaatacatttgggaaagaatattctcaaaatcatatctagtgcatacgacaatcatttatatataaatggatataaaacaatccatagatgatgacaacatactgtatatgtataattcaatagatcgttacatccactttgcaaagtgcaagcttcggttgtatgacatgagccacttgagttgaaatgctcaaatttttattcctaataataaattgcacaaataaataataaatgatagaattccgatgaatcaatatccgatgtattataatttgatttctaaagttattctgaagttattttgttcctcaaaaattgcgttagaaattgttcacgggatgcgaacaaagaaaaaatcatgaagagtgcatccgcatattaaccaagtatatattaaataatttttgcttatgctgataacattagtgataatttttactatgattaaccaagaatatcaaaaattgacattttaataaaagctcttctcaaaaatatcaaacttaagttttgtttttttcaaaaataccatcatttgtttaatgttccaaaaatatcatttaagttttggtttttcaaaaataccacaaaaaataaaattaaactttcaactttcaaaactaaaccataaacctaaatactaaaccttatctcctaaacactataacgtaaatctaaaatagtcaattctaacttaagaattttttatttttttttatttttgtggttatggtacttttggaaaaccaaaactattggtgatatttatagaacattaaactgatagtgatttttttggcaaaacaaaactcgaaaatattgtattttgaagactttttcttttaataacagttatatttaaattggcattaccaaaaaaaatgttatttttttgaattggggacaaatgctttaattgttttaaaacatttgaagatagagcatatatccccatttgggttttgtttcacgggtgtttagtgacgtacatacatataaaatacttatttttcaagatatgaaaatatcgcactcaaaaaatctaattgtatttcttcataaaataattttagaaattagaattgtatttcatcataaaactgattttcccttgttaaaacctacgttgaaaatcaattttagcatttataaaaggaaaaaaaaataatctaaatctaaatcttattaattgatatgtttctgaatttcaaaatatgtttagaaacctagaattctatgaaagttttcttggtatatatacattcatattaacctaaagtcagaatcgaccatgaagccaagtggggcaaccatgactctaaacaagtacaaatattttagcggcagcttttatattaaaattcttcttagcccatatgagtagaaacttttgcttttaaggttacaatgaccagtttaaatctccgtcagtgttttcctgttttttctagagaaattggtaaaaggagatttttgtttaaaaacgtccatctaatacattttctaaaaggatttggtgtactatgttttataaaactaagagcaaccccatccatggtttctaaacttaaatctcttattttagagagagaaaatttattataaaaaaatgtatgagtttcttgattagtaaaaaaatcatctccaaaatatcttatattagaaattttggaaaacatttcttaactattcaaaaaacctacaattaaataatattatttttattgttttattgttaagaaacttatatttagaaactactaatggaattgctctaaagaactcgattataccctccattccataattcttgaaacatacccaaaaacttcttattattaaagaatctttcttaaaaaaaaaacataaattaattaacaaaactaagaagaggcgttaccaacacttaccacattcttacaccttgttttgcatagccataataataaaccaaacagatgtattgctcaacaaagtacattgctcgtcacttggagtctctcttttggttcacaagagcccataagaacataagagcacatataatacaattcggttttcaaaaatcataggacttttttttcctcatcaatcaagtggttcccagtcacaaaatacaaccttgatggcttactaccttttaaagcatattcatctactcactaagaaagcatgaaatctaagagaaaactcgttttagtaaggaagagaaagaaaagatgacacaaattcgatcccagcctaggttttaaaagggaaaaccatttttagcatttataattacttttaaaaaaaattagaatacatattctaaattccgtataacgtaatcaaaaaaacatatttctaatttgcagatttagtttccttatttttctctactcgattcctgcttttatggaattctaaatttcaaagaatgtagtttctaattttagtagaacatattttaatttaattttgctgaacatatgataaagtgtaaaacatatattctacaaatcgtagaacatagagtaatttgtagaatacatattctaaatttcgtagaaatagagtaaaatatagaattatgtaatctaaatttcgtagaacataccaaattcagagttctgaaatattctaaccagtttagatactctgatgttgtaaggtgtaagagttaattactgtcacaaaacggttttgagatggtgaagaagaatctttccatatctgtgagcttctctcgttttggttacggtcaggttctgtggaaagacactctattggcatagcttcttcttctaactctctatggaataaacgtaaacctagagttccacctctttgaaacagtttgaaagtaaagaaacttccagctctaaatccattggcattacagaaacttctccatcctcgtttgatgtaagtagttggacatgagttctttcgtttcaagtctacagtccatgatctgcctttttcttcgatcagaatcatctctccacacattttttctagaccatttgccctcacaaagaagagacttaaatccaactagtattagttaaacagattttctctacttacatattctcttttttaatataagttagagagacgaaagaacacaactcaccgaggttgttcttattgtctaaagacacatattgtcacaacaactaggtcccaacattgttacgtggaaagtcatgtctctctcttgtctgaaaacaatgatgtcgccgagtcgaagatcatgtgcgagagcaaaatctttccaaccgttggtaagtctctggccatctattttcaccttctaggttttcttggatgcatctgaccttaacattgccgtcttctgctcatttcttccttctatattctcaaatcagaaggctaaaggaattgtctgaagcaccatgcaaatacaaaaccaaaagcattattctcaatgatcttctcagagggacatatacagagtagagaaagatttaccaagtggctgtgaaagccaggaaaaagtggcttgaagaaatgttgattcgccattatcaaagctccagaatctctcagcctttacactgcaatctcaaggaggaaagagtataataaagtaataaacacaacgttcacttcacatgtttttttttgtttttttttgttttttttgttttaactaaagactgttcggtttccactgggtgactgaacaatcaacatatatgaactcgagagctttagaaaaagtaaaaccagattacttttttatataaaaacaaaaccatcaaactttttgatagtgttattatgcactttacatgctttcatattaacaatctcggaccaagtcccatccggcgatcctatcgaagatcgcgtacgctacaagtctccccccttgaatgagattcgtcgccgaatccgacccaagtttctttttacccatctctttgaaccactccggggaacctgccttcatcttgttttcagtttcccaagtatcttcttctctatctccgcaattccactcaacccttaccattttcacgattttcttctgagtccctttctctaatctatccacaattcgaataggttttgctttcatcatcaagtttccttctaatttggcaggaacatcttccatagggtcatctcattcgcttaggcacttcttaagttgcgatacgtgaaaaaccttatgaaacgccactaactttggtggtagatcgggcttgtaggacgctgccccaatccgttcgagcaccttgtatggccccacgtatctcggactaagctttttcctcttggaaaagcgtctgttcctttgtaagtcactgcctttagatacactagatctcctacttcgaattctaactcttttcgacgtttatccgcataacttttctaacggtcctgagctttctttaacttgaccttaagaaacttcatcttttcattcatctcgtccacaatccctagaccgaatagcattcgttcgcccacgggcgtccaacataaaggcgtccggcgtgcccttccatacaatgtctcgtaaggcgacataccaatacttctttggtaactgttattgtatgcgaactctatcaacgtcaaatgcttttcccagtttccaccccaatctaaaacacatgcacttagcatatcttctagagtccgaatggttcgtttggattgcccatcggtttgaggatggtacgccgtgctcatattcactcttgttcctaaggttttttggaaagccctccaaaaatttgaagtgaatcgagtatcccggtcagagactatactcgcgggtaccccatgtagccgaacaatttctttaatgtacctttctgcaatacgttcggctctatcggtttctcgatcgccagaaagtgtgccgacttggtcaacatatcgaccactacccataccgcatcatgctttaatggacttgttcgcaatcccattacgaagtccatcgtcacgtgatcccatttccattccggcattggtaaggtttgaactagtcccctaggagctttgctttccgccttgactagttggcatgttgagcatcgggcaacccagcttgccacatccatcttcattcccacccaatgatagtgtcttttcagatcatgatacatcttttgtaatcccgggtgaatggagaatttagattgatgtgcttctctaagtatttcctcccttagccccttataggccggaacacacactcgcacgttcaccacaatggttccattgtttgaagtttcatactccgttttattattctccgcccatttcatcaaatccttgtcctgcccttgggccaatcggattctactaagtaggtccgcttgatcggccgcacccaactctcttgacaacacattcaaatgcaatgtccccatcatgtttactaacgcttcatgattcttctctgcttctacctcacatcgtctccgacttaaggtgtccgccacttgattcaccttcccgggatgataagcgatatccaagtcataatccgccaccaactccatctaccttttctgccgtagacttaactcaggctgggtgaatatgtacttaaagctcttgtgatcggtgaagatttggaccttggcaccatagaggtaagatcgtcaaatcttcaaggcgaacactacggcagccatttccaaatcatgcgtaggataattgccctcgtgcttccgcaattgccgtgaggtataagcaatcacactacatttttgcataaggacacatcttaatcccgttattgatgcgtctgtgtacaccatgtatggctcatccgcttccggcaaggttagcaccggagcacttgttaacatcaacttcaagtcggcgaagctctttttgcactcatccgaccattggaacttagtgtccttgctggtaagtctagtcatgggttgagccatgctcgcaaatcctttcacacatctctgatagtacccggccaaacccagaaaactcctaatctcggtcgcactctttggccaaggctagtcctttatagacttaattttctcaggatccacggagactcccttatccgacacaatgtgcccgagaaacctaactcgcctttgccaaaaggaacatttgcttagttttgtaaacagcttatgtcctcttagtctctccaaaaccgcccttatatgattttgatgggttccttcatccttcgaataaacgagtatgtcatcaataaagatgatcacaaactcctctaggaattctcggaaaacaccattcatcatcttcatgaaggctgttcgtgcattcgtcagcccgaacggcatcaccacaaactcatagtggccataacgtgtcgagaaggccgtttttcgaacatccctcggatctattgggatttgatggtatcccgaggctaagtcgattttagaaaaccatttcgccccttttaattgatccaataactcatatatccggggtagaggatacttgtttttcaaagtaactgtattcaatccccgataatctatgcatagtctaaaactaccatctttcttctttacgaacaagaccggtgcaacccatggtaaactactcggcctaatgaatcctttatccaacaactcctctaattgtttctttagctccgccatttctacaagcgccatccggtacagagctttagagatagaaatcgttccgggttcgagttctatagtgaatgggtcggatcggtctggtggaataccacttacggcctcaaacacatccgcaaactcgttagcgatcaaaatatctttcaactccgcattcgcccccacttccttggttgtgatcgtggctaaatatgcctcacaccctttctcaagcatcctttcagcctggattgccgagattactaaacttcccgaggttgttcttattcccggaatttcaacataccctcttccttctcgaattgtattcgtcctcagtgacaatcaatgtgagctttgtacttttccaaccagtccatcccaaaaataacatcgcatttcttcaatgggacgatgattaggtccgcgggcatattgacactgttcactacaactgagatgcctcgaaccagtctagacggatacattgcttgtccgctggctgctctaaccattccatattcggtgtttggttctttttcgaacccacatgtttcaaccatttccggactcacaaaacaatgtgtagccccagaatcaaatagagtatgcttttctacgtcacctactctcaaggtccctacacattcccttagaatgttgagtaccctatccccattatgcatgatgcaatccaatgcacgaaagaatttataagttgactacgcttaccagtgcccccccctgaagttcccagcgtttctagcttcttccgatagttcatacacacgtggtgctacggcctgcctctttggagggagcggtagtccattacctccgcgattcccaccttgcccaggttgtttctcggcatccaactttggacactctctcttaaagtgccatgcttgcccacaatgataacaagtccttggttcattgccagaacctttgattgcccgtgatccatccttgggcaactttgaatcgcatggtccttgcttccacaccgaccacatgcacctatggccttccagcaagttccgctatgattctttctacaagtcggacattcctcgcgcttagaatcggacttggtgttatccaccttgtcccactttcttttcttgttcgtggacttgtttgattggtttgagcaattcagaatcttttcctgattcatgagtttctcctcctcgatccagatttcaatcatggccgcccttcccacttactcggataccgaattaaaggtgcgaatcaaacaattgttccggatttccacccttaaccctcaaatgaaacggcgcacttgggattgctcatcctcgagttctcttcccacaaaccttctaagacaattgaactctttgtcatattcacgcaccgtccgattaccttatacaaagtccaagtaggcatcaagtctgtcccatgcttctggtggaaagaacttcttgttgaattcctcctcaaagtccgcaaaagttcggatttgatcacctttttgtttttccacggttagccaccaattatgcgcatctccttccaggaagtggatcgcaatgtcttttcggtaatcctccgacaaggagtggagataaagttcctgttgagtcgactcctccattcatcggcgacaatcagatcagaactgaccgtgaaatgccttgtatccaactttgagacatgctcgagtaagttcaaatagtctcccctcttcctcgaagagtgagatggtggaatgacttccacaactcccgaatcatcatccctcggattctcaatcgcttgtgccacaggatccggcacaagggatttagtcaatgtggccaattgtgccataatcgctttcatcatgtcttactgctcttgggccgatggtgttgcatccggattctccttcccatctgatgcatcgctattctccagatcttgaagaaccggggagtcttccccagccacagttccggccagattagttccgtcctttgttgtctcgacccttgtttcctcaatgacttgcgtctcattggaaaccaatttctcttctacaacacccttgtctttcttactcctcccagagttttccctcttacccatatgcgaaaactcaaaagttagcaacataaacttaaaagtaatcgttacggtataagaaaacatctaccgcgagtcttatcccaccccatactaaagatcctagaaccgtaatcgctctgataccaacttgtagggtacctttcccagattccaatccggcgaggtttcccacgaacggatcacttagtgatccgatgctaaatccaattttagggtccattccttaacacatgtcgtttctatcatattctgagattcattactagagtcatatgcacaaaagagtagaataaacaagaatcgatacaacttatgagttttgcctataagctattacaagtcatataatcgatcctagctacccgaattccatcaccacttatcttcccggcctggagtctcgcgcctaagccaattcctttccacgatctccttctttccctaaaaagccaacaaggcacacaacattggttcacttagcgcatacaatcaaaccatgcattcttgctaagtttcggtgatgactcattcggaaaacagattgggagaaaggaagtaagcgcatcagttcggctagaatcgtcggatctatcacgatcctccgattccttgccgagctgcattccctatagcccatccgtttaaacggccgaatcatgccgagtatgaacatgcttatgcccgataatgcaaaacagattataacccgcccaaacaagtctatatcgacctattaaccgatcgccctatcagaattaatattccaatggttgaccatggaatcctcacctttccctcgctaatctctcagaccaacgagttgcctctaaaaacaggcgatctcttttaagtagttttctcttcaagacgccctagagagttttggtgagtttccccgtgtttttctgtgtcccaaatcgcatccaagacccttctatttataaggattcggcggtaaccgttctcacccgaaaaggcaccttttggcccataaccgttcttgggcgacttttggcgaagaagaggggaaacagttcgaccgcaaaaccgcccaaccgcccaaccgtccaaccgcacaaccgtccaaccgcctggccaaccgtcggcccaatcgcctcactcctttcctagcttggtcgagctggcagagctaactgacactccctcgagctggctgagcttcccctcaagctggccgagctaaccttgagctggccgaacttcccctcgagctggccgagcaaaccttgagctggccaagcttcccctcgagctggccgagcttatattgagctgtagtacagccctatcgaggatcccggacactacttggttctttaaagtatgtttattatttcgagtgtaaacataactaatattggtgggtaaattattataattttggattcattgttattatttcgagtgtttcagattcggatatccattcgatttttggatattttagatattcaattggtataatatagtttggtacaaaatttaaggatatactcgtgtattttgaaatttttgttcgatttagttagattttttctagttatgtttgattttggttataactatctagtcataaaaataacaaaaaaatatatgtaaaaaaattgaaagctaatttcaaaattgcagattctaaaaagaaaaaaggaaatttgttcgtaataatgctttctctattacaactaactaaattatgtcggatctcaaatcctaatcatcaagaatatacactagttacaaataaaatgaaaacaacttcgtacactaaatcctaatagattaaggacgaggagtaacttctctatatatatatacacatagtttaacttattctactagagaaaaaaaaaacagaagagagagttcataaacaatgacgttcgaagaagaggtgtctaaagaagatattgagtgtgtggaaacattactgatcgatcaatcttgagctggcggacgattttcttcgacggatgagtgttgggtcgatcgatctccacctgggatcgatcgatccagtgttgctaaccccggtttctcgattcctgctatcgtttctggtccaaatgagcccgataagtcccgaaaacatctgtgtcccgcttaaacacctaaaacctacaaatgactcaagacacaacagaaaagacgcaaaagacggactacgacacgacaaacgactcaaaacacggactaaatcaggactcgaaaccgtcaaaaacgctatacatcaactccccccgacttagatctttacttgtccttaaggaaagcagatatccttatcaagagaagaggtttgaaaacatgagaactcccattttcttcggaataatgctcttatcaattgcctgcaaaccaccatcacaaaattcatcaacccgtactagactgtacttttctataaccgtagcaacaaaattaaatcccgagatctaaaagaactttcagaatcaaaggacttaaccttttaacattcattaggagaggcgtgtactctcacaaaaggggtatcaaacacgttatgggcggatgcatgtcattatgcgaaatcactgtgagacacagaccaattaggtggtacatagctttccttaagttcggatcaaaccaaccaacacatattatcctaatcaaatcaatgagttcctatgatgcttatttatatgaataacaactcgacatttccggttcgtacattctcctttcccgtttctttctttttgtcattctttttttttttagacgttttttttttgtcaagatgggggagtggaaccggtgtctaatagaatgactcaaagaaacatcaaaaatgcaaacttgattagtagacaagtggcagcctcccccgacttgcttcacaccgacccggtgtgaaaacatttcaaagaaaaggtgccacagagacccaagaaaatcaaaataaaaagaaaataaaaatgatatatgacaagggaagaaagggtggtactgtagtactcaacgatggtgggtggggctcttgctagagctatgtggcttgcctggctttctcctgctcctacctaagcgacggcctgggagtgctctggtggtggctgcgaggtagaagctccactaggtccagcagcagggaccaacctctctgcatgtcgatcctcaatagtcttagactggttctcacggtttgcatcatccactcctcctctgcgagtacatacacaaggcctgatcctagaaatggctctccacatcttgtgcatcatactgttgttcttccttgtcaatgctatcatccatgccatctgctgtgagatatcgtcacctgctggtggtggtgaaacgcggtacggtgttggatcctcagggagcaacaaatatggctgagcgtgcgcgagagatgtgggataagcataatcctcataaatctcatcgttactgataacatgctcatctgtaggctgagcctctgcagtccggcgtcgtcgaggaacggtcttagaagggtcaggaacaaggtactgctcgttatgttcgaacactgggtttgtcgtggagagaagtgaagtaatatgctggttgggtatcccgcgaaataattgttatcgtctctgcccataaatggtacactcgacttcttggcttgagggagctggtatgatcaggtagtccaagtccattcgctctcatttaatggatgactcagccctagagaggtctagatcgcagccaaggaacaatggaataagtgcagtactagctaaaatgctctgcgcggatgatttagaaacaatattcttcatcttcaccaatgtgtcacacacaaccgcatctacattagtgtcaggagctggaagatcggagtaggtgcctagctatcgtgttcctgtagctatcgtgttccaaaagttgtcagcaaccgtaggagacaactttgaaaactcaaccgcttctcctttcgtaaatccatacatgtcgtagatctcaaacattgtcttgttgtaatgttttttgttgagaaagaatgtgagtgttccttgactcgcttttgggttctctggatttgcgtacgtgaggcgacatgtggcaatgaactccttcacaagtttaggatatacatcctcatctatttcccgataccatcccataccgtgtgtttgaaacaccgtcacgacatcattgtacaggccaagtacctgtagagaaggtctgcaagcaactcgcgttggcctcacatcaatatgtttcaaagctgccaatagctttgtgtcctccttatcccatatgtcggtaacaagaagttttgttaggatcttcttttggcagtgccccggaattgctcgtacgtgctcgagcagtgcctgcagagtcgtttgttcgtcccataccttgcaaaagagacgaagtgaagtcaagaaatcacttaaaaacaaatcaaagaaattaatcattgcattttagttaccaaaactaaacaatgcatcatgaataatcaagttcaaaggcccaaaactaaacaatgcatcatgaataatcaagttcaaaggcccatcccatttaaaagccgaccaatttaaccccaccccatttaaacttatttaattttaaggtctattaaggtttcccatttaaacctatagacccatttagatataaattctattttactaactttgaatacaaaacaaccatttaatcaacataaaaatgtgtctaaccttttataaaacaaactaaaatcaatacttgccatcaaacttcaaattcttaccaatcaaaataaattagagaatttataataaatggctatggatttgaaaagaatgtacaaactaactatggccgtatagtacctgtcggaaaccaactttaaattactctcatctccctacaataggtttttgattgaggggacaaatagcttcataggcatatcattttaaattttgaaatttgaaatcatctggagcacaaagttggtttgaggacgcaaccgatatagactacaatttcaagaaaatgaataatttacatatatatcagaaaaccccctgtaaacagaaaaccctagctcaaggatttcccccgacctctctcccctctctcccctctccttgttcgccctagccgtcaaggccatcttcttcctcgttttggccggtgattggtggcttccatagcactgtcgccggtcctgttcttaataatttcagtttcttctctcttagttcttctttgttttgatttagtttctcaaaccctagtttcgttgtctcctcttcaagtctctccttttcgtggtggttccgatgtggtgactatcatggaggataggtggcagatcggtgctcgttgtagtcagatctattccccggtggagccgtcacgtttctccgatctggttatggaggtttgtggttctgatctggttctaatgtctcaactatcggtcttgttcttgttagtttgggaactggagttgatttgttgtatgttccggctggttctgatgtggatctattgagtactgttcttggattttgttggctttgcggtggtgctgtctcgtttggggcgtatatttagtcggcgtttcgtttccttgagttagttctgtttatccctttagtactgcagcaacggcctctttgtatgcggattcttcttccgattttgagtttgagtgacttctagggtttgtgttttgctgtgttttttgactggttatggtttgaagcctcaagttcagcttttgggtagccttgtttgactcctagctctgcctatctctctatcctcctcttggttttcggtgtggtgacttggtggaaggttctattttgtgggttcttcaatcggatgctagcctcctataatggcatctactagctctctgttggaacctcttttggtttcccggctgagttctggacgttatggtgggtcgatctcttgccaggaagtagtttagctgggtctttgaaggtccgtgtgtaaggataagtggttctatttggcgtttcccctctccgatctcaaggtcttccatgatccttcgccttctcatgttcattggcgctaaagcggttgtggtggttaggttctgtgttctgttcttcttgtttcgtcgtcttcgtttctgctgtggagatggtcgtattaaatctcttttcgagactcctgtcagttacctctcctcagcgccaaactgttctatggaagtgttagtcggctgcttgttgggaggagttttcagtgttgtggctttggaggctttagctattacttctgtagctgttatctttgtatattttcttctaaggcttgatttgtttgttcgccttttttggcctcatgtctctgggggtttctatgtacccgccggctttgtctccaaaaggattttattcctttttggctatgtataactcaaacgcattcaatcaatgaaatccttcagacgaaaaaaagaaaaacagaaaatcctagcgcctcttccgtttctctctctgttgaagaacataactggagagaaaaaaaaacgacatgcgacattggaatcccgtttaaaatctgccgatttgtggaaggtatttgcagctttcgagtgtttgtgctacatgcggggtcgaatccatcattcccgaaggtaaatattgttagatctggatttttaagctcacaattagtatcttccacaaattttaattcgttagtaattgttgataagcaagttaagttcttgtcgtcacaggtgaaacctgtatacgctaatactgtttctagatggcgaaccaccctattcctcgtcggttgtttcggggtggatctgaaccaaacggtgagagagtccagtcttactgtgagttatctttaatcgataacatcgccgacgctttagatgaggaggacatgaagattctaagggaatcacagtttggaaaattatttgatatcccggagggagccgcgtattctggaaagcttattcactttctgctaacgaggcagctagttgttagcaagcaaaataaaatctgggtaatattctctggttccccaattcagttttcgatatctgagtttaaaagagtaactaggctcaactgctacaaactccctcatgtcaaagagaggaaggggaaacaaaaactacttcctgacaagtattagtacaccttatttgactggagtgatgtatctgttgagcgggttgttggtaggctgaagaaacgaatggttgaagatcaaggaattcgtctacggtacgctgctctagccctcattgatggcgtcttgtgcccaacgtcgggtagaagcaaaatatctccggtacatgcggacatggccgaaaatctagatatgtttcttaaacatccgtggggaactacattttttttattgacgttgaagagtgttacagcaaggggtgctgataagcttatgcggaaatctgtcacggttcagggattctcacacgcaatccaactgttgttccttgaaagtgtgcctcgaattagggaattgtaattccctgaggttgacgaagatgatgactcagagatggaggaaacacagacggaaattgagcgtctatggagcttgaagttggatattgtctggaaagtcgataggcagtcccaggtaatcagtgcatttcgtgcttttataaaatacatagtatcttacttttatatcatgttatacacaactgtagttacctaaattctccataacttgattttaaagtgtctagcatgtattaacctaaaatcctgtacttattggtattgcattatgtgaagggtaatgttagagatttaatacaagtagtctacattatttgagggtatagtatgatttattgataaatctcatgttttaaatatatgtaacatgctttaatttaatcaactgtgttatgtttggtctggagttgggttttaatctactccctctgtcccataaagataaattttctaggaaaaatatttgtcccacaaagatagaagttttatatttccaatgcaaattttaaaactgttttcccgttttacccttactaaataattagataaatatttattattatttttaaagtatattaagaggttaaaattatctttatacaatatttcttaaagaatgtgaaatttctaaaaaattcatcttagtgggacggagggagtagttgttttataggataatgtaataatatattagctattttacataagtttcatattgcattacgttaagggtagtgttagagatttaataaaatcagtctacattatgtgttttagtatgatttattgataaaacgcatgttggaaatatatgtaacatgctttaatttaatcacccgtgttatgtttcgtctgtagttgggtgtaaatttagttggtttaggggataacgtaataatgtattagctattttactacattattattgttttaaatttatatcatctgctatttatcaatatactctggcttttaaaagtaaaactaaaccttctttatttataacaatagcatgtttttaaagtaataaatcttgatttttttgcagaccaaagtcacatctgttatgagtggtacagctaatggtgaccctttctcgagagggtggattgatgacgaagctgaccctcgtgttgacagcttattacaacttattagagaggatcacctttttaagggatccatgttcttaggtggtgtagtccctgattcgttgcctgatgaaaggaatgacaacagcgatgtttgtagcactcatgattgtggtgatgatgacaactatcaaactgatggaaccatggatggctcctccaaaactcgtaaagctgaaggccagtttaacataccagactcgatcaaaaactatattgacaagaaagacaagcgaatggagtctcgtatgttgaaggctatagctgattcggaggctagattaagcagcttactgagagcaactcatggcaaacatcacatgtatgaagaggttcaacgtcctggattgggtgggaagggaggatctgttgttgatctggatacatctatgggagtgcatacaatgaagaatagtgcaacagatattcttgatcaagttttaggggaagtgatggaagatatcaatgatgattcatctgcacagccgacaatacaaaacatcgctcatttccaaaggcaaagcaactgaaccgtagttcgctggtaataatttataaggttatcttcttttacctactatctgttaccaattactaattttataactttttgtcatgtacaaaagaggaggagagtacacactagtacaacgtcgaccaacccttccacctgttgaggtggacactagatcaggagaaattgctgcttcagtagagaaaccattatcacctcaagctgatacgatcgcccaagttaaaggttctgggattgttggcgactccgatgaagtacctcaggatggaaatcatgacagtccttcaagcaatgaaacatcaattccagatgaagctccccaactccagtctccacttaatcctgacacagaagacactgcttatattgaatcggagccaaacatcacggaaccatctatggtattgcattcagcttttggaactaagaacccatcctctttgcaagttattgaattaacatgttttcccaattaattggtcctatttggttcattgaagtttgtttttggttttccagtttgaggcagatgagaatagcaatgataaaaccagaccacacccacaagatgatgagattgtttcagggaaagatgaagaaacaaccgctgccccacctactataagtgatgcggttagagctgattctttgtatagttagtttgtttgatgtcatcttaccacatatttatgttgtgggtttgatgtaggccaatttatccaaaccatcggctgatgacattgtttctgagagatatgcagaaagaatatctgatcctcctggtttaaatgatgaggtaagagctgaatttttaaaataccgtgtgtgcgatgtaatgtaccacattttaatgtttcccccacgatgtaggccaatttatccagctcggtgatgagaaatgcttcggacccaggctccccgccaactgaagtagtggcccgcgatgacaaggttgctatgaatgtgttagagtcttagtagatatgaattccataggttcaaaggggtattattgttagaactcagtttatctggttatagttttttttttgaatagcggattttatttccacaacgtttcatatgtctaaagttcacatggttttgttataaaactaagagacatattttataactatataacatacattagtttatattagttctcgtcgtagttggtcatgagttttttttaaacacgattgatttaagttggacaaggttttatatttttaaacagcatgtcttaattataaagtgcatgttgaaaaattagaacaatgttttattaaaaaaaatatagtgcatattttacatttgcttatgcgggcaaacatcaagcattatataaaacattacatgcttttaaataaatactttgaatttagtatatatctcatattatttctaacttatcttccatttttctcagctcaaacctgtaacacgtatttcatcctccacgagtagtaggacggttacctttggtgatgatgttagccgcattgctaagataaatcgtttatatacactgactaggtattttttcctcatctttgttatgctactatttcattccatggtacttaacttaattataaccaatctatccggtgttttaggcccattgattttggtgctgatcggaccatgtcttcaacggaactccgggatattgtagaattgaaggcagtcgtgcctagtttggtatgatatatatatatatatatatatatatatatatatatggcagatttaaataaacagctatttattttcatctatgaagaatccttaactccatttactctttctcaggttatgaacttattcataaactgcataaggattgattagggagcaaaaaatatcatagaaaagcagcaggatgtagcattcattgattctacatttgtcaatgaattatgcaagcattacctaaaattctcgaagacagctgacaagggaatgtatgggtttgatcatgatctactagaatgcactcactccggttttgaaagggtctactttccctttctcgtcgactcaaagcattgggtggggctatgtcttgatgtgaattcaagagtcattactgttctagactgctatacaggattatggcgtgaaaccaagttgaagaatatccttttgcccttagctgaaatgctaccttacctatttcgttttgctttaaagaatggtggggaaaagaaacttcgattgaaagcttttgttgttaacagagaaaatgaagtttcacaggcttattgctaggtatgagttggctaatgggacgctcgcaaactgcacctagtttcttgtattactatcacctcattctgtaattttgtagagacctttccttggatattaatgttgtttcgatgtagcgttattgtgtatgtttatataattactacctgatattgttttatgtagcatagaatttactttgatgacatgtgtttttaaaatacatatgcattaaaactgatgcgtctatgataattacgtcttcgtactctctagatatttaaacccaacaattgttaatatatatgcttgtaacaatcatgtttaatcgaaattgcttgcctttaaagtttatgacatgttttgttagcgtacaactagataaacatagttacatttttaaattatttgatcttaaacaaacattcttaattaatatatatgataagtaaatgaagttttaatttgtagcatgccttttattgttttgacatgttctgttagcatacaattgcttttttttgccacgttttcaaagcatacgtatgcaaatgaaactatttattaatatttaaataatataaatcaaacaacgagacatcagacataacaatcataacacaacatacatacaacatgtaatgtcagaaaacatcacgttattttttagagttacccgactggtgacacgtttccacagatactaaaacgttagacatacaacatgtaaaacccgttcatatcatgttatcggccgattaggatgagtagcttctaatagctaacaacaccgacagaattctttggaacaaaagaatatgtagtactcttcgcacctattatataggttgtggattgatacatatgggggatgggccccattccatgtaagcatgtaagttgtaccttgacgcaccgccatgcgctcaagagctgcaaatagagagtcgcccatagccaatacctcgccccaagattgtgcaaacaactgttcagggaaaaaatctcctagctccttctctccaccacaaattgtcaacatagccataacaaacagtgcctcatctactttgttaatcgctttgaaaatgtgtttttcagccatgtctaaatctttttcccaacacgcgtaccttagaccttccaagtaatgtgcttcggggttgtttgcctccaatgcgttctcaaattgttttctgaacaacccaccgacccgcataagtacaagattttgtctgtactgtctcatttcaactcgagctatcatgtgtgtatagggatgattacgttattcattgttcggggaaatacatgtatatataaggcaataatggtggagtgtatatacacacatttatgtggggtttgtggtgggtagataatgtgtggtggaagcgaacttattggattctattaaaatatttcaagtgggactagaatcctatgtaaacagtgttcatagcatgtgatgcagtataataacatgtattaagatctatccgcatggttgtcaataaaatagcatctgtaaatggaaaatgattatttaattgagcagtgtttccttcatggattaattgctataatgcaatatgtgtcttttaaacattttgctctaagtgttgtaataaatgtgatgctctgtgtgtcagtttggtcctaaatttgtgtatgctggtttacactacaacatgtacctttaattaaacacttgcgtctttacttaatagcatgggtatctacaaaagagagaattcaaagtttcttacacaaaatccaaaaaacaaaatattttcctttgcctggtagaacgtcgtcttcattacggcaccgataggatttgggatttccttgattgcattttgtatgtaacgtttaggcgccaccctaatcgcaacatctaattgctaatatgtacattaaaccaagttacccttccttttacatatacctccatccttgatggacttccccttgcatatattacacaacttataacccatgagcaagacgcgatacacaacaccccctgcatatgatgtaataaatcaattagtattgttacttttgtgtagaccatgctattttgtaaaaatatgtagcaaacctttatatgggcattttgcacgtggcgcgattatgtcttgcgcctgtgcaacgggaacaacgtgttagttgacgttgtggtccctgcgaagaacacatgctagttagagaaatcaacaatcaaatagagtcaatttctgtccaaaaacaatacatttaccgtaaatttccctcttgatatgattctctctttttgggcctacccggtggcctccgtgttgctggaaagaacaggtggagggatgctattaattcaggcaaagcgaaaacgtcaccaacatcatgaacaggttttattgttctttggtaagacattctccagctttcaattgaatattcgggcgccatcagtccttgaattggaactccctctgccactgctgcagctattgcatgggggcaaggcaggtgaagcaaatcaaatgctctacaggaacaggtgcgttccattagcttgacgtggaagacactagatccttctcccctgaccttataatcgtacctatcgatccgatgcacagcaaatgtgactgacttttcaaagttttgatgcacaacttctctcatctttggtaggagtgccgatgttttggatctagccgccttacgcctcatagcaaaccatgaaatcaacgtcgtccttatgaattctaacagcgaaaatattggtaattctcgggcttccttcaagactgggttcagagactcaactacattgcttgtcatgacgttgtatctttccccaaggaaatatgctcttgtccaatgacaaaacccaactaactctaggtaccgtgcacaagctggatcaagtcttatcccttcgttaaagtaggtttgaaactcacaaatacgataggcccttgcagctctcgatacgtggaataacaaatgttttttcttataggaggttgcaatgtttctttggagatgaactatgcaagcgccgtgcctagcctttggatacacctgcggtaatatagcagttattattgactataacatgtgttattctggtatagcatgtaatgtaaagaatattaatttgtttactaagtttaatgctagtggttaaaaaccgcaacacgttagatctatctctaataagaaacaaggaataccatttattatttactatcgcatgcgttatactggtatatcgcgtaatttatgaactatcatgtgtgtttaatgttaaatgctagtgttaaaatcaaatacatgtaaacataaaaaacagcaaagagtagaaattacctttctcagacctgtgtaaatggatgaatgtcggtcagagacgaatgttaggatctctccatcggggatagctgtgctcaaaacgcggaaaaaccactcccacgcgtcgtcgttcttgctatcgaccaccccaaaagctaagggataaacttgaaaattcgcgtcttgtgcgctggccgttaggaggcagcctccgtatttgcctttcaggtgtgcgccgccgataacaataacccgtttcatgcatgagaatccttgaattgaggcggcaaatgctaagaaaaggtacttaaacctgtaatttccttttgcatcaatctcagttttaagatcaacaattgaactagggttggcctcctgcaagacatgaatgtaggccgttaacagactgaaactattcgtagctgagccttgcacactctctaaagctatttctcttgatttccatgccttccaataagaaattctaaccgaataatcggttagaaggattcgttgtaggtctacagctcttggcccccgtgtgttgccatcatattttgacttaattatgctcctgattaccctcgttgttgctcccctgtggtagttactccgttcttcgactgtgcaagtgtgctcaagtgttgcacttcgaatttgataattgtccgagtcctccaatttgacaatgtacacacgccaaaggcacaattcagaaatgcatgtcaaagtcattaatttcttgtaggagcgatcacggcgaaaatgaaaacggctatttagtgcgtgtactgctaatttgacattgcaatcttgtttgtttttgaatacccggccgacaaacagttcgtcaccttcatacacaacatcccgaattgctagttccatcccgtcacggcctgtaaaaaaattacttaacttagctatcaaatcagacaacaatgtgttccaacctaatgtatgatattacaatacacatgactaaatgaaaaagtaaatagaaagtacacgatataagtaagcatgacttgttagagttacgttatatcaaagtaaatataaattattgtacctatcaatccgatgtaacttagttataaaccaaaaaaacaatagttttcaatgtatcacatgctatttagcaacatacatgactatatggaacagaaataagtaggcccttgacggatacagaatgtgcaagatatgttataggtactcgatatcaaattatatataaattgatgtgtttatacgaaaatagcatgctatgcaattggtaccttcttctccttgttcatcaagggttggcgccgcatccctgttgaaagatgcgaagttaatgcacatgtcttcaagagcctgttgtagtgggacctgtaggtccaagtgtacacctagaggttcggtcaagattgtcgccgacggtccgaaaaagttggactccttaagagtttctcccccgtcatagtcattctcgtcgttgtacccttcacttccgctgtcaaagccgtaattatcagttgccagattaattgacggtagccctagatttgccaggaaatctgcctcaacaagatttgagtcttcctcctgcgtaaacagagttgatataagctttgtaccttcttggtaattagaatgtattgaactactgattgtttacctcatctgccttttcactcgctgtgtccatactttgatttgtttccaaagtcaaagctggctcaacagtagctcccgcaggttgtgcatgtacgttggaggaagagtcacccatgtttgcaccttctgtacctgtcaaaatggaggactcgtagttaggagatctttcctcattgcaatacaatggtgattttcccttagctggcaacccgtaactcgatgtctgactcattccatcatcaaccggaacaccatctaccgttagcttagagacaaacaaactcaagtcatccaactcaaaacgcatagctaggaaaacacccattgtctcatctgtcgcgatggttactggcttcgttcgtcctccaaaggtagcctccatgtccatccaatcaggccattgatatgtcatgtgtagctgacatcccatgtattcctggccgtacgcttctctaacaatctcccgaactgatgacagcttttcaccttcacgaatactcaaccgtctgacagcattattgtggtttgctatgaatatccatgtgccatcagctccgattgcccatgttccactcaccgtccggacataacggtcttcggttatttcggttataataaccattggtacctacacatcaatagggttgcattaaataccatataaaatcaccatgcgatttattaatacaacaccaaggtagacaaaaagaacaatcattaattgcataccaaaacaacaacgatcgacctctgagatgttattggatacttcgtttgtgttttttagatagaagaagaggtgtgagagatgatatcttgccatctattatcttatatagaaaagttgaactttttttagagctacagtggtctatgaattttgggcaacagttgctgacccatttccagccacgtgaatttgaaaaggttatgatttccctcccaacacccgagggcggcgagaagatctcttcacgaatgtcgcatcaaacaggtacttgttctttatttgtattgcacgttatcgacaatagaaccaaatgatttatcatatactcatgtttttacacattaacttgtcctgaggtaagatacactatatcttcgtcgtccacttgctcagtcgtaacgctgacgtcagttgagacgtgtcacctatatgattcgctaagatgtagcgtacgtgagaagcacatatatagcatgtgttcagattgttacacatgaaaaaaagtttctattttttaacagtttaataccttggaagctgatactctctgacgccgcatttaatgcaagggatacatatctactctcctctttgcacgcgcttttcactgtcacatctgtttccttttatacttcttccactatgttatatttgcaagtggcagaacaatgattgctgtgttttttaacaaaacatgttgtttacgttgtacttatgctgtttcggaaatctaatttccggatcttcttctcaaaagcccattcaactttagggtaatccagtccagtacatttcgagttaggcctcccaagtaaaacttttacttcagttactttacattaatacatgctgctaaggaaaatttgtacatcgtgttttttatacataacgcgggttacgttatgaagtttgatatttgtgggatatttgtagtattttggtattaatgtaaacgtcacatctctttttccagaatcatttcttgcaggtgtgaggaaagtaatccatctctttaatttcatgcatcatctgaaggtaattatatacagcctgtgtcatattcaaaatccggttattcagcctgtagtaaccaatagctctaactaggttctcttgcatagtaaggtaacatgtgacatataaaaatatcgattactgtaatgcatgaatttttattacgtatcggtgtaatcatatccctactaccctatttgatcctataccgagaaccctactgtcggaaataaagatttgacgcccaatgaccgaggttatattcgttatttcgcatggcccaaaaacgttagttacccaacttttctgcactaaggtcattttcttaatattgatgtcaaattacgttaccccctaatattacccaataaattaatatctagaaatcaaactcaaacatattcaaaaaaaaaatatatatatataaatgggctaatagggcctccacattttaaatgggtcttatttgagttttcatttatttcactctttgaactaaatgagtctaaatgggcatttattatgatttaaatgcccaactaaagcccaaatttaaaacccaaattaacatcactattttaagccctaaaatccgtttttcccaaagtgtatgaacatgtccgttttttaccaaaagagaaattttcaattctcaaattaggccttaatccagcaagtaaagacttaaaaaggttcccaaaaccatcctagacaagaagctagcatcaaataatccataaacatcatgaaattcaaggaattagagatatttcacctttgaaaacggaaccgaaaaggggaatttcgagctcatacctttgcagatcgagaaaacagacaatagatatgaaaagaggcaaaaatccgattgaaatagataccaattttgacaaaaacgaccaagaattgagagagttagggtttagtgattttggtgttcttgataaacaaaaacgaagaagatgaagtggagctcgataataccttggttttgcaatgtcgtcatggtgtttctgcactcaaaaagcattctcacaacaccgtcaaatacagagactctatcgactcaacagccgggtcgataagtctgaactctacagtggagtgaatcaaaccaaaatcaaagaaaatgaaagaaggaaaacaaagtatctacaataccttgtgggttgcctcccacggagcgcttgcttaaggtcgttagcttgacggcagtgagctcttatgccttatttggatccgttagaggaactgcagtgccctcttcaagagtggaatgagcaaggtacggtttcagcctttgtccattggtagaaaacggttttccattgttatcccagagtattgctgaaccgttaggtcgcatttccattatgacgaaagggcctgaccattttgaacgaagttttccaggaaatatcttgagctttgagttgaataagagtaccttatcaccttctgcgaacttccttaaaatgatcttttttgtcatgaagggctttggtcctctccttgtaaattctaaaactctcataggcattcaaacgaatctcatccaactcattgagctgaagtaaacggcggcgttccccagcgggtttaatgtcgtagttcatcaactttgtagcccataaggctttgtactctagctctaccggtagatgacaagatttgccatagatgaggttgaatggcgttgttccaactggagtcttgtaggttgtccagcttggaggacctttgaagcagttttgaatgaggcaaagtgtctttcataatctgaagcatggcaactgtaaaggataccttcgacttcactctctggaatacatctcctgaaaaaggttatcaacacacctcttatataaataaggctcatcccattagtagcgctgcacgttcttcaagaacttccttcaataatttcttcttgaagtaaccggtgaaatcgggaggtgggacttcacaagaaaggtagttcgcgaaatcagcataccaaggcaaattactttccccagtgtgtaatgtcataagctcaagagtgctcacccgtaacctccccacctcatccatgtagcaatcttcaattgaagcaaggttttcacctgggagaatatctctcatgagaacttcttcctgaactctcaatcgagacaaattatcagcaacctcattctcaatacctttcttatctttaatctccaagtcaaagtcctgcagcagaagtatccatcttaatagtctcggcttggcatctttcttagacaacaggtatctcaatgcggcatgaacagtgtgaacaatgaccttagacccaaccaaataggatctaatttctcaaaagcaaacacaatagcaagaaactccttctctgttgttgcataactcacttgtgctccgtcaagagtgcgactagcgtaataaatagcatgcaactttttatccttcctctgtcccaaaacagcacccacaacataatcactagcatcgcatattacctcaaaaggtagctcccattctggcggttgcacaatgagagcactcaccagagattccttaactatattgaatgcttgcaaacaggtgtcatcaaactcggacttctgttccttgcacagcagctgagtgcaaggtctagcgatcttggaaaaatctttaataaacctcctgtagaaccctgcatgtcccaaaaacctcatgatctttcacagaatttggcggctgcatactcatcatcacctcaatcttagctctatcaacctcaacacccttttcagaaatcttgtgcccaagtacaataccatccctcaccatgaaatgagatttctcccagttcaaaaccaagtgtttgtcctcgcagcgctgaagtaccctgcataagttagacaaacaagtagcgaaagacgagccatgcacaaaaaatcatctataaaaacctccataaaatcctcaatcatatcactaaagatatacttcatgcaatgttgaaacgtagcaggggcattacataaaccaaaaggcatcctacgatatgcaaatgtaccataaggacaagtaaaggtggttttctcttgatcatcgggatgaatcaggatttgaaagaatcccaagtatccgtcaagaaaacagtaatagggttggtttgacagtctttcaagcatttgatcaatgaaggatagtgggaaattgtctttacgggttgccgagttaagttttcgataatcaatgcacatccggtgtcctgtgacagttctagttggaattagttcgttcttttcatttttaatcacaatgacaccaccttttttaggcacaacatggactgggctcacccaagtactatcagagatagggtagatgatacccgcatctagaagtttcattatctctttcttaacaacatctctaagattcgagtttaaccgtctttgatgttctacagaagtaattgattcaccttctaaatgtatcatgtgcatacacaatgtgggagagatgcctgtgatatcatcaagggaataccctaaggctttcctgtactttctcaactcacataacaacagggcactctccacattgtttagttcgggattaataatcacgaggtatgtagagttgggaccaagaaacgcgacccttagcctggcgggaagtggtttgagttccatttttggagcgttcagctcgctccaatcatcgcagtctttaggtgaagatacaaccaaagctttctctacctcattgtctccaagctcagcaaatgccacaactttagtcattggtgaactagaatccagtattctagcaaatctagtagttgcttctccaaggtacccaaactcactctcttctttagtcaagacagtttgaagaggatcctccgtgttcaactcagcaagaagctcattaactagctcatccatgatatctacccagaatgtctgacactcagtggtgggcttagacattattctttccatgttaaattcctgaacaatgtcaccaatccgcagattgatcttgctctttctcacatctatcaatgcagcgacaatattcaggaatggtctaccaaggatgagtcgatgtctaggctcttcatcaagctcaatgatgacaaaatcggttgggatatagaaattcccaacccggacttgtacatcctcagccactccaacagggaatgaaatagaacgatcaccgagtaccagagacatctttgttggggtaaaattcgtgtctcccaatctcttagcaaccgagaaaggcatcaaacttacacctgcccccaagtcacaaagacatctatcgaaagtgtattctccaatcctgctaggcaacacaaaactaccggggtcttctctcttcacaggaataacattctggagaatagcgctacattctggagaatagcgctacattcatgactgatcaacacatgtccttcttcaagggtccttttgttagtcaaaatgtccttcaaatgtttccggtagatagaaacattctgaactaaatcaagaaatggaagcttaacctggagctgcctcataatctcatcaaacagagaatactccttttctctctgtatcttcctttggcgacccggaaaaggcaacttaggcacataaggtggtagcacagtctttttagccttctcttctagggtctgttttctcagcttctactccttcaaccaatggctcaacatcagactccttcccagtattatcctcttctaagtcatcagaagcagctttagatttctccttagccttctccttcttcagaattggattaagttctctaccactcctcagggagatggattgaacatactctttaccactgtagtctttcgggttcgtgattggtgtttagccggttattgggccgcgagagatctctctcatcctacttgtgacctcccttttcagggttctggtgtttcggcgcttcaggcacaagtatgaaaaaataaaactacgcgaaatttaaacatttcgcgtggcaatgcctctcgggctgtttagcagcaaaccaaaggctttattcccgtcacattggcactgaaaaagggtgccctcgatgtggagcagaggaaaaatgtataaaccatcttctcttcctatgtccgccggcgagacaaatctgggccttgtcccctatcccgtcttcggagtacctcttcccccggaattctcacttctagaattttgatttcctactctggcgagggaaagaatttgatataggagaagacattcttgagatatttccatggatactctggtatatttggaagagtcgtaaccggtttatcttcgaaaacgtgattgaatctccacaagaaactttagattttgcaattcaagaagcaaaagtttggaaagaagcaaattcaaaggagtcagttttggagtaccctcgtcctcaggcggtccctgctaatattttccctactcggaatgttgtcagtttgatgcatcttggcacttagatgacactttgagtggacatggatgggtcctagttgaccaagataatgtccttcatttgggtctaaagagtgcgccgaagagcctatcaccattacacgctgaagttgattcgttgttatgggcaatagagtgtatgatctcgataggtgtcacggattgctctttctcatccgattgtgctgatcttatctctttactggaaaaaccttcggagtggcctacctttgttgctgaaatagcgactttcggttcttttgtctgttttttttcctatttttagtattaagtttttgttttgcattcataatgtatgtgctgattgcctagcaaaaaaagcacgaggtcgtaatagtcttttttcccatgtaagcaagtcggttcttaattggctctctctagaagagattctctttccgattacttaaatataatggtatttcgacgaaaaaaacataaaataataaaatttatttttgttcatggtattcccgaacttgggcataacgcatatattctacaaacatccacaattagaaaagaaattaaaattatcggcgcagacatggaagaggggttaaataatctgggtgctagccggaagcaacaaatccgatctaatagaacggcgaatacaaagtccactgctttgcgatcatgtcaacacattgagatcatagaccgaataaccacccgaccaaaacaatatattcgtaaagatttggaaaaagattgtatatttaaacgtaaataccaggagttaagttttaattatagttagaacttctgttagtaaagataacagttactaactcggaaatccaattttatcaaaaaaattaaatagcatctaaagttaaacgaggtatttttcaaatttaaaactaaagatattaaacggctaaataaaaattaggtaatcattttttgagattttttctaaaaaaaaaatatacatattcctataaatatgattcgtaacagtagattgcacagatcgtaaagaacttgatttatctttttaaaataacggtagttttgtttagccaaattttaagaaaacttgattttttctctttttttttccttttttaaattgtgactttacacatgacacaaatacaactgataaaataatttatgatttataagataaatgattgataaaggataagattaaggatcaaggatgtattgttttgaacaacctaaaaaatacaaaatcagcgtatttatcgttaatttcccacaatagaaaaaaaaaatatttaggtttgttttagcaaaattttgagaaagagacaactgaagcaccaaccgacacaagttttggatctcaaattgtgtctgcgaccgcgttgtttccaacactttgagcaaggtaagtcctactttccggttttgatttgatttgattttagatgtctttggtttagttgtattgacaaatgtatcgatttcgtttatgctaatttgtgttatggttggattgtttggcatcaaatttatggatctattgtactggatttggagaataaagatagaatctttgagatctcttgccaatttatggctatacgcttaagaaaaatcgaaactttgaaaaagtttggtagagtggaatggttttaggaacttgggagatgtttatgttttgtcttaatcaaagcttgacactggttatgtgtgatgaagtttatgttttgtcttaatcaaagcttacccttgtaattttgttagttaaagagagagagcttttattctttggaggatctaaataggtccaagctcgtcatgcagctaggaaaaagaagaggattaatatacagttattagaaacattaaagtttcttctgtgttttgtagaacaaggagatgatgcggtacaaagaggtattagtactttctgatttcaagtctgtttcttcgctagattaggtgatgcaccgttatgtgttctttgaacttctttttgtgtgtgtctacatgaatcaggagaaagaggtgaagaaggaagctttcaggaagtatttggagtcaagtggagttcttgattctcttactaaaggtataatcttacttcacctattgcaacagtttttaattgaatagttttgattctctttatactcttttgtatgttgtggaacatgacgaggttttgattttgattgtagttctggtttctctgtatgagcagaatgacaagccttcctctgctctagagtaagtttctggacccattcattagtttctagctgagtattatagattttgtatagaaacaattttgtgtattgacttataatctttttctttcatggactacatatactaagaaaattgataggtatgtctgttagatttgacatataattttatttgtttttcttccttgccaatctcctatgtcgatctttcgttaacagatcttcaagttcaagttcacgaatgcaactttacaatatttgttacgtattaggctaactgtttacgtgtaatgtaagatcttgcatataacatattctctattttccggtggttgtcatcagattcattcaacaaaagctaggtggtccatcagtctctgactatgagaagcttcaagctgagaagtctgatcttcaaataaagtacaatgagcttttggctaaacatcaggaaaccctgagagaggtatcaattcgagtagttgaaccatctttagttgttgattaacacattagttgtctcatgaaaacaagagtgtttaaatctgtttaacacattctatatatggttaatgtttgcagttaaatggagtgaagagcttgcattcacgaaactcttcaaaagatgatgcagacagagagacccttgaagctgaacacacgaccttagtcactcctcaccactaactctgcacttactgtatatgtaattcctgttactatcttcgtttacatatttacggcagtaaaagaaaaaaaaagaacaaaaacaaaccacgcatagatgagttttctaggcaacaatgattagtttctttgtttaaatttccatttgctctctttcattcatctacatcaccagtgttgtagagtttttacgtaataataaattctttggttaacggtatcgaattggccaatccaaaccgaagtcacccaaatttcgatttagtttggttcggtatatgtaaaccaatcttttacaaaaaaaggttcctaatttctacatcttaccatgcaaaaccgaaattccaatataccaaacatttttaaaaatgcttaaaaatcaaagggtttgttacaaaagaaaagatttaatttggtttccattagtaattaccttaaactgaatcaaattataccacatccgaaccgaaccaaaactcttttcggtttaaatcagtatataatttcccaaacccttagtcctgggagatcggttatctattcggttttggttcgtatccattcggttattggttattttggttcttaagtttagtatctatttgtttattttgaaatttcagtttcgttcggtttcggttctttcggttttaaaatttagtatccattcggttattttgttttgaacaattttggatatttcagttattgttgaatattttccaatatttttcggttattttcgagtatttttactattttatatatattttcaagtatttttaattattttgtttagaaataacaaatagttttgaaaatattattgtagtgcggatattttaggctacccgaaatatttcggttcggcaccgatttggtttcggttatttttaaaattttcgtctcgattcggttctattatttttggtgcggttccaattggatacattcgattcggtttatttgccgaattgctaatcatgaactgagaggtcacaaatggtaaattgcgaacctaaacaattggcgtgtattcattcatttcccgcgtaaatcctccaccttcttcttcgccggcgttaatggaatcgccgacacagacgtctgagcacatagaatccatgacggagtttctagtaaagcactaccccgatcagctccgcgaaatctctctctcttctgatcccaaacttcactaccctctcttcatcgagtacgcagaactcgttgacgataatccgtctctagcgcgtcaagttttctcagatcccgaacactatcttcggcaattcgacgattcagccattctagctcacgtatgtactcaattttccccaaaatttgattatacgaaatggtgatttcgattagctttgggtgtagaaaattgctttggagcatatgaagaaatttgaggagaagattggaattgagaagagatttatacatgttcgtataaacactagtggatctcctctagaacgaagccctggtgtgtgtgtgtgtatctcttgttttcgagtttgttctgcttctcttagctgattttgattttgacacagagacattcccgagtattggccgggttagagtaaagcaccgcgggattctgatgatgttgaaaggcacggtgattcgatccggggctgtgaaaatgtatgagggagaaaagatgtatcgatgtcgaaaatgcaagcacatgtatggttatgtgttgtggttgaaactgtatattatacattttgtcatctcttgttcttgtagtattgctgattgagttgatttcttctataggtttcctattttccctgagttagaatcaatcaactctattgtgaaaccgcctttttgtccttctcaggtttgtcacatttcattctttgtctagctaagcttctttgcactagatagtcttctgttttgcgataacactctgactaaggtctctacaattgtgtcctgaagtttaaaaattctctgcgtgacagcggtcaaaagcttgtgagggcacaaactttgatcctgtagatgatacagtaacacgccatgattatcaagaaatcaaaatccaagaaaatactcaggttttaggtgttggtgttatcccaaggtccattctagtcgtcctgaaagatgaccttgttgacaatgttaaagctggaggtaaaccagtttgtttgtttttattctgtgtcttacatattcatgattgcgtcaatattatggctcagtgtaaccattctaaacgtatcagcatagctgctccgcctcctgatataacatatttcttttcatgcagatgatgttgttgtctctggaatcttgacttcaaaatggtctcatgacttgaaagatgttcgttgcgaccttgaacctatgttgattgccaatcatgtcaggtaaatggcttgataattttgatagagacctacaaatccattttattaaggaaatccttaccacgttcctgaaagttgtatgcaaaactggtactagtttgtttgcctgaaacaattattaaggtctttgatgggattctattttctcgttttcttagttactattggtcattacagtttcatattaactcactttctaccttctcttcacctgttatcatgccactatccagaagaactaatgagctgaaatcagaaatcgatatatctgatgatttgatcgagaagttcaagaacttttggagccacttcagagatacccctttgaaaggtaaaaaatcaatgttacctggaaagtattccgcctatttttttcgcaattattatgaacaattattcccctgccatcgacaactattacgtatgtttttggtaaacatttatgctaaattctttaatgttttgggtaagtcagggagaaatgctatcttacgaggtatctgcccccaagtctttggactcttcactgttaaacttgcaggtatactactctatgcatactttttttgtcaacatctcttctcattgagttgtctaaatttatttgtatgcatgtgcaatgtatttatatgcagttgctttgacacttattggaggtgtgcaacatgttgatgcttctggtacaaaagtacggggagaatctcacttgcttcttattggtgatccaggttgttatcgatcactgagtattatttttgtaatatatgcatgcccctaaattttggtggagttccaaattttttgcttgaactaaattgattttgaactagaagaaaccttgcatgtgtttttaagacataaaagggtcgtgtacgtttttttgttactagatgattgatttatatatgggaatgttctttcatacagacctgcattttacattgtttatatctggcaggcactggaaaatcgcagttcttgaagtttgctgcaaaactaagcaacagagctgtaatcacaacgggactaggaagcacaagtgctggattgactgtaactgcagtgaaggatggaggtaagctctctgatcttatgttgtttccttcgcaatacttttctttttcatatagtcttattaagttgttttcaggagagtggatgttggaagctggggctcttgttcttgcagatggtggactttgctgcattgatgaatttgataggtactttccagatgccagatgggagaaacatctattataagaatactttacattaatccgtagtgttatttactttaaatttttgatcttcgatgaactttaagtattcttgtggtcttgggaatttcttggctcttatcacagacaagaagaattcactggtaaaaagtggtcagcctaacttgacaaatattttaggaattttccttttttttttttttttttttttttttgtcatcattccttttaattgatatcgatctatattgcattctattgcgtcttcctttgagaaacgtgcgtagaactgaagcgctttctttctttttctttctggaagcatgagagagcatgaccgagcaaccatacatgaagcaatggagcaacaaagtataagcgttgccaaggtaaaccactctacaattttatgtatatgtattttcttgttactgcatcagctccattattcaagttgtacagctaaatcggcttaagccttattttgtttctgtatttttctgtttctaattttgtctttttcaatatgaaggctggcctagtaacaactcttagcacaaagacaatcgtcttcggtgcaaccaatcctaaaggacaatatgatcccgatcagtgtatccacttcagatttagtagaccttgcttacatacatacatgctgtttttcaaattcaagttggtgatgtctcttaaaaaaaatacttcttccctcaagcatcagttgggcaagcattcctgatttccctttgcatttgtttcgatatttctctttagaatttccttgactggatctagctctttctgtcaatactgcactttccggtcccttgttgagcaggtttgacattgtacttgttctcttagatacaaaaaatcctgaatgggatgcagttgtatcttctcacatccttgccgaggtaagtttctttaaagaatctataaatattgtgttgtatactgatattgagtcttcttaagtagagtatttgtgacaagatatataactcatctgacttttaaaaaattgatgaaatgaaccaaggtgcaaatagagcaagacagagaggtcgatgatctgacaactatttggccactaccgatgcttcaaaggtatcatatacgtacacagatcatgagatccataacccatgagagtgtcaattattccttgcacataaatccgggacgacaaatgtgcttgatcttagctgataatacattcatggttgctactaacttattatatcctgacctttgcagatacattcagtttgtgaaaaaaaacttcagacctgtcctatcaaaggaagcagaagaaataatttcaagttattatcgactccaaagaagatcttcaactcataatgcaggtatctcctgagaaatacttcgtggttctagagatgctagtttggtattaacatggggtgagggaagctgactatagtggaccactgtccagatttgaatcctattatttgatggctgagacattttattccttacttatatagaaagttgctccgaaaccccttcatattggaggtactaggtctagaaaatccttaggtcccatgggaactctgattaagcataaccttgcttaaatggattttaggactggcttggtgggtacaacagtatcaactaagatcgatcctacaatggttgatatcttccatgtaatttgattttactctgaactgcagcaagaacaaccgtgcggatgttggaaagcttaatccgtttggctcaaggtacctcttctgttatcgtctttatcaatcaaaatactccaaaaacaggaacaaaagagaggatattaatggtattatggtgtcacgcagctcatgcaaggcttatgttcagaaatgaggtcacgcgattagatgccataacagctatcttgtgcattgaatcatcgatgactatttcagccatagtagacagtatggggaatgcgctacactcaaatttctccgaagaaccagatcaggaatgtatcctttttcggcattaactaacttttgttcctatatatgtccaaagtccgcctttcgttacttaggagtcatcttctggagcattgcggcttgaagtttttgtatcttttcccctaacataaagaaacaaacagacgcgaagcaagagagatcatccttggaaagctaagaggcgacgacatctattagtgtgtggctgcgatgagtagtgaccccacagaaaagagataagtttgcaataatctccctcacgtttctcatgcaagttttcctttgtataaagtgcattatgtgtgattctgcagtggatatggctcgtgtggttcctttagagtatatctagagagcaaacttaccttaaaaagatgtatgtattccatctccatgtccaattcaatcaaataggtaaagaaaacacagattttcttatctttcgacggatgatatcaaccgctttccataacattccacttgccattgcaatacattgttgaaccaagaacgcattttgaaaacgtatgtgtaagtacttcttaagaacttttagttgactatggaatttttgcaaggtagctatgtaccctgtggatcatgtctcggtccaactcacttattagaaaaacagtgatgatattgattgatatgtgtaggtgacaattgcttaatttataatcgaattaaaattgctcgtcccacattcaaaacaatgaactttatttcctagtcaacgaaactacgatgacgagtgtcatattacggcgatggtttgagacacttagatacttggccatatagtgtgcatacttgttgaacaccggttctataattgcatctccgaaatgagcaacgagcaatggttcggtgatgcatcttgcccagcttgcatgctttataccagcttccaactgaagtgattgctcctcatcttcttcctcacggtcaattttgtatgggacaacatggtcgaatttctcgatcttggtgatctcgaaggaaccttcctttaagataaattctcttacctcttcttcgtttggattgtagaatggcatgttaaatgattttaccattgaatcgttcacaaacccctacactcacattctcgtaacaatttattacttggtagagaaatgtttataaagaaaacaaaaatatggttattgagtatgtacctcggaggctagatcgaggaggcaatcggataacaacgaccaaacttggaaacaatctttggataaagtgtcggaaacctttcttcccacgaacgttagaaccatatgtccattatgcactacttcttctgaacgcatttttaagaacaacgaaaaatctatcttgaactgatttaaataactcttgtagacatttgaagggtatggatatttaatatgaatgcttttagtgttgctctcaaggccatctggaattctagaaagccaatggatactaaaagctgaatgaacaaaatggagagactttcttgggaatagccttgagtaaaaagaacccgggactcccgagacaaaccactttcctttaacctccggtttcagcttctcttggaaagaatgaaacaacttgaaggtggtattgaaatcgttctctggaaggtcgttcaaataacaatcgatttctggtgggtttttactcatttgttggtatgactccatgatcgtgtaggcgattgcggacatggccaacaccgtgttttgtccagtagaacaacccaagtctgccactttgatgcaaccaggaaacccatttttcagtagcatttctcttacgttctctatgaccaaaggttgtatctcatagaaaacacttctctataaaaccccaaaaatatcataaattgtcagaccttgatttactagtacatagttattatatcatcacattcgtcagtgtttaggtacctgataatgtgaattagtagcataactatggtctcctgttcctcctttcattttaagagcgtccaccaaagagtccctaacgtatatatcaatgttatttaatcagataaattcaaaattagaaataaaaattcataaacacacaatggtaaggttaagcatgttaatgaccttagtattagaagctttagtatatcaacaaaaggatgattacaatctaatctacccatttcagctctaaagaaagagttctaaaaaacaaggaaaaagaaattatacaagtacaaagttacaattacaagaaattaatcatcccatttacttaaaatatcgaagaattcaattatttgtttgaatgaatgtaaaatttatttatagaaaaaaacggttttacaattaatgcaacatagagtcgaagatcaaaaaacattttagaagaaatcaatcattaccttgagggagacatgatgttcacaatatgtatgtatcaattttctttaccaaatgtataaggtctatgattagaagatcttggccttgaactagcttgtatgcatgtgtacttgaaagaaagggcactttagtttttctggtaattttttccgatggtatgtgtgtactggaaacgagcactgtcgcatacttaagagccacttgtatcaagcacaaacacacacacacacaccacttgtatatcttacacctaatattgttatatttgcatttattttaattttacaacagatcaaattggaaaatataaaaaaaaaaccaagaaaatgggaaacatgataacgtaattaaaatagttcagagctcttccatttgttgtttttaatgtatgtaataaaataagatatttttttattttggatttaaatgtacattttcagtcgcttttatcaaaaatgataaagttcttatttattatggaccaattataaaaaactataataaagtgtgtgttttttcgtctaaaaaccgtttttaaatgtattcacacattaatgtatttctctttcgtttttttaacccttttaccttttctcaacataccaattattatttttatattttgtcatgctttcactatggagagttgaggcccgtcaccaaccagtcgaccatcagacaatgaagaaatgcctgtttttgattttttttagataagaaaacttctgacttagttttcggctaagatcggatttagtttgtttgtatgaggattaaatcttcggtccaaaaacttttcggtacaaaaaaaaagaaaatcatgctttaacctacaaattaaatagatatattatatatacatatatgaacatgttcttattgtaattatggaatgcaatattttcatgcaacgatcacatctaataacttaaacgagtttcatacaaaaaaaaaaaaaaacttaaacgatttcacacaatgtagcattcatgatttctgaacaatacttagcctcatgagtttatgatgtgcaacaatcattattattcttgtggccaaagcaacctctatatcccttgcctctctatggttcatcgactttttcttatgctcctaccactcgtaacacaacaaatatgctcaaatatccctcaacatctaacaacctagactcaaacaatctggctacctattcctagtcttagtggtaggaaagtataggactcgaacgagccgtagtagaatgaggcaaagaaaatttaggtttgaagcatcgtgtaaattcatttttcatagttcatcattagagttatgtttgtgttttcattcagatgatcttacgtaatgttgtcgtaatttcaatgtaccaattcttgtatctgatttaatatcagtgaacgaaatagatgtaacaaaaaataagatacactgactaaaacaaaatcttcttaattggaagaaataacatgatgaaaataagtcctcccttagtggtattggatggattgttggttctggccgacgtttttctaatcttggattaaagagccttcgacagtgtttatcctctcttcatacggagtttgaggttcttctttgggcaatgcgatcccttacattcctatgtattttggacattatttttgagacattttgtaaggagttgactcagcttttggacacacttgatgagtggcccgcttttatttcagaattagaagattttaacactttaaagtatagcttttctcgtttttccatatcttttattctacgtttaaacaatgtcggtgctgattgtctcgccaaaaaggcaagagcacaagattctatcttttcccatgtaagcttatttactccagactgattttctcctaaaaaacccgcccatttgtaatttaaatgcatgaacttattttgctgtcaaaaaaaggaagataaaaaacatgatgaaaataatgttaatgtttcgttgctctctaaaattgatttcttgtcagaccgtagtggcacaatgaatacgctaacgtgtaactccatccccgtatctcaaactcacagccgcaaatctttcaaattggttaattttagaatggatcgcgacattatcttcaattgtgaatattcaattctccagctcagaatagttcaatatggacatcaatttctatttattttgatatatgcatgtgacaacaacatcaagttccaatctcaaggaaattaaatgggaaacaaatatatattagttcgaaatctcaacgataagtttattcaaatattaatatctatatatatctcgtttcgggtattttttcttatacgagttgttcactagaagcaggggttcatgtgtcacacactcacaccaactacatcaaagcccggaaactacaatgtgggatgtttcctttaacattcaagtcagataacagaaaaataacgaaaaaagaaagatataatggatgaaatcgtgaagatatacaaatgtgtcggaaaacagaagaaaagttttgtaaaattacaccgagctaaaaatagatggtccacggtagacatattgtaaagatgaggaccctatgctcaagtaaactaggtaaaaacagagatgtcaactagaggtaaatgttaattcatctctagtaaagttaactatttctgggagcacaagaagctggccaaggaaggacagtttgtctctatgtgtattcaaactaaaggagcatttctggagaatccaaagcgtgaaaaaggaagggtcttttggggtttgggggctattctaggtttgaaggagtctctcatatataagcatatatggagacgtgagagagcagcagagaggagaagagagcaagaacacaatgtagatctaacaagaagagttagaaaggtgtagagatagagaaaacatgtattagtataagctcatcattgttgttctctgagtgatacaggaagtagtacatagtgagtctaagtactagtgaagggtattagacgggtcacttgtagcttcttgttattgtaaacacttttattctttatagtgaagtttggggatctattgatcccgacgggacgtagcggcttgttaatgccgtgaaccgggttaacaaattctttgtgtgctcctcttcttcctttctctcttttctgctattatcttctacttcttctctatatcttgtttgctctgttttcgtgtggttgtgttgatgacaaagcatgaagcttgaggtgttgtagaggttgtcaaaaaccctacacatatgactatgttacctcattattatttaatattgtgaataatcaatgtctgatgatcagaataattcatatttacatcaaatttcttctgatacgtgcatgtgacaacaatatccagttccaatctcaagaaaatgggaaaataaaaatattaatttgaatcccaatgataagttaatttcacaatttttttgatataattaagattccaataatataataatttctttcataaaattcagaaatttttatgtttatattttttaacttttcaaaaatgttacatgtttaccttgtagaactcatcacttgaatacacaatttctcttatctttaaaaaaagtacgatgagcttttggctaaacatcaggaaagcctgagagtggtactgatcgtttcctaacttgatcgtgtaaatcgtttgggcttatgcaatatatatggttaatgtttgcagttagatggagtgaagagcttgtattcagaaaactcttccaaagatgttggagatatttgtaacatgttattaagaactctaatgtattctaacgagaggagaattcatcttggtaattcttcccaactttgcggttcataaaaccatcgtgagttgtaattcactaaataaataaaaaaaattaacttatatttattgaacataattacattccattttactttcaaattaataaacaataaaatattaagattgagtcattgttaaatagatacataatataataggtatcaactaatttatcattaaatttaaaatcgaattatctttatcaattatcataaggaaaaattgttggcttgtcgctaatccatcgtaaagcaattttagcaaattattttaatctatcaatgatacatgtggctattgttaatttcttttaagataattttctaagaaaaaaaaaaagaaccgttaatattatttttttttaaaagaaaaaaaaactaaaaccatcaatatccaaagagagaaaataaataaaattaactacaatttttttcggattaccctagaaaataatgtactgtttttacaattatatatttgtttgtgtgtgtttaggtcatgtaagctttttaatataaacaagaaaacatatttttagagaaaaaaatcgcaatgtcatcttccaaatttgctatcttttgtatcatccttgtttccatggctagccttcatgaatgtaagttatataaatgatttatcgttcattgtttatcatcatcaccacctctctataatcacaactgaatattccatatataatcttttcaaatttttttttttttatataggtaatttcttcaaagaccttaccagtccatatttgaaagatccatgttattacgcaagaattaaacaatattgctgcgaaagtactgttccgggtgaggggataagctgctatgacacggaaacacaatgtaggaatgattttgccaataatcattgtaatccttatgcaaagaagaactaagaaacttgacgaatagttatacgtactaaatattttcatacgttttactcataatatacaagttgtaaatatgcatctgtatttacaatatacaactatgtaatgcaaaatgataaaccttctttctcttcttttttatgtggtatgtatttttcagattaattaatttaagacttgaatttaataattaatatattcttttatttcaatttttgtgagacttgaatttttttatttcctactaactccaaccactatgtacaacttatatatttaactaaatatataaatccacaacttcaaaactagtattaacaaaaaaatgtaaatcaagattttcatcataataataacaatacgttttatgaaaaaataatgataattaggaattatgttaatttattgtcttcaagaatattttgcaacatttaatattttttataaaatcaaataagggtatttcttatctttgtctttaaaacttctcgtcaagaaatagaaatgattaagtgaaaaaaaaagtaaaaaaaaaaagtgaaaaagtgggtttctttcttaatttttatactacaaagaattaaaaattgaatttatcacacgaaaaaataatgaccagtattcaacaacatgattcatttaagtatttaactattaagactcaccggaatcatagctggctctactcaagaactgtccaaatctaaaaaccctcgtcttcgaaccgacatatttttactgcatatattgaacatatttaactagacacaattagattttgatgatgtttcctcattaatttagggactccatcacagagatacaagtaaatgtgaagaagttgatgggtgcttttgaaaatattctgatgaaattcctacttgattatcatcaagtccggtgaaggttgtaaaaaggtattgaagtttgtgacgtttttttataaatatgaaaaagcagatagagcaggtcaaacaatttctagagacaatgccgaatcttgaacaaatgatattatactacgatacaccatacgatgacgatgtgcttgacgtttccatgcaacttcaaatgcttcatagagtggcttcagctaaatgcaagatccaagtaatctctgacaaccttagcttatcgtctttcttttccataagaccacaagtggaatgtggacggatacaccttcttcaatagtacctttccggtttgaaagagttatacgttttttgcgacggtatagccacatataaggctataaacttcccgtgtttttgtctgtcgtcatctcttgccatatctgtagctaatttatctggcaaaggattttcccaagctaggccgtagccagatagaacaattcttgtacgttggcctctgttctgttatttgcctcttactctttcaaattcttattattcattccacttttttatgtaataaaaatatataactaaaaaacaatgataattgcatacaagtgaagatttactacaaaatttaaatttggaaagtgttctgaaacatttaaagagggtccctaaatgatttactaaccttttccgaaacatcccaaaaaaaagaaaggttagtaaaaaaatagatgttttgcacacaaaaaaagaaatgaataaagattttaagtttacttggagaagtggaaagagagagagtcccatctccaaaaaaaaacctacgtcaaaacgcagccaccaaaaccttgtaataagaaaaacattttactgtggtaacgctttagtcctaacttcactagcagtaatgagtgctgctgcaagcacaagacacacctcgtggatggtggctacggccatcgctgccgtggaaactcgttggaactatcctctccgttttttcaacaaagatgtgagggctcgtcttcgtgccatcgctgtcacttctcgtccaccttcctccgcttcttcttcttcttcttcttcggctgatttagtcaaggagaatcatcctatgcctaaatctgaagcttccatggaaagagttatgtgtcttagctgctttggcccaaccactgttcgattctagatctcttcctttgtatgtgactttttttcttccatcgttttcttgaatttgattagttaagtttcttgtggtagctaagtcatgaattacaaatcatatagtttgattatttgaggcaaatcaatcgcttatgttggccacatttttttacaacattctcccaggaagagatgagaccattttcgtatatcctgaccaccacaatgttattagagcaaaaacgataagccggacagtttggcacgattaattcgtatatctttcggttgttccatttgttgacatttctaggcaagtgattctagctcaaaggaggtttatttagaagaaagaaaagcaaaaacgataagccggacagtttggcacgattaattcgtaccgaaccgcatcatatcacttttgtaaataattttcctcagaattggttctactgaactctaaataaaatctgatgacaaaaaaaaaatgcaaaaacaaaaactatttacattgtcccagagcaatcaaaatgttttatttttctataagatgaaagttatagaggttgcacttcggcaaccttagataatttcatcaatattcattacactcatatatattcttatatcgtgtcgttgtttgtctcataatgtggggcttgtgatgtttgcttcaataccttgtcacagattaaacttcagacgagaatttagggataataaccctgttcatcgtaaacacgagttcttcacctcaaatataaatttaaatatattttctgaaaaatcttacatgtctttatttatttgtgaatgtactttcataacttattttctaaaaatattttgaaaataacatacggatgatctcattaattctctgaaagaatgacttccttaatttattgtatttacatggatatccgttacatacttacatctaatttacgaaccagaaactaataaaacactaatataggctacattcacgaaaagacaatcaacgtattaggtcccatttaaatcttttccaaaggtggtaaaacaatttttgctaggtatttatgtgaaggtacaatatctttctaaattttatatgacgtattccaagttctttataattcgtactaagcaatgatttctcacccactacaatgccaatgataatctagattcctgtaacgtcgtattcatgactttattaaatttggtttgttttttccacaactccattagatttgagtgaatagaaaggggtcgtctaatggataattgatcaaattctttaccaaacgtgtcaaatggtccaaatttagatagtaacaatttcattgaataaaagtcttctagatcgtggaaaaagcatataaataattaaccaaattcagatccaaaccggaaaaatgtgtattgtaaaaatttaaaatctccaaaccggctttccttcggtttaccgttaaatgatctaattttagtttttaaaatataatttcagaactcatacgttttgttacgttagtactatgtgttgatcctcgagtttacaatcttcgtttctataatccaaacgtcaagtttaaaaataaagttaacgacgggataagtattaaatggtattctaaaaagcgatttaggcggtcgactaggcgctcacggctcacgcgacgtatagacaactgtctaatctgcctaaaatcctatatacctcgttttactatatttttctagttttcaactaattttatatttctataaatagttataaatgtttatatagtatttgatatagttaaaagaatattttgtataatttttgtttacgattgaacatatatatatatatatatgtatttttttaatagacattttatataatatttatgtaaaaaatcatatttataatgtctttattataaacgcttaaccgtctaaaattatctatgtcctaactaagcgttctaggcgctaggcattggatcactgtccgtttaacgcctaacgttttcttgaatactattaattaaagtttttttcaaaaaaaaaacatttttttaaaaaaattcatttcgaaactaaagaaaatatccaagaaatttccaaaaatggtggaacctacacgatatggttcacatattttccatgaaaggataactattttgacttttctcatcacgctcaataatagcgtgttgttaatcctttactctatctctcttcaaagctctattgatcttacatcttctctctattgtagtaatggatttttacgttttccttgggactgttgctgctacgttcttcactcttttgggtacaatattttatatgatttatggaaaatttcgagtccaagaaactataataactacttcttcttcacctcctacatctccccaatcttctttgtcttgtaaccagaaacacgatgtcttccccagcttccacggggcagatgtgcgcaaatcatttctcagtcacattttgaaagagtttaaaagaaaagggatcgatacgttcattgataataatattgagaggagcaaatcgatcggtccagaactcatagaagcaatcaaaggatctaagattgcagttgtcttgctctcgaaggactacgcttcctcgtcgtggtgcctgaacgagttggtggagatcatgaagtgtaggaaaatgttggatcaaacagtgatgacaattttctatgaagtggatccaactgatgtaaagaagcaaaccggagactttgggaaggtcttcaagaaaacttgtatgggtaaaacaaatgcagttagtcgaaaatggatcgaggctttgagtgaagtagccacaatagctggagagcattcaataaattggttagttctttttaccacatcttactgccttttttttttgtcaaccgacattaattagatctcaaaatagcaattcttgaaaaatattatttacatatatgatatgatatgatgcggttcggtacaaagttttcatgccaaattatccgttttaatatttgtaatacgcgaaattaaagatgacatacttgcttgcctcgatagtcaatataatattatttttttcaacaactttattagctcttaatatacttcttcgtagctacgttttaaataatttccagccaaaaatatataattatgtgtactttattatatgaattctataaatgactatttacttacaaatataatttatcttcccttttttagggataccgaagctgccatgatcgaaaaaatctctactgatatctcgaacaagctgaataattccacaccactaagggattttgacggtttagttgggatgggagctcatatggaaaagttggaattgttgctctgcctagactcttgtgaagtgaggatgattggaatttggggtcctccagggattggtaaaaccaccatcgtcagatttttatataaccaactctcaagcagtttcgagttgagcatcttcatggagaatatcaaaacgatgcatacaatactagcttcttcagatgactatagcgcgaagttgatcttacaacgacagtttttgtcaaaaatactcgaccataaagatattgagattcctcacttaagagttctgcaagaacgtttatataacaagaaagtgcttgtcgttcttgatgacgtggatcaatcagtacaactagatgccttggccaaagaaactcggtggtttggtcctagaagtcggattctaatcacaacccaagataggaaacttttgaaggcacataggatcaacaatatttacaaggtggatcttccaaattctgatgatgctcttcaaatcttctgcatgtatgcgtttggtcaaaagaccccatatgatggtttttacaagcttgcgaggaaagttacatggcttgttggtaactttcctttgggattaagggttgtgggatcatattttcgagaaatgtccaagcaggagtggagaaaggaaataccaaggctaagggctcgccttgatggaaaaattgagagcgttttgaagtttagttatgatgccttatgtgatgaagacaaagatttatttcttcatatagcatgttttttcaaccatgaaagtattgagaaactagaagattttcttgggaaaacattcttggacattgctcaaaggtttcacgtcttagctgagaaatcgctcatatctatcaactcaaactttgtcgagatgcatgattctctagcgcaactaggtaaagaaattgttcgtaaacaatctgttcgggagccagggcaacgccaatttttagttgatgctagagatatttctgaagtactcgccgacgatacagcagtaagttttaagtctctcaatttcttcactccatacaaactgagtttacttatcttataactaataattacttctatttttctttttttttttatttcagggtggtagaagtgttatagggatatatctcgacttacatcggaacgatgacgtattcaatataagtgaaaaagcttttgaaggaatgtccaatctccaattcttaagagtcaaaaattttggtaatctttttcctgcaatagtgtgtttaccacactgtttgacctatatatctcgaaaacttcgattactagattggatgtattttccgatgacatgctttccttcaaagttcaatcctgagttcctcgtggaactaaacatgtggggctccaagcttgagaagttatgggaagagattcaagtaagtatatactagatattgatttttttcatgcaatattttaaatcacagtttttaatctcgaatccataacttgttcatctttctacaattattagcgtttaaaagaagatgagctgaccatttttttagttaatttaaattatgtataataagcttactatagtagaatgttatataagtagtttgtttcgtacgtgtatactatttggcgaataacatgctcacaaagttttcttcatttttttttgtacagcctcttagaaatctcaagcggatggatttgttttcttctaaaaacctaaaagaacttcctgatctctcaagtgctactaacctcgaggtgttgaatcttaacggatgctcaagtctagtggagttgcccttctctattgggaatgcaactaaactcctaaaattggagcttagtggatgctcaagtctcttggagcttccatcctctatcggaaatgccattaatcttcagacgattgattttagtcattgtgaaaatctggtggagcttccatcctctattgggaatgccactaatctaaaggagttggaccttagttgttgctcaagtctgaaggagcttccctcctctattgggaattgcactaatcttaagaagttgcaccttatttgttgctcaagtctgaaggagcttccctcctctattgggaattgcactaatcttaaggagttgcaccttacttgttgctcaagtctgataaagcttccatcctctatcgggaatgccattaacctggagaagttgatactcgctggatgcgaaagtttggtggagctcccttcctttattggaaaagccactaatctcaagattctgaatcttggatatctctcatgtctggtggagttaccctcctttattggaaaccttcataagttgtctgaactaaggctgagaggatgcaaaaagctacaagttcttccgaccaatatcaacttggaatttcttaatgaacttgatctcacagattgcatcttgttgaaaacatttccggtgatctccacaaacattaaacgtctccatcttagggggactcagatagaagaagttccttcgtccctcaggtcatggcctcgccttgaggatttgcaaatgctatacagtgaaaacctcagtgaattc

SEQ ID NO: 220 - DNA, 84908 bp, Arabidopsis thaliana
aagcttgagaagttatgggaagagattcaagtaagtatatactagatattgatttttttcatgcaatattttaaatcacagtttttaatctcgaatccataacttgttcatctttctacaattattagcgtttaaaagaagatgagctgaccatttttttagttaatttaaattatgtataataagcttactatagtagaatgttatataagtagtttgtttcgtacgtgtatactatttggcgaataacatgctcacaaagttttcttcatttttttttgtacagcctcttagaaatctcaagcggatggatttgttttcttctaaaaacctaaaagaacttcctgatctctcaagtgctactaacctcgaggtgttgaatcttaacggatgctcaagtctagtggagttgcccttctctattgggaatgcaactaaactcctaaaattggagcttagtggatgctcaagtctcttggagcttccatcctctatcggaaatgccattaatcttcagacgattgattttagtcattgtgaaaatctggtggagcttccatcctctattgggaatgccactaatctaaaggagttggaccttagttgttgctcaagtctgaaggagcttccctcctctattgggaattgcactaatcttaagaagttgcaccttatttgttgctcaagtctgaaggagcttccctcctctattgggaattgcactaatcttaaggagttgcaccttacttgttgctcaagtctgataaagcttccatcctctatcgggaatgccattaacctggagaagttgatactcgctggatgcgaaagtttggtggagctcccttcctttattggaaaagccactaatctcaagattctgaatcttggatatctctcatgtctggtggagttaccctcctttattggaaaccttcataagttgtctgaactaaggctgagaggatgcaaaaagctacaagttcttccgaccaatatcaacttggaatttcttaatgaacttgatctcacagattgcatcttgttgaaaacatttccggtgatctccacaaacattaaacgtctccatcttagggggactcagatagaagaagttccttcgtccctcaggtcatggcctcgccttgaggatttgcaaatgctatacagtgaaaacctcagtgaattctcacatgttcttgagaggatcacagtgctggaattgagtgatataaatatacgagaaatgaccccatggctcaatagaatcactcgtctacgtcgattaaaactcagcggatgcggaaaactggtatcactcccacaactttcggattccctaataattctggatgcagagaattgtggctctcttgagagactaggttgctcttttaacaatccaaatattaaatgtctcgactttaccaactgcctcaaactagataaagaagcaagagaccttatcattcaagcaacggctcgtcattattctatcttacccagtagagaagttcatgagtacatcactaaccgagccattggaagttctcttactgtgaagttgaatcaaagggctcttcctacatccatgagatttaaggcttgcattgttttggctgataatggtggccgtgaagctggtaatgagggacgtatggaggtatatatgaccattatggaaaggcagaatgatttcatcacttctacgtatgtatcactaaaccatatttttccagaatttctaagggagcatatgtacacagtcgaagttttagttgacgttgaggtgacttcggatgagcttgtctttgatttccagctcaacagtgagaaatgggagataggagaatgtggggtactcgaactgaagaaccatgttcaaacattttcggaaattgattcttgggacaattattaggagaataggaagtgatcgacactatgaacgtctgggcgagagcctattgaataaccagctctgcaacggaactgaagtgtagaaacaaagagcaaagaagagccaatctgagtaacacatatctctacaggcgaaaaccaacaatagaactgttcatatcttctaagattacttatattaatgtttcgtttagttattttagggattagtctgaaacaaatcgagaacttggaaacctatagaagtgtacatattacatgaaaaagtggaatacatattaagaatctgaaagactattacgcaaataacagaacagaggccaaagtaatagttttcattgttgcttaagctaaaaactataaccaaaacaatgttggtcgtctttaagaagggtaatcttcaaacaggaaaggtactattgaagaaggtgagtccacttgtggaaaaggaaaaagataagctgaggttgtcagaaattacttggatcttgcatttagttgaagctactctaggaagtatctgaagttgcttggaaacttcaagcacatcgttatcgtatggtgtattgtagtataatatcatttgttcaagattcggcattgtctctagaaaatgtttgtcctgctctaactgttttttcatatcatcgtagttaaaaaaagtttcaccaaacttcaatacctttacgaccttcaccggacttgatgataaacaagtaggaatgtcctcaaaatatttgcaaaggcacccaacaacttcttcacatttaattgtatctttgtgatggagtccctaaaatcattaaggaaacaccatcaaaaatctaattgtgtgtagttaaatgtgttaacaaatgcagtaaacaaaatgtgttggtacttggaagacgagggtttctagatttggacaattctttagtaaagccggcaatgattcccatccgacttctccatgacggtgagtcttaatcgtcaaatgtatcaacctgttgaataccggtattgtttcacaacaaaaagtgagtacctgaaacaaaaaccaaataaacaagttcacaatctatctgcaatcactaactcaaagaatcaatgttacgttaatatacctcaagagacttatcagataagtgaaggatctgaacattgcttactcccataagaaaatctgtagcattaccaaccaaaaatccatagcttgcttgtgcacactgatcatacgtcatttgaagattgagactagcttcaacaagcgaacaaaacttcactctcgggtacttgaccgcaacgtaatcagagtattccaagtaaactagatttggtgtatcaaatgaaacagtatccggattctgatcatagtctatacaacatagcttcaatctcttaaaggttttggaagacacagagcggttcgtaaaatcaaagtagacattatcagaaccaattcctctaagacaagacaaccagatagaatcttgtcaaagtaatcaccagcttttcctatactaatagtatcaagataaagagtcttaagctttggaagaaaaacatcttccacatcaatggcagtaacattttgagattctatcctcagactaacaagtgactcactcataaagaccttagaaggaagctcaccacgatctacactaacgtgtaaatcaagttccaacacgtttaatatccaactaatgacacaaattggatcaatatcgattcccttagagagaacttgtttacaatagaattctcttgcaaacccaaaactctattcaagaaatcgataaacattctattactatcttcacgatgatgtagattaactaagccatcaaaatcaagatttggtctgaaagcaaagagataacgccactttttcgagagaagtgaagtcaaagcagaatcttttagaggaaggaatgataatatgtggcaaagtagatttggttctggtagattgttgattatgtctttggaactaaagtctatctttttcgacttcatagtgacagatctcaacaacagttgaaacctaaaagggaagatttttaagagaacttcagaagcttaaccccaaaagacgagagcccacaaaagaaaattggtagagagaaataagaatttgacaatacagagaaagaaatgagggagctcaaatgttgcgaattttgaacagccggattcagtggttgattgtgtgagagaggaagtgaaagaagagcaaattaggaatttctgataggtttattacctctaaaacgacgtcgggtgatctttttttttttatcttattaatttctctgtgttacaaaagcaatttttaattttttgttgtatgataaaatttaagaaagaaaaaaaaaatgccgaaatttacaattttacttttcacttccaaaaaataaaaataatcatatgaaattccaaataatacacaatctagtccttatacatatattgtaaatgttttcacgattacatatatttgtttattgtaattctaaatgtataattgaactactcattttgagagctttgatttgctattgttatatatcaaccttttaaaaatttgacaattgtgaaaaaaaaaaggttagattgcgtattattttggattttacaaaatttttctacattttttgaaggtaaagtagcaaaaattatctacttccagagttttttgcacaaaattctagttttaaagtggcgttttttttgtgtggttctagtgtttcttcagttattggattttctatacagcaaatcattaaataagtcttatatttttgtttctatagaatgaaaaatatacagtatcttttgaaagaatgaaaaaataaattaagagacagtttcgaagaagattttttttgttacaaccaaattagatgagatatatgaagagattagtggcgtgaaggcgactcatggtttgcttcttcttctttagtttgttgctttgtttcagcatttgccacttttttgtctatcaaaggctttatcattgcctccaagtcatctatatcttgtgtgactttttccacctgcaatttgtaagttttgacttagtcaatcacaatcaaaagtatatatatgtttgattattatttggttccaaaacatcccccaaatgataaaccaataaaagatacccaaaaacatagatcatattttcaaaatgtaatcttttacattagcctttgttagtgttagattttagtaagatttttatgtatatttcatagatcaatttttctaatgataaagtgttgtggtgtaccttgtgaaggaaatcttgggttagatgtgcttcatgggcagcaacctctgaaatgtgttctagaaccaaagccacttgttttagtttatttttctcaggcagtttctctgccatttcttcagccatttcgtcagtcgccgtcgctactttctccaccatttctgctacagcctctaccccttccacaaccaactccgcctctcctgcatacatcacatcattccaatttataaagtactatggcaaagacaagattagtgctctttcgaagaatgttttaagattaccacacatgacattaacatataatgtgattcaagttctttttagccaatgcaaatgaaagatgttaaaattttattaccttctattcgtttcagtttttgtaacctttcgttgttccagaaagataacactaaggatatcgcagaacctataacccatcttcccctgccatttattctccaaactttagtttatgaattgaattatctaatgcaacttggtgtgtacgtatatcataaccttgcatggtacatattgttttattcgacgtatattagagggattgagacagagagataaagaggagtaccaagagggaaaattaaaccactggtttggaggagaaggttgcatcttggagtcattggaaacattactaaagtatctcccggcattaagcggatttgataacttgagaccttgtggacatatttggttatgatagtctcttccaaatcgaataatcgccggacatggattcatagatgttttcctctcaactttgttatatatttgtaagacttccgcaaggccctgtcgatacaccgcaaaacctccgctctgcattctccgacttagatacatcatcaatccgttttatgaaatcaactttgttgaaaaaatcataagaacaactttaatatatacatgcatatttacattaatgtattcagtttatgtgtgatattggttaagcgtatgcttaagataaaaggcttttatgtgtagtaacgctttggaaagactaaagaggttgaacacgccaagaaatgaggttgtctttatatcttttcctctatactctatagtctatatataacttacttgtattaattgagaagtacaaatttagacttaaatttgaaacagaatttacttcaaaaagcaattgaattaaataggaaaccttctttaaaaaatttcatattgtaaattggaaatattgtttccttccatattagaataaataattttcagcatcttcttcaaagatttttttaaaataaaaattaaataaattgacattttcttcctttctggacataaacctaaattaaggaacataatattgaaagtcagctatactcttggcaatgaagtgtataattggtttcgacaactaagatgtagcattttttacagactttttagatttggtgaagatggtatcttcttcaaccgaaaaggtcggcggtcttagtttatctagaggaactacagagcgacaatgaagaattcacaaccttctctttatctttaatttctcgtaatgtgcaaatgtaaaaacggataatttgcgcggaaagtttgcactgaaccgcttcatgtcacttatgtaaacaacattcctcaggtttgacttgtttgagctctaataaaaattggatgacaaaaaaataaaataaaattgaaagtcattaaatatgaaaccgatccacaactcaacagaagaacaatacacaactgtttataggttttcacaataaaccaaaagtaaccaactagaccggaaaaaacttagacatggaaacataaaatgcaaagcttctttgtttactaatcaaaattcatgaactcacgaactgcgatttctgcagttgcattcgagaaacaggagtacacctaagaggatgagccatgtttaaggtaattccagcaacagtctcttccatgttgaccttatctccattggttctccagtcaaagcaatgcaccatcattcctattgcggttcctacaaatatataacctagatttactccaggacatcctcttcttccgctgccaaaaggaatgtacttaagttcttgctctctctcctcttcttttcctcttgaagaagctagaaacctctctggcttaaactcatcaggatcttcccaagaatcgggatctctcatcacggcataagcattaacaacaagtgttgtgttctttggtacgtaacagcctccaatcgtacatccatctgtgactttccttcccaagagaggtgctggtgggtgtaatcttagcccttccttgatgaccgcttgcaaataagggaggttcggtagatccttctcttgaatcaaccttgttttgcctacaacagaatcgatttcttttctcaatctctcaagaatgttaggcttcttaatgatctttgccattgtccactcgattgtttgcgctgaggtgtcagtgcctccaaggataagctcctgtaataaaaaaaaacacaggacaattaatgttgttgtattggatttctcaatgaatccaccaagtgaaaggagaatttaccacgaacaaggacttgaggtggtccctagtgatcttatactctgcctttccatctcgataaacagccaacagcacatccatcaggtccataccatgatcatagtccgttttctcttcgtgttccacaataatcctttcaagaagctcgtcgaatttgcgggaaacatccagtgtctcttttttgaacggtgagattctgagtatctcaaacagcctgcgtaacacttgtgtcaagaaaagtttcttaaacaaggcaaatgtctcggtgaccaatcccctaactctctctgcctcaccgttctcctctaaacaacccctacccataatcatcttgcagatgctattgttagtcagctttattgcttccttagcaatctcgacagtctcgcttttcatttccttactaagcaggtttgcgtgaaaccgttctagttcatctgcacgggcgcctcgtgactgctcgagtgcctgaggtccgaacagctttgtgaccatgagcttcttcatgaacttccagtaatctccataaggagccattacaaagcttgaagacccaaaaaagagacactcgtcaatcggagggtggccgtgggatgagatgttcacgtcatgcgtcttgaagatctcgtaggccacagaggcagaggagaccaggactatggggacattgaagatgcggagacagagaagaggtccatacttagaggagagtttctgaaaggctttgtgaggtagatcaaagagtaaaaggtgaagatgtccgattatcggaagagaaggagggctcggaggcagatcacagcctcgtgagccctttggcttcttgaagaagaatacaaagatgcaaatgactgtgaatatggataagaggatctgaggatgaaaatgaattttttgaaagtcaacgacgattgttgccattgtttctcaaaaacaaagggggcagatacagaactactgaataatccatgaatatgttatatagtataagaccaagcatgctttgttcattacattaaaaaatgttatctgactgaacgaacgtgaaagcgttgtgagagagtcgaggaacaaattaataatatcaataactaaataattagcgttcaccgcccaaggtgacagctaatgtgatgtgaggaatcgagagatttaagattgactcacaatgtacacaatgttcttctttgctcttctttctttttttttttttttttttttttgaataccaggagattctagtccgaagcccgtgatcttcccagacccgaaaccacagcatgtaatattagtttcgtcccaagcgtcactcgaaccgtctttactcttcttttgaataccttctcccaaaagtgctagattttcttgcttctgttcctcctcgttcaagacgtttatataactgaactgaagcaagacctcaagaattaaaaagaagtctaatgttattgaaccagattggtttgttatgtaaacagccaaatatgaaatacttgttcatcagactcaatccttgccattctcggcagtcggcaccaccatccgcaaccgcaatacttctataaattaataaagtttcactgtctctacattattaatttactcaggttttagtgtatatcaaatactaacatggtaatactataaacaagtctagaaattcttggttttccaaaacatattaacaaaagtaaccggagatagagataattatgtgtttggctaaaagtaattataaatccacatgaagtgaaagcactttgccccattttagtgatttgtggtgggatggtagaggctgggagctggggcgtattctgccatatatcacagaaaatgcaagtttaagattgggggttttggtggttgataaggttagcaagagatcatttgtcatggggagtgagtgttgatggagccttcaccgtcaaatctgcatactcactattaacctgcaattgtgagtcacgacctaacatggaaaggttctggacatgtgtgtggagtagtttgggtccagagagggtgaaaatcttcttgtggctggtaggaaaccaagctattatgtcaaatgctgaaagatatcgacgccatctctgtgattctacaatatgtcaagtgtataagggaggggaggagaccattttacacatattgcgggactgccgggctatgagtggtatatggcagcgccattgacggtagaagctttggcctttaagatcttattgataacaaaaagctatagaagctgtgtttgttatttaattatatttattattattaaatatatattataaatataaagtgatattaaaattaaatcatgttgtaacatagtgacaaaacaaatattttattaataataaaaaataaaatacaaactttttaaaataaatgactaaataaatattctcgacaaacaaaatggatatgtattactcattcatttcttctttcaataaccaaaaattgcattaagaagtgcgataaactgagaaaattcgggattattatgataaatgttgttttgcttcatcaaattatccaactgatttttcccatgtttccaacacaaattacttctgaagatttctttctttatgaatagcacttaaatcctttttgttgttattcagattttgaatggcctatatgaaccatatatggtttttgaaaaatgttaattatgtaaactctcttacacctacattaatgttgatgataaaaataaaataattattagtaaaatagattttaaaagaaagatagaaaattaataataattaatttattaaaaatgattggtgaaaaaaatatacgtaaacttgtggagagttttaattatcatgggaagaagaagaaagaaagcttttaaatttatttgtttaaaaactatgtattcgaagctgtaaaaataagataaataaagaacaaaaaaaaaagactttttgcccaaaaaaataaataaaataataataataataaggctttgagaacttataaaaaaaattaaagtaaaaaaaaaaacatgattggcaaaataagactgtgaagactttagaacactctcaaagccttgaaacttgaaagtctatcgccaatcaaccccactattacactcactctttttaatcactctagttgttctataattatcataaatcatatttaatatcatataacaactatctaattgttggcttcttttttatttatgtactagtatttattctgtccgtcgggtcaaacattcagctaagaaaatattaggaagtttacatttttcatgatattgttctgcatactgttatttgttttccaaagattatttatgttttagcaacttaaatgaattcgttttctgaaaaaaatattttggaaaaaatgattttgatacaccaaatgtaactatcctaaactggatgcgcggaaatattaacaaaacttgaagagtacattgagtggatttgcatcgttaacacatttttagtatcatgttttattttaatcttggaatttacaaaaaaaaaaaaaaaaaacggagtaatagatcttattgttgacaggtttcaaacactaaatatatgccttagacagaaattgcataatgaattaagaaacatgattagatgatgggttacataattaacaatgttaatttaacatgaacacaaagtagacgtcccttccacaatggagattttgttgtttcaaagacatacaaggaggtttgatttcattcataacacatttctatggaactgtttcttaaatagtagcgtgttggctttaatttgcgttctgatttctggtgggcttgtggtggtggatcttcacccacttccattttcctcctttttgaagcctattcattctttttgttccttcctttcacaagtattattgggatgaagttttgtccgaccgttggttttgactatctgaaaaataaaaccagtttacaggaagattctagttttagaacagagaaggaaaaaagaagtaaaacttgttgatgtaaattatttagtgaatgaaaatctaagagaccacattttgagtttcaaattcgaaaagagtatacctagatgtgtggttagaacattgcctcgcaactgtacccatagacattggtagcataggaagagaagagtggttgccattagagtatacacatgtgaagtagagcggccttcgtcataaaacgaaagagagacataataaacaattaataacccattagttaaggcttttgcagggagaagaagatagattacacatttacacacgaaaaatagtaactgttagtaagagcttctcttaatcaaagaagaatctgtggtttttgtggtttcttagaatcaaagatttcataatcgtatcgaatatatacgtaagaagatggaagagagatggggagttagtggagatcgtggagaagcggaaaaattataaaccctagtacaaataaaggatattttggggagggtttacaaaataaaaaaaaaactaaattaaattacgcaagttataaaaaaaagccaaaaaggaaattgtgaaaatatatgggggtgattggcacaaggctttgaaaacttcaaaccatatctaaagttttcaaagttgtttttttttgccaattagcctttttggactgtagattttttttaaagttttcaaagctctttttttttccttctttaggggtgattgcacaaggctttgaagacttcaagacataggccttgaatggtaaacgtttctttggtgggaaaaatttaaaaaagtctgaaccacttttttcatccattcaacaaaagatcaaaacaaatatgaaaaagtacaggaaacacaagtggtccaaatattttgtttttagtgataaaagagggagaaatatgggaggtacgtctatagtaaaacttcttgaaaagagtagtatgctatccatatttggcacacctatctaatataataatatatatttattttctgttttattattaaagacatatatatatatatatatatatatcaatacatgtatctcaaatgaaaaacaagtataagatctctctcttttttgaaacattgtctaaaagaagttcagttcatccttacttcgcacgaattttccaaacaccaagttgaaagtattttttccaaaagttcaaatataattctatatatacaatttttagttagttttatgtacaaaaaatatctaatataaattttcatcactttaaataattactgtcatttataatttttagattttgctaactttaattataaaaatatttaagtaagttcctaatacgtataatttataaattgttgtaatagattcaataaaaataatgtgtagacatataattgttcaataaaattactcatatagattttgaataatatgaatgtaatatttgataattagaaaaaatgaaattatgatatctatgtatatgatacaagtaactaaaatacggttaaaattgaaacagtcaaaatacaattgattattcatttaataaaatataattcaatttacggttttatttttgtcatacagttttaaaatagttcatagtatgtctaatataaaatattatttttaatattattgatatatagatatgacgttcaatcgccgacaaaacacaaataatatcggggaagctgatacacatttttctacgaaaacttcaacacggataatggctacaatgagactgcataaatttatctgaatttcaaatttttcagatgatgattttgcagaagtaatgggaaagacagagagtacggacacaaattctgagactgatctagggatatggaagatgcagaagtaattgatagcgatcttatgacaaatatcagagaaaatattgcagatatactatgggaaaataaaaatagtagatattaatcttttttgttgttgtattttaatttttttttaacattttaaaagttatcacgataaatatatttattgtatttgtaaataatactatatttaaatattatataatatgatctgcttttaccgttcaaatatttattttgaactgccagatctgcttgaaccgcacatgtaccgctagatccgcttttgtccagcttgatccacttgatccgcttaatccgctccgcccgatacgctttctccattcggagccatatctagtgtcttcacagttttttttagccaattagacgtttttactttaattatttttatagtttttaacgcccttcttttttctttttctttgtttctcttcttttttaaaagcctttcaaacaaatatttattaaaagattttttctatcttctccctaaataactaaatactttatacaattttacatatatttttcataaactatttttaatagattaaatatctttcaatttttatctttcttttaagatccatttcactaataataattttattttcatcatctcaccattaatgtgggtgtaagaaagttatacaaaatacattcatctatgtagccataagactaattattttggtttcgctccgatcttgtcctaaacatatgtcatttctgaatgaaatgaatggttattaaaaaatgatgaataataattatttagtttagctcttgagaatatttttatattcatttttttttgtcatctttctatactcatttatttataagtttctgtaattttctaaatttatttctaacattatttgtatttgttattaatatgaatacataacagtcacattttctacacctttgttctaccaatcagattttaacagccaaagtttctacagtcaaagttttacagccaaattctctacagctcaagtttttaaagtcaaagcttctaaagcgtaaactaacagtcgctactaatcggcccctttgttttccttcttttttaaaagtttcataaacgagactttcaaacaaataattattaaaagatttttttatcttctcccctaaataataaaaattttatacaagtttacatatgttttttcacaaactatttttgatagattaaatatcatcaattttctatctttcttttaagatccgtttcattaataattattttattttcatcatgtcaccattaatgtaggtgtaaaatatttatagaaaatacattcatatatgtaatcctaagaccaattatcagggattcactctgatccggtcctaaacttctgtcatttttttaaaataaatattttattaataattaatttgattttgaataaatctaccttcttaatgaaatgaatggttattaaaaaaagaatgactaataaatatttagatatttcttgagaatatttcactattcattgatttttaagtttttgtaatttctaaatttatttttaacattatttgtatttattattaatattaataaataacaatcacatcttctagagctttgttctaccaattaggtgcatgattggttggactgtaagtctgacttacagccttaatttttcttaaagccttgattatgtaccaatcgtgttgtacctttatttttaaacttacaacccaaattttttttcctttttttaatattgtagtagaattttcttggctgtagaaattttaattcattagataaatacaaaaaattaaaattatcaacataaatatataacaaaaaataaagataacttctaaaaaaatgataattatcaaacctaaaagaaaaaaagatgttataaatatacatcaaacgtgaacttttaaaattcattactttgataccaaacaaatctaaaatttgtgtttccatagtaatgaattgcaatgaatttatggaataatcataggtaaaatttgatttctttaatcaagaattcataggagtttttatttttatatgatcataatatatttatttaaattagtaatgcaaggcattttatttactataaaaaaaacttttattacaactattagatttattaatccattttttataaatatttaaaatctaaaacttacagcaataattttacagttacagtccaaccaatcacccactagattgtaatagtcaaagtttctacaaggaaagtctttacagccaaattctatgcatctcaaatttttaaagtcaaagcatataaagacaaaattaacactcgctaccaatcagcccctacgtttgacaaaattgagtttttaaagatgttgtcgctatgtttttcctttgccatacctcctttttttcactctttgacatcttacattgcataattttattggtcaggtgaatattaatctataatataaaagattttttttgtaaaaaccgagaaaacatttttaatatctagcagcactttggtttctaacattatttgttggatattatgcgagtttaaattgtgtgtattaattaccaatagaatgtatttttagtttaaaatagtttcttatacgattactaatatcgtcataatctaggttccaatcaatttgcctcactagttccttcggatggagaagaagatttgtcagattcagacaacgaatctgattcaatggattttatgtcgccttggggtaaaagaatcctccgaaagagacaggttaaacaaccaacaaaggctaacaaaatggatgaacaaaccacacgtcgtgggaggggaagaggctgtgggaaacgaggtggtcatggctaatggtctccaacaacctaaacactaagtcaattgaagcaaaaaattggattgtaacctgcatttaatgtaccctttctttctactacttgtaactttttataaactgtatgacctcgtgtgcctatatcgattttgattttcttaagtaaaaaaagtaatattgtcgtaattttttttatattggtctcttatactgtttctaattatttagatatcatatcatcattatttgtttccactaagattatcagggtcggcccagacctaaagcccaagaagcagatgctttaggcagcaaattttatatgtatattaaaggacatcaaattcttagaaatatcttgtagtctagtggtgttaggtgtatctgagggtatttggttaggcctgggtgttcggctaaaccgggttgttcggatcggtttgttcagtttggagaaaatttgggtttttaaaaatttcaccgaatagacccgaattaaaattcggttcgggtcagttcggtagtcgatttgtttgggtcggttattagctagaattaacgttccaaatttgaaccatacaaaaatttatccggtttattcggttttttatttcggtttacataattaaaaatgaaaatttacagtttacaaatccaaacctaatcaaattaaccattacaaataaataaaagcccaacatacaaaggaaattatgaaaagcccaacaaacaaagacaattatcaaaaccctaacttataaaggtaattataaaaagcgcaaaacacaattattagcccaacccaataaaatattagggttttgacagtaatgtgagcagccccttcacggttgcgactccaggtgtaacggtgatggtaacaacgacgacaatctccgatgatcttattccatctttaaacaaggttgtgttgtgttggatcccaaaacccttcaaattttagaaatcgaaattgcaattaaatttaatgttttgtatccaatttatcatctagatattagcgattcggaagaagaattagaagcagtatcaacgaagaagatcgaaagagcttacctttacgatttcttcggttgaacttctgtgaaaaagaaaaggggttgaaaatgaggagcgtacggagatgaagtgatgaagtagaagagaagagaagagatgtttgggtaagaagatcttattaaattagatacaaagtcgaagaagaacaaagaagtgacctctttgatttccttggttgcagcttgaatttcttaaatgacgagggtaagaagatgtagaagtgttgatcacgatgaaatgatgaaggagaagagatgagatgatgtctagatgactagatcagagatgagatgaaagattattctctataaattgcatgaggcggaggctaagagaaagagaaatgaaattagggttggttagacttatatagggcagcttaataggctgctaaaccgaattaacccgatcggttcgattaccgaactgacccaaaccaacatccgattgccaaaattaattttgtcgttcggtttcgggttactcggtttatgccgaactcccagggctatatatggttgttggtttgaaccttggcaactgaaaatattaacaatttttctatttttatatgtactaaatgggcatcaaaattttgttggacttaaggcatgattagtgtttgggtcggccctgaagattaccaacacgaaataaaatttagttggcatagatccaacgtgaatatattttgttacgaagtctaacaacaaaattggaattattttcggtttagaaaaacatcaacacttttttgtttacgacttactaaaattaggattaaattgtcaaaataggcaaaagtaattcgcaaaactgtcatactaaataaatgagggcgttttcataaaactaaaaaagtagaaggtttctcttgggaagttttcaattttccatagcaggtctaaacatgctcattagcgattctttcttatatattaaagcagatgtttaaagtgctcacgttcgctctcagaatatgagcggacgtttttaccccctttaatgaaattacctaatttaattcttttaaattttttacttttcatttttttataaagtaattccaaaaatttaaaaatatatatacataaatacagaattatatttaatgggcttattgttgaaattattaaaaaaaattagcccaaaaaaatacatcgtcatatgtaaaaccctaaaaacatctatgttacaaacaggaaaaaattggataatactgggttttgccctaattcctaagctataaataccgagtctcgaccacacaataatcatccagtttcttttttctaattagatagttttgatattatgattttttatatagctacaatcttttttatgaatcgagttgtttttgtgtgtttgtgttttattggtgtttatataatattactaatttgcttattttattttttgagttccatgttcgtttgattgtgtcaaataaataacttttgggtatcatctaatcatgtgttttatgtttgtaggtaaatcttcatgaaatatattgaaaaagatgaaaaagaataagaaaaatgccgaaacaaaaaggtaaagtagtctcttaagttcatgtctttttagttgcgttggtgtcgatcctcatctttaatggtgtttgtgtatgattttgcaggtttgggtttatagaaacatcatgaattggtgcatgaaataaaagcaaaatatttaattaataaaatctccaaaagatattaggttttgtttcatcttgcgaaaatttactctcttatctaactatgttttttgttttatcttgaatttatttatttgcttttctttttggctcctataaaccctagcatatatatattttcttccaaaacacattgaatatattttgaaattcagggactaatcatgagttgtaacatatgtcttttttttaaccttttcagattttttcgctaaacatgttatattttttcacgatcctatggatgttctctgtcttctcggatgtttctctgtatccactgattcgaaatcatggtcaaaccgtctctgataggaagattaatctggcttggttcaaatcgagagccaaactgattgacttgcatgtccttcataaattcaagctctacgagactctttcggtaaaaaaatctcctcctctttctctaactttggtatgatcatgatctgaaattatgtgaatcttatagatgttcaaaatctctttttaatttactattgatttgcatcaatatgaatcttattttttcggcaactgatttacagataattgcgttgatacaatgatagttaatggattttttttgtgtttgacattattgcataatgaattcattaatttgccggttttggatttgaattctctttaaggtggtttagtttaattccatgaatcaccctattagatactactaaatttccgtcaaaacattcgagctcgagcttttgatttcgaaataatacagggttagagtcattaatttagatttagcagagaactaaaaatcgtctctcttcattatgaaataagattcaatgggagttttgtgcaaggagatgaagattatttgcacagagattaacttaggagattaagataatttgcacaaataatattttgtgcaaggttttgcataaggagtctcttaatagaacaatgtggaatgttggcttcttaaaatcatcttggtttcattgactccagcgcgtgagcaaatctgagaatagttcgagtcaagatggagtagcctctactaaagtgaagaggaaaaaggtcaaggtggtaagtgggcggttgtgcagtagctaaagtttttctggtggaagaaaaataaagagtttgaaagaatgactgctgaagaaagatacttaacaaactaataaaggttagttaggagaaaagaaaatacattgtgttactgatttagacaaacaaatacgtgttgttatctcttatgttcgtgtttatatctgttattttcgcacgctcgaaagaaagaggaacaccttatggagaaaatgaagaaactggaaccttcagagtcggcggaaaagacacatgaccctggaaccaaatctctatttggttctaattttttctacagttttattctgttgcttcatgaaatttttgtggaaaattcttgatttcctgatatgaaatcattatgatttgactttgaagttggtgaataaattggtggtgcaaaattttatttgattagaagagatgtgatgagaactaaagctttaggaggattcttaagattgatcgaagggactacaatgagttaaatttatttgaagatcctacaaggtatacaaaagaagaaatgcacaaactgaaaagacggatgattgtagggaacggggagtctggtgggtttaaagcaagcacaacttgctatggaatcatttgtaagtccctttactaccactattcgttttactttctcattgttttggaagtcaatgtaatgttgtgaactcatggagaaatgttaattcttctggtgcagggtttgtgagattcttagagccttattatatgttcgtgacaacaaataagaaagcaagtgggtgagatctatggccatgcagtaaatgatatagctgagggtcaaatgatcatatttttccataatagttatcgtgtataatatttatattctacaaatatctttttgaatgtgaacaacagcttttgacgtaaatacttagtatttacaaattttaaaatattaggataaatattacaaatgtgaaaactgaaaaaaagaaggaaatttgtattatcatttttagtttaatacttttaaaatcgaggtaaatattacaaatgtgaaagttcaaaaaaattatatgtattatagtattttgtttaacattttttaaaagttgagataaatattaaaaaaaaagtttaaaaggggaacttatatcgtcgtacattagtttaaatcttttaaatatcttttcttccgttttttattaaaaacatattgcaccgaatatttcaaatatgttaaaatacccgaatatgtttagtgagcttatcttcggaaaaaaacaaattggcccggtataatttacaccgtcatatgtaaaaccctaaaactatatgttacaaatctctataaatataggttgtcattcatgaaaaacaaacataacagtttattttatgcatattcgttatgatttatagttttgatttgtaccataaagttggttctttctatgatgcatcatctcatagatctttgcttattgttgatcgacgacctcttaaacgaggattatagcctttttatttgattcacccataaatattgaacctaatttgtggtatattttaagcaaatgaatatttttttaactttttagtttttttttaattactaattagtttaagttatattttgatctgataaaaagtatttgtgggtcttcccacgcgtcagacccaaaaagtattaaaggggtcagctgacccctctaaaattctatatttgcattgtagccctttaaaattattttgttttttccctttttaaattacaaattagtatgtaaaccttttaagttttatagtatttttcttctactttgtcttttgacactatttcttactttttttttttttttttgattcatccataaacattgaacctaatttctggtatttttttaaagagatgaagttttttttttaggtttttagttgtttttaattacttattattttaagttatattttgattctataagaagtatttatgggtccaccgcataggcagacccaaagaagattaacatttgcattataaccctttaaagtttatgatatcatttatattttaagttatattttaatcttcttaaaattacaaattcgtatgtaatccttttacgttttatcgtatttttcttctactttgtgttttgacactatttcttacatgtttttaaatttttttgtttgtttcacccataaacatttaacctaatttctggtattttttttaaagagatgaagatttttttttgagttttttagttgtttttaattacttattattttaaattatattttgattctgtaaaaagtatttatgggtccgccgcataggtagacccaaagaagattaaaggaggtcaattggtccccaaagttcaacatttgcattataaccctttaaagtcttttaaaatattattttatatttcttctattttgatcttcttgaaattacaaattcgtttgtaaatccttttttttttttttgggcatttgttaaccctttaaattacaaatttgtatgtaaaatccttaaatacttcaaaagatgatcaaagttaaagttattttaaaatttatttgcattatttcgttgaatgatgtggtagaattagtctttgatcttaaagatttggtcttgaagaatacacatatataatttgcaagtttatatgggattattttgtagatatatttatgtaaatataaaaaaatgttggaaacttattttttcctatgattccagtcggatgattgagtggttatggatagcgccaccaaaatatttcataactttgatgtttttatgagttacaattgatgtataaatcatttataataagtacgttatgtttcatcgtttgtaataaattaggcacacattaaattctctaagctatgtctaatattagtaaattacttttcgttttgaaaatcgtgaattagatgattgagttgttatggagatcgaaagtgttgagctattttggtgttttaagtgtaataatttatggataaaatgtttgtaataagtttggcaacttttaactatgtctaagattggtgattttactagcagtataaataagcgagatattatcataaaaaatcgctctagcggtttgcatagtataagcgagcttcatctggcttatttacctttgcaatatcctcttttgtttccgtacggggaggatggtttctggttagtgatggaaatcggatttgttgatacgagaggaaggaagagaaaaatggtcactatgagagagttttgatgaatagagacgatgcagattttatgctaaaatattcacaaaaagtgtgtgatgatgatataatttagttgctctagtttctaactttatttgttgaatattttgtgactatacgatctattgtattactgctccaacttagccaatttaaattcgtttgtactgattgccaagagaaggtattttagtattaaaaattttcatatgtgattagtaataatgtaatatcttcgtaaaaatactcttttcatattgatttctttaccattttgaatttcttgatttcattttaatatacgctaaaaaccgatttcggttttgtattactaatcaaacacgaaatacaaggcataaactaaacgtgaatattttgttacggagtcaacaacaaaattggagttaattcagttttgacgacttaccaaaaccaggattaaattgttcaatacgcaaacgtcattcttaaaactctcatactaaataaatagtgggcgtttttgtaaacccgaaaaagtagaggggttcttttccgaagtcttgtaatttcccagaccgtcgacgacaaaactctacacatgtccattaacgtctggatttcgattgtcaagaagttttgtaaaacgcaaactccgataatctttctctaatctccgatcgtgttttcttagtgagatggcggaagagaaggtaaaagatgaagctatgcaaataatgggaatgtttcaaattcttccgagacttgtcgtctttgatctcgattatactctctggcctttctactggtaaaaatttcttgtctttcttcattaatttccatccccagttttgtgtaatttgtttatcaatagaattggtatctagggtttgcttttttgatgaatgggtatttttgtgtaggattgtaatttgaggaaagttataatctttgattagtttgaatgtttcagtgagtgccgttcgaaacgagaaatgccatctatgtatccacaagcaaagggtatattgagtgctttgaaagagaagggtatcgaaatggctattgcttcgagatctcctacttcagatattgctaacacatttcttgataaattgaacattaagcccatgtttgtggccaaggttcgttttaaacatcttcttctttgttgttgttgttgttgtctccttatgtctctcttcgatgtggttcactgtgttaagcaactcttttttctagtgattgtgaggtaaccaaattgatatctgtcataagggtaatgcttttgggattgtttcaggaaatatactcaagttggagtcataagacggaacattttcagaagatacacacaagaacgggagtgccgtttaccgcgatgctcttcttcgatgatgaagaccgaaacattaaatcagttaaacacaaactactacttgagcgtacattgcatagtgtggattaatttctttactttgtgcactaagattgaatcttttatgtgtgatcaattaaacaggtttcgaaaatgggagtgacaagcatccttgttggtgatggggttacgcttggagcatttagacaagggcttactgaatttactcaaaatcataatagtatcgagaagaataaacaggtttggcgtgacaagtattctggaaagcctacatcatcggagacagacaaagattaacattcatttgtgagagttatgatccattggtggacacaaaacattctcgagtgttgtatcaccatttttaactacaagtaatttactcggatatgttaagatttgtattgaacaagaaagattaatctagactaaaaacatgctcttctcgagaaaatgcagaaaacattggattgacttctattttttttttgttaacaaacacacttcaaattggtttttctctctcttctctctctcgcatatttgagagagagaaaccgtttgatgttctgccgtccggtagaaatccggtttattttcgacatccatcggctctttcatcgttggttggttggctttgtgtctagcattgtccgtatcttttgcggtgatgactagctttcttccggcataggtggctccgattagcacctttggccagctctatttctggcataggtggcttcgattagcacctatgactggctctgcttccgtattctcggtttcgagattgtccggctctatctccgatgattccacttctctccgatggtgtttggtccatatttttcttcttccttgtctcttttgtttcaatttgctttggtttgctttgctttgaattttttttacctctttcttttgatctgagattgttattcattagcctctcttgtataagggactgatttcgatctttatgcttaccggattttatttttgaagatcgacttgcggtactggtttgatgtgtttctttgtgcctttggtttgaggatgaagaaattggaactggcacttttcttttgccaaggttaattggagtgatggacattttagtttttaggttctaacggtgatgcctctaagttcatttttgagatgtctcgatgaaagattttgttggagaatcgaagaggaagttcttcttggagtcttaaacccttgcattaagaacaagatcaacttaccagtgataaatttatcattacattgtctcatgtacgttcttgtttttcgtaacaaataaagctatgaaaagtaaaattaggaattgattattcttctcggttttgagaaacaaatattaagtcacattttccagtaggttgataataccctcacaacaaaacctctgtttatcatcacgtttcactatacctaagaacacctttctttccccacgcacaaccgatttaaagggaagaaaacaaatcttttccatcaccaaatgaatgagtcatgcgtgcaatcacaatttgaatttacatatgaagccgtccgttcccattagtttctgtccttgatcttcttgtgcccggtaactcctcatgtttcgcttctgaaccaattttgtaacctctctcgaccgattcagcttctaacggcagctcgtctaacgtctgttttaaaccatatcaaaaagacacattttaacaagttaaattgcaatttcttcaagataaaccttcaacttacccgattagcctgctgaagaatgcgaagagtctcttgcgtgcgtttcctctttatcgctaactcatcgggctctttcaacagttcttcaattaagttctccctgtcccatccaccagatttagttcatataaaaaaaaagactattcacaaaatcaaatgggaagcacatggtttctttcatcacctgtaaagcttctcgatgaaaacattgtgcagctcacgtttcgtgtaatttacctgtgttttattcacaattatatggaatagagttattagtcccctcacaaagaatcgacccacactaagtgtcatcaatgaccataagatgtttggctagacaatcagaagactagaagagtggaacactaaccagaaaatgcatgattgcttttgggaccaagtcctcgacattcttccttacaatgtcatagtaggatttcaataatagctttgttatctcaatctcaactgactcctgttctgaatgagtttcagatgacttcaaaatagttggaggcttcaaaacaaaacattatgagatgaataggtaagtaaagtgacagtattgggcaatatgaaaagcctgagaaggcacaagattcaaacctcctttaaatagattgttgacaagttctgatacacttcttgagtagtttcgctgaatggtttgtttaataggttgtttttagcagctgcctgaccatcactcccccgaaaaattgatgagaaaccactccagcttgtgcttcctgattaattcacaatcggtcaagaatactacattcatattctaaacagaacattgaattaagagcagacatgtatgcttatatgtaagtcgtatcttagacaaagaattttatcatttcagtccaaaatcatcttaaaaccacacgttcatttatctgtgcatacatgaaagactgaaaaataaatgtgataagaccattaccagctggtgcaggtctttcagcatctgctgcagttggaactgcctgtaaaaaatgttaagtaattatattataagaagtctctagctgcatatctgtactcgcttcatgggctttcagaagcagggccaactacaaatatagtaaggagatcaatgtaacagagtcaaatacataacataacgcatgacatgcctgatcagtgatgattccattagcttgtcggccgagaaaagatcgggtttttatttgactcccggaagaagccgtcctctcaggctccacagtatcctagttgtcatcaaagggaacatgtacgaaaaatttcacaactcgcaaagagaaacataaagcaaatattaatttcgctgagactattccatacccttggccgcgcaacaggatgcggaatcctagaagatttgactgtttgcattgcttgctccacggctttagttcccccgataaaatttgggtgtgaggtgtttatataatccatctgcaaatggtaaacttaaatattttaaactaaatttaaaagaggcactaatcaataaaattgagagtaatcaattttcttgaacttagaacatggtcctactccaccagtgtgacaaaaaaaaaaatcagtacgcaatctaagtaaatttaataatactggccattagattcatgattgtgtggatcttaaattatccatacatacctccatttcaataagatctcggatcattgcctgcgaaggttcaagaccttctcgcagaaagttcccaataacctcatccatgcgcttttgcaggactggaaaccgctgtaactctttcatcatacactgatgactaatctgtacataatttttcaatttaaaattcatggtcatgtaaatcaacagttagcatcataaagaaacgcaaataaaaataacacctttactagctcatcgaagatgaacctagcgcactgaaggctgggatctaataaacgagatatttgcctcctgacaagaacttcaaatggaacctatgcagatgagaatgaaagcaagagatactaatcagagttgctgtaaaagtaaaaaactcaagcaaaataagtatgtggaaagaacagataagcaaaaaaatgctcccacatgcttagggatatagataaacctacatctggaacaaataatgcagatctgggaccagttgcattttgtattgcagtccgaatatcatcagctgttaagtcttcacatggatcaacctccttcagagcaaattgagagaaactaatgagtttaaaatcattaaacccctatcaagtagcactgacaacatcagtaggtaaagatctctatacaacagagaatattcagatcgattttgagtaatacagatcagatgcttgaaagatggacggatatgaactaatataaacactgactatatttacaactgagcatagttctactcatacaagaactgcaaacatgccacacttccaagaactgaaaacctgaaacgaactgtctgccttccgtgcaaatagccccactaactaaacaaagatatctacacacagtgattacctaactaagatatagcctaatgcttagcgaatcaaataatatcttataaatagaaagtcattcatacgagtataggttttatatcaatagcaacaaaatgaatctcctccattgaagaacacataggtgtataggttctatatcaatagcaacacaatgaacctccattgaagaccacaaatgatatcccaaattaaattatgaaagtattacctaactaagatataacgtaatgcaaaacttggaaaaacaaaataaaaggcagttataactgagtgaagatcaaggaaaattataaatgtagcaaacctctaagctcttaacaaatactgattggaaaatgtagagaattcttgctccacccgagagctcagatgttgacatttctttacttttcccttccagggtagaggagtatgctgttataaataattaagccatggtgaggaccaataccaacctaaaaagtataaactaacatccattgtctaaactgaaacagaaccatcttcagatattaccttcgcagtattttgtaataaaactgaggagaagagctccttgaccaccctatgaatttcgaaacagttataaaccagagtaagctgtaagttaaatagtcacatgttgtaggcatattttatacggaaatgaaagagcatatctagatatttagaaaaaatttgtcagaaatatttccctacatatcttgacatcttcaaacactaactctataaattaccgatagtttgtttaactgaaagtaatcagaaaaggctcccaagaatatcaagaagaggatcacaaaaatgaataaaattatattcaaatacgaaaactgagcaagaaatcatacaacgcaaaaaaagcaaatagcaatgccatcattgagaatggatggtatatataaggctaaaactggccaaaacccacataccctagactctgttatatccccatagctctcatactcctttgctgtagcaaacaatgcattgttgatacgtgactttaaactaggaagcagtgccttgatgtgttgaacaaggacctgcaaagaagggaaaaagaactagctcccatcagacagctcataattttagtaataatattaccagctatgaaacttatgagatgccatctttagaaaaaggactactccattcacagaaaaagaatccaccatatgaatcaacaacaatagtgagaagatgtcgctgagtttttcaaatatatacacactaatgtcctacaaagatcctagctcctcctgctaaatgaaataagaaacatgaatgttacatacaaaagccaatttattgtctcaattagagacacatcggaaaatccagaaagtgtattccttatgacactcgtgtcttgactgcataacaagataatcataacaaagaaattagacgatctcaagactgcagataatacctgatttaatttctttgccagttgagggacacccaaacgatctgtgagaccgctgtaaacctgtttattagaaaacaaaccaaaacagaagatataagcagaagagtcaaggaaacgctatcagaaaacaaatcgagagaatgatgcagtcttactggacgactacgaaagaacttttcctctgcaacaagagcatccttgatgctacggttcatcaaaatatcctgttaaggaattaacacccacattagttattgccttgcgtagagggcagtggccacatagtaagagcaaacgaaaaatgaatatagagtagaatggtttggtaacactaaaaaaaaggtctatattacaggtagtatccaaagggaaaagaagagtcatagagatacaaattgtgatagcaagaaataagacacacaagcacaaaagtagaagtggtcacagctcataatggtaggacaagaacaatatacatcataagtaaacatgcgtaaattttttgaaaaacagggtttacctcttgactacgatttacaactcccacgtatccaagtcgaagaggaattgtttttcccagaaggtgattccgagcatcagtacctctgtccataatatccaactgaatcagagagaaaatagagcaatcgtgagaaatagagtagtttgccatcacagctaaatctaaagcaaacttatgaggagagaaatagcacctttgtgattacacctatggttctatgacctgagaacaacaaattcatatgcaaaacgaaatgtcactatgtagtataccaatgaaactgataaattctcaatcgacttgcttccaaagactcaccatcaggatcagcatttcctgcgatttgtaatgcatctgaatttgctaaatcagtattagcagggctaacagcaagtatcaagcaactaggttccttaatgtaagtcaagatcatcgttcttatacgcgcttcgatatcacttggctgatcaccaacaggaaccttagtgataccaggaagatccacaagactaatatccaaaacattaggtgaaaatatcttcaaaccaatcggaatatctgatacacctttgttctctcctgatactctattagtctccgcctacaaacaaattgtcatattcatacaattagacgatcatcatcaatagattctatgacgaacttagaagaagagaatgaataaacaaacctcaatctcacggcgaatctcagagaaatcgtagatacgtctaacaggatcgtggtgaagaaactcgccccactcttcatcggatccaccatcagagctaggtttcgtctgaacaagctggagacggagaggtcggcgcgtgcaaatatcattgccacgaggaagaaagtcacggccgacgagagcttctagaacgctggatttgccactgctttgacttccgacgacagctacttgcggaagagcgatcgtcgattgacttcctagctgagcgaatatgtcttggagcttgttcacaatcggaatcacggaggagcctagtggcgttacggcggaggccgacgacggagggagatcgtcgacggacattgatttgattcgatctaaagatggaagtaatttgaaaaaggggttagggttttgagtagatttgttgcaaagaggttaaagaagatctttctcgatcacgcgccgattaaagtaaatcagagttaataatatctctaaatatttgtgtaattttcggagttatttctttttgagaaattatgtaattttatgttattttttaaaggataatatatcatcttatttgagatgtagattgcactatttttttaagggagatgggagatttgcaaaactatccttattctaataaccttttgtaaaaatgtcctttcctgaaggccattttaaaaactgccccttttaatatggcaaatgactgtcttaccctctgaatgattaggtttcacgttcgtttcacaaacttcttcgttttggcacaaacttcttcgttttcctctccgatttcactcaaaatcgccggcgaattttctctccgatttcactcaaaatcgccgacgaatttcctctccgatttcactcaaaatcgccaacgaatttcctctccgatttcactcacaatcgccgacgaattttctctctgagaaaccccaaaatcgccgacgaatttcctctccgataaacatgttcttcgctgaaggattcagatcatttctctacgacgcaaacaatccccagagatatcgatagatccgacggtaaccgtttttataatcgattttatagtcgattttatagtcgattttatagtagatctgacgctgtttcataacatgttttgcagatggattcagagagtgaaatccttgcattgcctgaacaaatctacagagaaggtgaggaatctattacactgggaaccgttcaacaatactcggattggaatttagttagtaaagtagaggaagctttaggcgagtatttatttcagaagattagaagttcgtttcttggtcctctagttgaattgggaccaaaaatgaaggctaagaagggaatcagattttctggaaaaatctttcactatctcatgcagcagagagtgaaaacaaaaggatcaactctttggtttagagttgattctcaacctatccgtttctccttgagagagttctatctcacaacaggtaataaagttttacaatcgtttttaaagcttaattaactgtcgtagaatgatttacaaggcatttgcataactgtttgcgtagtttacaatcgtttttaaaacataagtaagtgtcatagataatttacaagggattttaaaagcttttaaaaggggtttacttcattaacaatcgtttaagaagcataagttagtagcatataatgatttacaagggattttaaaaagggtatgcatggtttacaaccgtttttaggcataagtaactagcatagaataatttacaagggattttaaaagcttaaagaagtgttaaacacgtttacaagggattttaaaagcataagtaagtgtcttaaaacgatttacaagggattttagaagtgtttgcatagtttacaatcgattttaaaacataagtaagtggcatagaatatttacaagggattttaaaaccttttctaagggttaaacatgattagcaatcgttttttaagcataagtaagttgaatagaatgatttacaaggaattttaaaagcttttagaagggttaaacatgatttacaatcgtttttaaagcataagtaagtgtcatataatgatttacaagggattttaaaagtgtctgcatggtttacaatcgtttttaaagcataagtaagtggcattgaatgatttataagggattttaaaagcttttaaaagcttttaaaagtgttaaacatgatttacaatcgtttttaaagtatttactataaaacctgtaataatagtctctacactgtcttttgttcatacaggaattcaatgtgaacctgttcatagggaacttcgacgaaagggaaaagatcctgtaaaagaaccatacttttgggctagtaaaggatcctatactcttggtgatctcgaagatcgattgtttttaaaacctaaggaaggtgaacctgctgttgaagatgaagaaaagttgtgtcttgctgcagtagtgttgactgaaggaattcttttgacaccatatggaaaagagaagatacctttgccaagattgcagcatgcttctgattttgagatgtacacagcccaaccgtggggtaaagaagcattcagtgttctatcaaattcaattctgagaatggacgagaaaacttgggcaaaagagaaatatgatttgagaggatttggactagcgctaacaatatgggtgttgagcgcagttccagcatttggtgcagcatatggagttaaagataaagaattccaatctgaatatccattgatattgaagtggaaaagcactactactccagagtttttcaagatcgtaaaccttgtaaatgatgtttctgaggtaagcttttgtctatttacagaattctttaaatggtttttagatttgaagttctgctttctcaagatttgtaatgttattgtatcttcgcagatggaggtgaatacaattattggaaacccagaagaattcaagtctttagttcctgatttccacacagacgacatagaattccaacatattttgggacttgttaatatgggctacagattgaagaaaactgaatggaatacaagatgcgttgatgtttgtgctgcccttgaagaagtaggtcaaaacaaaatcaataacaaaatatctgatagcgagaagcttgacaggattttgacaatccttgaagatcttaacaagagagtcgagatgattgagaggattttggacattagaatggaggaaaagaataatcagagatctgaggaagatgaagaaagaaaacaagaagatgaaggagtagaaagacaaccagaggtaattgtaaatgttctttaaaagctatttgaaaggaaatgttttacaatgtattttaaaggttaaatacgtagtaaacctttacaatgtactcttttttttcgcaggctgaagaagaaggaggactagaaagaaaagcagaggtaattgaaaatctttacaagctattttaaaggtctactaattatattaatgattgacttattgtttttattttgttgcagaatgacaacgaatcatttgaagattcaatccgagagccaaacacacagtatgggagctatccgggtgatgatgaaaacacccaacgtgatgttggtgatgaagtagctgaagaatcatcaaaagtacagtaatttatatctctaaaagtcttacaaaaatgattagtatcctttttataattttacattctgttatcttttcaaggataagtctcatactccacgatcctctacaccaaatttcaataggataagaagagagttagcagaggaagaaatgaggttagcatttaaaaaaatttgtattatctaaccaagtgtttataatatttttttcaaatctttaaaagtttatctttcatgcaacttcagaacaagagagttaaaccaagtgttcatgctgaggataatcttaaaacaagaaaacaggttagtatttgcaacagtactgtttttaaaatttttcaattgtcttgttatgatatttacaagggatttcaaaagtacttttaattggtgttttttactattctaggtgccgagaaagaggcagaaacaagttgatagtgctgatgttgatgttccaacaaggaaagaggttagtatctaatttattatgattttgaaaattttgtttacaaggtattttaaacatctgttttttttattctttttgataggcaaagagtaagaaaaggaaaattattggtaatgatggtgataacgatgataatgatggcgacaatgatgattttcagcccgctccgcaaagaaagagtaagcggggtacggttccttccattcatacccaagcacctttcacagctgagaagaagaagcatccaattttgcatccatttgcgaaagttgatgccacaagacttgagaaattggctgaatggaagaagtcaaggaaaaacaagtgagttttgttagtaagatagagagttctttttaataatggaagaagcatcattgttgactgttttgttgttgtaggccactatcaatcgcgggaaatattgtagatacaaagtggtttacaaccctagagacgccaggaaaagcaataacaacaacggtatgtctaaaaatccttgtaaaattggtaacccatgaattacatatagtttttaaagcatcattaagttatttacaaaagggattttaaaaagggttacatggtttataaacaattttaaaagattagaaagtggtaaagaatgatttacaaggtattttaaaaaggatttacatgacttgcaatcgttttcaacggattagaaagtggtaaggattgatttacaagggattttaaaagatattaaaaagggtttaattgattaacaatcgttttagaagcagaacttagtggcatagaatgatttacaaggaattttaaaagcttttaaaagtgtttaacttgatttacaatcgttaaaaagcataagtatgtggcgtagaatgatttacaaggtattttaaaaagggtttgcattttttacaatcgtttttaaaggggttttctaatatgataatttttatttttgttgtgtttagcatgttgatgcagctttggagttgatgaaaacgaggaaggaaagcaatccagaattattcaaaaacaaatcagttgtatttgtgggatcgtctttcttaaatgtgattgatgagtcatacatggagtttttggataacaaagagggatttcagtttcagtctgaagaaatcagtaagctgataatagaggaagaaaccaagtgcgtatcggttcctttctgtatcaaaggaaaatgctaggttgccttactcatccacttggaacagaagacagtttgtatatgggaatgtgcaccttcttatttaatagaagaagtcaagaaaaaatatgttgctgcctactctatagctatgccatacattgttcggaacatcctcaaaaaagaagacatggatgtctctccatttagcatcaaagtcctgaccacttttcctcaggtaacttctttaaatatatcatagtcttagaaatgaatattccgtaagtcttgacttctataacttctttgcttaagtaattcttttggtttttggttgtaggctcctagaaatgaagagtctggtatctatatgctgaagtttatggaatgctactcaatgtataccagccattcaaactttgaagggaacataattcaaaacgttaggaataaattggctgctgacatcttcactgaattagggtcagtcactttgtagaagtagcagacttctaatcaaaaagtagtggagtataagatagatttatcagcttttgtttcttatttcataaaactttgtcatttgaatattttatgaacatctgtatggaacaagatttatgaagtttatttagttcaactcctgttttacaaaattactgtataatggttgtttgggttaacaggtgctttgatttgaatggaaaaggactttaaacatgtttttaaacagggtttttaaacgatttacaagctgctttataaggattttaaaagtgttgaaaaagctgcagtagcggttattatgaaaaaaaattacaatcgtttttaaaatgatttacaaccgtttttaaaagagatttacaaacgattaataagctgttttaaaagcgttttaaaagtgttgaaaaagctgcagtaactgttattatgaaaacatttacaaccgtttttaaaagagaatttcaaccgttgaaaaagttacagtaatgttaaacactgtatctgttactaattgggcctaggcctgttatttagaaaaacaaactgttttagtttaaaaaaaaaactaaaagcccaaaaaacactaaagcccaaaaattcactataacctaaaaacaaattaaacagggattggctgctgacatcttcaccgaattagggtcagtcactttgaaaagatttacaaccgtttttaaaatgatttacagccgtttttaaaagagaatatcaaccgttgaaaaagttacagtaatgttaaacactgtatctgttactaattgggcctaggcctgttatttagaaaaacaaaccgttttagtaaaaaaacactaaaagcccaaaaaacactaaagcccaaaaattcactataacccaaaaacaaaaaaggaaggaaaccgtgaaaagacaacaaaaaagtaacccaaaaaaaaaaaaaaaaaaagaatacaaactgtcgtcttcgtcttcttcctttcaacaatctgaagaaaatctgattatccagcaaaaaggaagcaattaaaggtaactaatttacgaaactgaagtttaacatttgggtttgttcgatttttgccgaatctcttttttgttctagcatttctaggtttttcggttgaaaacgaaacaagtaaaatagattgatatttgggattttgaaggagtgttggaaattgttatataattttgatagatttatgttttaaagtttgatatttgggtttcaaaaaccttcaaagaagatttcaaatgccgattaacttctctgttgtagcaatttcaaagttttttcgttttgaaacttcaacagtaaatagattgatgtttgggtttgtgttttaatttatagatcctcacttaatttatgggttaccagttgattggagttggtttggaaaagggttttttgtttctattttcagcagctgtgttctttgaaaaggattaaaattttgtttttggaatggtttcaaaacggtctttaaaaaggattatggagtaatgactgtgttttacaaggatttttaaagtcttaaaacgacttgtaataactttaaaaaatggttttacaagggtttttaaagttctttaaacgacttgtaatgactatgtttatgtttcgaaaactacaaatgcataatagatttacaaaaatggtttttaaaaccatttcaaaactgtgttaatttaatgactgtgttaatgtatttaatcaggttttgagaaatatgagtacaaagaaactgttcttccctaaaagactgttccaaccaggcagcgaagtagataatattacaagggtatcaaagcattcatccttcaaaattgtctcgactgtcaggaaagctttagagccgatagagttcaacacattaatggacacattcttgggtcctatagtggaattcgctgaaatggacttagcattttcaagccatatcgttcatcatttactccagagaagaatactaaccaacaatgacgaattgtgggttgtatttgctgatcaacctatgcgattctccctgagagagtttatcataacaactggacttccaatggatgatgcatcaggaagcagtccaaatgtgaagagaaagaagaaagaaaagtggtggataaaagataatcagactttgaagggaaagcagaaaaaagatgtgtggattaacaaggaaatgacttttttagatcttacatatgttttggaaaagcgttccaaaaaaatgcagccagaggagagactgagattggcgggttcgttactagtggagggcatattgctagctcgaaatccgactaccatgctgccaattgagaatctgaagagagctactgatttcgaagagttctgtaagtatccatgggcgcagattgtgtactcatatttggtaactgaagtgaagagaatcggtaatgactatttgttaaggaaacaatatggtctatttggatttgttcaatcaattcagatatgggcattatcatcggttcagaagttgggagaaaagtttggcattagagatgaatcatctagtggaaatattccattaattctccaatggagatcaacatcgtctccaagtgcaaaagctataacaatgatagcagatggtgacaaggtacattttcttagctgtggctttttttatgttttaaacactgtttataaataaagagtatgttttacaatagtttttacaatcaagttttaaaaatttacaaagggttcaaagcaatttaaactatttacaacggattttaaaaggttaattaagaattgtgcattatttttacacagtttggaattttgtttatttttgcaggttgaagtgacaccaatagttggtgttcatactcatgaatacgaccacttggtttcacagaagaatcctgaagacaaggatctgttggatgtttttgatcttatgatcaaaggatatagaatgagcaagaaagattggtgtcagggatggattcaagtggaacaaggacatcaaggaagaattgatcatgtcttgaaatctgcaattgaaacagttgtgcatcaaagcagaaaaaggaaatcaatgtcctttggtgagaaggtaaaactggtatatgaaaattgtgaggttcttaagaagaaagttggaaggctggagggctatttaggcatcgaaagagttcctgccagttatactagagaagaacaaaaagaagaggacgaaaaaaggagcaggaagaagaaaagcaagaggaagaaggaaaagaagaggaattagaaaaggtatgtgtttttacaagggattttaaaagcttataaatcgtgttttaaagatttttagccgtttttaaaagataggcagtgttagatatgtatttacaagggattttaaagacttcttaatggggttttaaaagattgaaattcgtttttaaaggataggcagtattcgataagattttacaacggattttaaaagctttttaaaagtgatttacatgagtaacttgtagttataaaacttgttattttatatacaagttgaatacagaggcgacgaagggacagaaaaacaagaaatccccaaacaaggcgatgaagaaatggaaggggaagaagaaaagcaagaggaagaaggaaaagaagaggaagaagaaaaggtatgtgtttttacaagggattttaaagacatcttaatggggttttaaagatttaaattcgttttaaaagataggtagtgttcgataagtatttacaacggattttaaaagctttttaaaaagtgatttacatgagtgacttgtagttataaaacttgtaattttatatacaggttgaatacagaggcgacgaagggacagaaaaacaagaaatccccaaacaaggcgatgaagaaatggaaggggaagaagaaaagcaagaggaagaaggaaaagaaaaggaagaagaaaaggtatgtgtttttacaagggattttaaagacatcttaatggggttttaaagatttaaattcgttttaaagatttaaattcgttttaaaggataggcagtgttcgataagtatttacaacggattttaaaagctttttaaaaagtgatttacatgagtaacttgtagttataaaacttgttattttatatacaggttgaatacagaggcgacgaagagacagaaaaacaagaaatccccaaacaaggcgatgaagaaatggaaggggaagaagaaaagcaagaggaagaaggaaaagaagaggaagaagaaaaggtatgtgtttttacaagggattttaaagacatcttgatggggttttaaagatttaaatttgttttaaaggataggcagtgttcgataagtatttacaacgaattttaaaagctttttaaaaagtgatttacatgagtaacttgtagttataaaacttgtaattttatatacaggttgaatacagaggcgatgaagggacagaaaaacaagaaatccccaaacaaggcgatgaagaaatggaaggggaagaagaaaagcaagaggaagaaggaaaagaagaggaagaagaaaagatatgtgtttttacaagggattttaaaagcttataaatcgtgttttaaagatttttagccgttttaaaaagataggcagtgttagatatgtatttacaagagactttaaagacttcttaatggggttttaaaagattgaaattcatttttaaagggtaggcagtgttcgataagattttacaacggattttaaaagctttttaaaagtgatttacatgactaataactgtgtcctggcttgtatttgggaacttgtaattatttatacaggttgaatacaaagatcatcattctacttgcaatgttgaagaaacagaaaaacaagagaatcccaaacaaggcgatgaagaaatggaaagagaagaaggaaaagaagaaaaagtagaagaacatgatgaatataatgatgctgcagatcaagaagcgtatataaatttgtcagatgatgaagataatgatactgcacccacagagaaagaatcacaacctcaaaaagaagaaacaacagaggtctgcattccttaattgtttaaaaagacatgatgaaattgtcaaaaaataaaaatttgttttgatgttttggtttacaggttccaaaagaagaaaacgtagaagaacatgatgaacatgatgagactgaagatcaagaagcatatgtaattttgtcagatgatgaagataatgggactgcacccacagagaaagaatcacaacctcaaaaagtagaaacaacagaggtctgcattccttaattgtttaaaaagacatgataaaattgtcaaaaaataaaaatttgttttgatgttttggtttacaggttccaggagagaccaagaaagatgatgaagatgttaatcaaacaccactctctacgcaagaagaagaaatcacccaaggacagagcaatcgtaagttctttttacattcacagatgatttgccttgataaacaacttctaaatatttttttttgtttttgtatcagttcaaactcctttgacgccggtcatgttgagtcaggaagtaatggaagaaattgacctaaaagttaaaaaatgggcgaaaaacaaattaataagagatctactatcgtcacttgaagaagtaagttaaattacatcattgttttgctgcaaaagattttaattctaatcattttggaatttttacatttcagattctttggcccgacagtaaatggcaaaaagtcgaaatttgggatatgtgggacgagaagaaatacaaattagcattaaagaaagcaacgttactcattcatcctgacaaactgcctcgagctcatccagaagtgaaatacctagctgaacaaatctgcaagataataatggttagtgttaaactcttcttttgtataacgatatatctttaaaaacttgaatattattgttatgcaaaaaataacttataggttgaattttatttgcaggtagagaaggacagagctactaaggcaaaaatggatttagttctttagactcacttatttcaaacatgtttattttacttttgttatttggaatctatgattgtacttgtattttaattatgactgtcaaatctaatcaaaatgctttactaatgtcaactgtttatggttttataagaattgtcatgatttacaagtgattttaaaggcataaacagcttacatggtttgctatcggtttttaaggataataaagtggtaaagcatgatttacaagagattttaaaagcttttaaaaggggtttacttgattaacaatcgtttaagaagaataagttaatgtcagaaaatgatttataagggattttaaaagcttgtaaaagtgtttaacttgattcacaattgttaaaagtatatgtaagtggcataacgaaatatttacaaggtattttaaaaggattttcaaagacgttttaaacaggcttttacaaaatatgttaaaaaggtaaattattggaattactatttaaattacttgtaaagtttgatagtaattttagtaaacgacttacaagacattttaaaagattcaagttaaaagcttgtaaaagtgtttaacttgatttacaatcgtttaaagtatatgtaagtggcataacgaaagatttacaaggtattttaaaaggatttaaacagacgttttaaacaggattttacaagagattttaaaaggtaaaatattggaataaccttcaaaattacttgtaaaagtttgatagtaattttaacaaacgagagtaatgacacgacacaatgaagaaaatattaaaaaccccaacaatattcaattctttggagataaagatatatctaaattgcagcaacacaagttgatttgttgtgaccccactgaccacacctactgcatttgtgtacttttggttttggctgagaccgtccatgctcccaaacagaaggtatcctctttttcttccgtctgccactaggtacacgagtagaaggtgggagacaaataacttcactaatagtttctggaatctcccaatactccatatcaccatttgggtgaatgttctctgaatatgcttgacgccacctgtaaattacagcgatgtaaactgagattaaaaccacataaacacagataaaaccataaaaagagatattaaaacatttaaaaacgcctgtaaagttgtgaagaatagagataaaacctgtaagtagaatgaaactcatcaacaaacatgttttcgttcagattgatatgtttagcagaagcaattccatgtgcgcaaggaaatttatcaatatcaaacatacaacatgtgcaagtccttttgtcgagattaaccaaatgcgttttggtatctccttttacctcaaactcttcttgattaacttgacaaacctcaagccatcgtgttgaagtatcatatgacgctttcattttcttccctacatttatagtaacagcagacggatgttgactactctcttcacgtcgctcattaaaccatcttgtcataatagatctgattgactcaaataggcaaacaatcggatactcgcggttctgtttcaacaaggcattaacagattcagctagattagatgtcatgatgttgtaccgatttgaaggagaataagctcgagaccatttcctaacatctacctcccaaagatattgtgctaactttttatcactattagtgatttcccagaacaaagaatcaaattctgtcttcgtgtaaactcaagaagccgcatagtaaactggaataagtgaagaacctctgaaatgggtttccaagtttttttgcaaatgaaaagtgcaaagtccatgatgagcaagtagataattccctgaaagtccgcttgcaatagaagcagctcggtcagacacaaaaactaaatcattctcatcagggattatattcagcaaacacttcaaaaaccagtcccatgacgcgtcattttcagagtcaactattgcaaaagcaataggatacaaattaaaattctcatcctgagctgaggcaccaagcaaagtccctataaactttgatgtcagatgggcaccatcaatagatatgacttttctcatcaacttataacctctaattgatgcaccaaaagccagaaacgcatacttaaacttattagcagaatcttttttgaaaaaagtgatagaacatggattcgttacttataccctgtgacaccacctcggtaaaacctccaaactatcatcaggtaaacccctcgcaagttctggtgcatgttcttgaactctccaagccttcgaataattgattccaactccatgatcttttctaaatatttctatcagctgtttaggtctgaggggaagctttcctccttcaaaatggttacttatcaatcttcctaatgtccttgcagatgcttgacgatgactaacattccttattgaagagtcacaactgtgatgactaacatacttccgaataacataactctcggatccaccagccctagttgcacgtagtctccaactagagttttcatcaatacaatgaagaacatacctcgtgagatctgatttcactgtatgaaactcaaagttgtgcttcactgcaaacatccgcaacgtgaataccatttcatctttgtctttgaaaattttttcaataaacaaagaatcaacatcacttagaccagttgaaaacgcagaactagaatactgttgatcaagaatactagatgttttagatacacacgcctcaataatcctagaggttaacctcggctgccaaaataaaaagcttacctcaaacatcaatctatcttaaataatgattttacaaggatttttaaaaggggtttaaaaacgttaataatgattttacaagattttttaaaaggattattacctgagtagtagatgcagaatgagaagcaaaaggatttgaagtcgtcccagcctgtaataaactcaatcactgacttaataatgattttacaaggatttttaaaaggggtttaaaaacgttaataatgattttacaaggatttttaaaacgattagtacctgagcattagggacagaatgagaaacaaaaggatttgaagtagtctcagcctgtaataagcacaatcactgacttaataatgattttacaaggatttttaaaattataacacaagaaggttattgaaaaacctgctcaactgtcacagaaatttgttctacaatcaaacataactgaagcaatcctccactctgtgagaatttgtgcataaaagttgcaagctgtctatcgttcctaatataaagaggatgagattgtatggttgtagacgtggagactaacttgtaactaagcttcaaagaattggttgaactatctatttgaaaatcctctacaagaatatcaaccaacgcgtgataggtaatgtgctcatcaatgagcactaaagaagctcccaattcaatgtctaattcaaattcccaagtcatattgtttgtcaacttccacaagccacaaacagaatacaattctagcattataacctgataagataaataacaacaaaatcaacacccacaaaaacactgtcactacagagagaaacaaggtttacaaatcgttttaaagcgtaagtaagtagcatagaataatttacaagggattttaaaagctttgaaaagtggttaacatggtttacaaatcgttttaaagcgtaagtggcatagatctatcacgaaagcatatgcaaaagaggtaaacactaaatcagaaccaaaatctattacgaaatagtataacgaattcacataagcaaatctatcacgaaacagtataacgaatttcaaaaggattttagaacagtataacgaatgtacaaggattttagaaacaaattcaatcatcaaatctcaaacaaaattcaaattcgaagctgaagcaaatgtcaaactgtcgattgaatcaggattcaaataacgaattcacataatcaacaacaaaaatcgaattaaccaattcgaaaacgaagatttaagctaacattataaaatcaaacctgggaaacgcaagagattcgacggcgacacacagctctacttacgacggcgaagatgggttttcacggcgagtaaactcactatttccgacggcatgggattcaacggtattcacaatttccgatggaggaagaagagagagagtgaagaaatgaattaggtctgtgggtagctcattaagggtaatttggcgagaaaagtattagaaatggtagaaatgaaaataggaaaaaaaaagggtagagttgcaaaagcgcattgagaaaagggcattagagtgaattattcttctttcaatattttttttgttgtcaacagttttaatttaaagctaaaacaaaaccaattttggagaatattgcttacatgcgttatatatagcggttagcaagttatccgtttttacatttgcacattacaagaaaaaagaaactcgtaaatttctctttgtcgctctaaaaatcttctaaatatgctgagaacgccgaccattcagttgaagtagacatcatcttcaccaggtctgaacagtatgtacaaaatgttatatattggttgtcggcaccagtcatacacctcatcgctcatagttgaattttaacttcggtatgtagtggagatagacttctagcggttaatatggttagcctctctccatttgataatgtcaatattattttatagaattaaaaaagaagagattttaagaataacttctcaaattattaccactttattcaaagcaccaccttctagaatactggttacaaagacttaaatcttattttattttcttatttttttttgataattgataccaaaccttatttcttatataaccattttgatcttctaagaccttttcgaaccaacacgtccaccttcatgacgaggacgactcctgcgagatgagtgagactgttgaacattaatggtctttaacccttaatggcatccttcattgatttctcatctttgaaactaacaaatccatataccttcctcgttgtcacagagaccggaaggtcatattcgtagccgttttcataatcaaaatattcataatctctttcgcaaatgacctgtgaatcaaagataaacatattatagatgaaaaaaaaattcagtaccaatgagggaaaagtgaaaagaaaaccgaacattagaatgtataacgtcaccaaactgagaaaatgcattcttaagatcattttcttctgtgtccgactccaaattgccaacatagcacgtgaattcaacatttgtggaagccattttgaaagagtaagagagttcaaaaacaagtagtgatttctaagtagaaaacatagcaattttatgagtgacataaaatgagagacactttagtcaatttatagaaaaaggttagcggtaaatgcatgtgatgatatcgataaatgctattaactctaatatggtttgaaacaagtgtatttttttcttggaactagtttacactaaatgatgatacttttatagtggaaggcgaaaagtttatgttttttggtcatggtcgtgtatagtttgtttagatgataattagaaaaacagtcaaaacaaaactcaaattttcgatccaaagattattgaattttgggttttaattggaaaagaaaaaacacaataaattaaagatcgttaactttgactttgatgagtctacaacatcttaaagttcaaaaaatacaataaggtttaaactagtgattttttttgggaactagttttcactaaataatgatactactttataggtttaaggtttcagttttctttggtcatggtccatgtagattgagttgtttacatgataattaaaaaacagtcaaaataaaactcaaaatttcgtaattcgagtttattgaattcagggatttttgggtttcaattgggaatgaagacacataataacttgtatatataagtttcactttgacttttatgagtttacgactcaaagaatgtcatttaggggttttatttgacaaattaggcaaatttgagatttttactttttcttattcccatggttacttctagagttctagtcaccatagtgattaaaagaaggaaactaagcatgagaaaatactagagagctgaaaaataaacaaagggttcttcttgaagctgattcgataatccaaaagtaaaaaaagtatttgaagttaaggtctcattattgcttttgagacgttggcattgccagagatactgaagttggaatatctttccactgttgtgtaacagttttgatctgagtgaaaaagtccactcctgctttgcctgcaaaaatagttcactcaaagtatatatataagcaaagagaaaggagaatggatcttcttttgtttagttgtgacaagaattttaccatagaagttaagatctcctgcgaatgaggccttgttcccggtgaaggaaaagaacggtaatggaaccgggattggaacattaataccgatctgggcaaacattaacaacaacaaaagaagatatcaaacatgtaatcaaatgcatacaagtaatgttgtattttatagggcccaaagttcttcatacctgtcctgcttctatgtccatctggaactttcttgctgctgccccggacgacgtgaaaatcgcagcaccgttcccatacctgttgacggcgtaagtagcaaattgttgaagatgatgagacgattaaattttagtattaagatgatgatagaacagggtgttttacttgtttttatttattatagatatggcctcatcaaaactgtttgcctgtaaatgaatatgtcacaaaagcatcagagggcattaatctcacaattcacgaataaatgaatgatataagactagttttccaatctgacctgcatgcacacaagaacagggccaaatatttcctcctgcgaagaaaaatgaatttttaagattcaagtagagtacggatcatttgccttaatgtcagaaaataccttgtaacactccatgtctggggtaacaccagatagaatggtaggaccgataaaattccctttctcatatcctggaacctgtttgttataagagaaaacatataaacttctcggaccagttgatctttgcgttgttttcaagattacacaaagattattaaatcaagatatttctgcggttcttgatgattactatttgataagaatgtggagggtagtgctatatttaaggcatgagtctgttgcaatagcagtaaatatggagaatgggaaaataccacaatatctcttccgtcaagcagcaatttagcaccatcatctacaccagactgaatcaaccggcatatccgttctttcgcctagtcatatcaaaatttaacaataacgtatacatattgaacaacagacagaatgcaaaactaaacataatttttacacatgtaagttcagaggtttgtgcgcgaaaatacctgtttactaatcacaggacccaggtctgcatctggttctgacccacatgtgactttaagggccttagctcgctcaacgagtttatcctccctggttagtattagacaagttaaagctaatctttcatgactgtcaaatgaaaatcaacaggcctcatacatattcttcagttacatttagtattaggacacaacaatagtcaatctaaattaaagaaaatggtgttatcttaactatcctatatatggcttaagcaccctaaaggcgtggttctggaaaccgtacgagagaaaaagattacaggaaaatgtgtttatcacaagaaatataagatattcgagaaactggagtaatttgaatatataaagtaagcagtaccatgattttgcatcgccaacaaaaaccactgtactcagtgccatgcatctctgtccagcggcaccaaacccagcagcaagtagcgcatttaaagttgcatcgatgttggcatcaggcaagacaagtccatgatttttcgcccccatatttgactgagtcaatatattataagcaatttgacatagtgtcgtttcgaaatagcaaggaagacttttaaatgggaaaagatgcaagactttacctgaatacgttttccttttgctgctgctcttgcgtatatatgcattccagcctttaaacaaaacaatgcattaatacgcaagtttaacgaaaaggttgagctcagaagaaaagcaattctgccattaccagtccatattgacagattttgaagatctaaggtatgattttgtatacaattaacgttttattagacagctgaaataattacacaggacactgactaaatgaatatttgtaaataactcggtcaaatgcaaagccaagtctgcaggctataaaagagcaacataaaaaaaaaagtacttaccgtgttggagccaacaaaagaaacagcccttatatcttcatcatcacagatagcattcacagtatcctgtgcaacagatgcattttcagtgacaacaaagaaagtgaaggtaatagtgcggaatctttacaaactaggttactctaattgcaaactagaatattcaccataatatctctcgacgggatccttactttaacaattcaaatgctaacaaataagaaatttagaaagagcagaaagtttaaacataacctacattggttccgtgaacgatattgagaaccccatcaggtaaaccagcttccattgccaactcggcaagtattacagaagcacctggagaaagcaagtaatatcaataatcaaccaatcaatagaagggacctctatagctatagtggaaaacagtcaatcaacaatacatttcgctcatcacattggcggtggtagtaaaatgcatgttcactacactggcatcaacgatatgttacaacatgatctgaaagtcaagacatcttgaacttcccatacatcaattaaacaccacagaagtgtctattagtaactggaatagttcgaaggaataagggtattttaccgggatccttctctgatggcttcagaataaaggtattaccacatgtcactgcaacaggaaacatctgcactaacaaacacataataaatacgcagaattcacataagagaatcacaaagaattaacgatatacataatgaagccatataaaaaagggcttagcatgttacccataaaggaatcatggctggaaagttaaaaggacaaatgccagcacaaacacctaatggctctctaatactatatgtatcaactccgttcgacacattggggagatattcacccatctgtaaggttgccattccacacgcatgctccacaacctctgcgtaagaaaccatgtaccaaaaataagcactaaggttctcctcttcttgtcaatcatataatcaaacctacaatacataaataaaatactaacctaacccacggaagatatcaccatgtgaatcctttaaagtcttcccttgctcggttgtgatgttcatagcaagtttatcctacagaaaaatcaaaactttcagccaagcacatatcaagatcatagcaaactaaaccaggtagctaccatattcttgcgtataagctcttgaaactttagcataacacgctgccgggtagtaatcggcgtgtttctccacaacggaaacgcttgcttcgcagcggataccgcagctttaaactcttcattagtagtcaatggaactttagatacaacctcttgtgtagcctaataatagcaaatcagaatttacttcaaagttcaaacctttaagtaatcaaacaagagtataggactcataagagagtttgcttacagggtttataacatcgataaacgaagatgattgagactcaacaaaagaacctccaataagatttggtactctctgaaaacagaacccacatcgaaaaatcaaaacttttgaataaaaatcacatcgaaatcgatctaagaactcaccggaggcatttgtggttgagtagattgctccggcgaagttgataaccaagagcttcgaagagcgagaaattgtggtctcaaaggtctcagattgttacctgaaaacagtaacaaaaactagcttcgatagtatcgaagtctgcagattttgattcgagtacaagagaatcgagatttttaccagaaattcgaagcagcatcgttgttgttgttgttgttgttgatgatgatgatcggagtttggtgttgtcgtctgcttctttgtataagcgtctccttttggttttggatttgagtgatgagtgaatgctgactcgatgttgatcgggtgcgaatgaagtggttggatttcgccacgtgggtggatatgtaccgttagatctataagattcaagattcttttgtttgactctcaccatcaccaagatatatgtacatggttgacaaaaaaaaaaaagatatttagccttaacaattttaaaactaaaagcaagtccaagagctttttatggggctcttccaaatcttttaattataaattttatcaaattcaaatttaagagttttggatagattgttaaattttttttgtctaatgaaaaaagtgggcttttaaaaaaaaattattattaaaataaaaattataaatattttattttataaaactgaatagttattgcaaatacaccaattttaaagatacatgacataaaagcatatataaaatacgaaaatcgaaaatcagaataacgattaattgttagcttaattcccgccaaatgtttgttatatatgcttaaccaaattagctttcaattgtggatgtatagccagatcacgaactcgggctcgagcggccataatattgccgagatttgaaagcatatctgtaaaatagttgaaatccatttgtaaagagctggttgattttggttgtgtgaattcagctgcatcaaactgaatgtacttatcttgttcatcctctactatcatattgggaagtattatgcatgctcgcatgatcattcctatttttttcttatcccaaataagagctggattgacaattacaaaccaagtttgcaaaactcccaaagcacgttaaccattttgacaacaagcttcttaatttgtaacaaataaagaatctttgtgaccttgtggaattgaaatagattggataaatgtagcccatttaggataaattctatcagtgagataataaaccaaatgatagtaggtccagttgacgatatatttcacttttggagctcgaccttgtaatttatcatcaaaaactggtaagcaatcaagtatatatatcatttaagaaatctggaggtccaaaaaaagtatgtcatatccaaagatcttggaaagcaatagcctttaacactattgccggtttgccagatacacgtgtatattatcctttccaaaaggtggggcaattcttccacttccagtgcatacaatcgatgcttcctatcatcccaaaaaattcatgtacctctccaatacggagtagtcgtttaagatcttgtcgtgtaggtctacttagatactctttcccaaacaaatatataattcattcaacaaaatgtatcatacatgatatcgaagtgctttcacaatctgtaggtattcgtcaaccgcatccactgaacaaccatatgcaatcatatgaattgttgttgtacacttcgtagtgccgataaacctaacctgccgataacatctcttctttgttcaaagcatgaaatttcattggagagtccgtcaacaatacgtataaacaatggcttgttcattctaaatcggtgtcacaatatatgaggagggaatgtcgcatcttctttgaaataatcgttctacaactggatgtgtcctagttcacgatctcttgcaatatatgctcatttttgttgacttggttggttgacgatcaacatatctctataatgtttcattgaaaaattgatcaaacttatcgtcaagattataagatgaagaagatctcatgtttgatgaactatgaagataaatgtttggagaaaaagaagattgtttggtgaaaaggaagattgttttggagaaaagaaatatttttttggagaaaaggaagattgttttagagaataatagagagaattgtattgtttgttgtaataaagattatgtactatatatataaacacaaagtgtaacgaacaatgaatacaagtggtgtaatatcggaatatagttttgtgatgtacaattattcaaaccaatgcacaaaaaaacaaacaaactaagtggtggctttgaaaacttgtggtgtcttgtacaagtgatgttggcactagttgtgtcttctagatcctgcaaaattatttagaatcaacataattagacagttagcatagtaatagaaataattagaccaaacataaccgaaactgaaacttagaacacaacttaaacttaaacttaggacacaattaataaactcatttcattcatgtgacattggatacaaaagcatcaaacacaactgcaattaaagcatataatacaactgaaatttaaacatataacacaactgaaacaaaagcatagaagacaactgaaacaaaagcattaaacatacactaaaaaaagaacataaactcaaatatacaacttcaattagaaacttaaacttaggacaacatatcagttattaacttgtgcttaagagccaactcgatgtcagatagaagctcagttttggtttgtagcctatctagtaacttctcttcacttagcttctctttaacatgagtagcttcttgttaccattaagtagcttctctttgaaagctaaatctttctccttaattagaccaaatattttgcatctctgtcatagtcttgttttcatcaccttccaaattagttttggctttgggtttcactttgcctttggctgcctttaccccaaggggcgaggttgatcctcttcaaggccaagttgcacataggatggggaagagtgttcatcacatttttgtcgcttctctttaccgtatgtagcatattggacgcaccacttctgatcaaacctaacctctctccaattgtgctcaagggtgaactttgtattgtaatcattgtagaagatctagtgagccaagttcaccacatcattatcgttctgcccactggttttctctttggttacagccacatagcttcctacaaacttgcaacaaccctcattgatcttttcccatctctttttacagcattaaaggtctctcttttccatctctgttagcttgggacttgcgaaaaagtaggttgctatgtggtgctaggatgttgttgttttttcctcattggatacaacaagatctttggaggtgttgagccaagcactaatgaggaccacatcttctgttggtgaccatttgcgttttgttttagggtctgcaaccatttcttcattttggtttggatcatcggtctattgtgtactaaatgatatgtctataatttgcatgttttcagtgttcattcatcatcgttttgagtctagtttcatatcattcatcattgttttatatcttttctcatcattcttgcatactttgcatgattaggatagctttgcatacatattgcatttctgagttgttttcacgtgatttagagctgtttgctaacaaattgaaagaagcgagccagaaccagaggacatactcgacccccaagtcgagtacatccagcaaaatactcgaccccctggccgaatgattttagagccattcttcccatctactcgaccccgtggtcgagtaacctcagctcaggccactcgatgatgccactcgatgacgccactcgactctctggtcgagtatctcttcgccacaccacctgaccacactctgccgttcactcaaccacatcactcgaccccctagtcgagtatcatcactaaccaccaacaccatcactcgaccaagcactcgatcacatcttcatagtctactcaaattcgcactcaaccagacaagctgagcacaaggaaaagaagaggggaagaagaagtgtttggaagcggcctggagctccatcggatcacgaagcccatctcggcccattatcactctatgggccgggcgattaggttaccggcccgtctactatcattttattttgttttgtataaataggtgtctgagggttttgtcctgagacatctagtcgacattaagtttttgcttcagttttattttctattttactctggctgcgtcgcttttgcttctacaacctgtaattcgagatttttccaagttattcagattccgcatttgatttcatatgtcatcttgtttctctactctttatctctttacttatgcaatatacttgtttacttgtgtttatgtctttgagcatgttgtctgagtagtgacatagagttcttaaggatgggatagaatggttgtggaatccttagtctgtagaatggttaagttttagaattgattgaatcccttcaggactagttgtgtttactgcttatttctttctgatcaactggaattcgatcccaagcattcccacaccctgaaggtgttcgatggaatgcttgatccactagttcctgagattttcgtctctatcccaagggattgaccgtttagagcgtttattgactttattagtctgttcttattgcctgcatagttagattccgttaatgggaattagtctgggctagctttgcttgaggatttctatcacgggagtgaattgatctgttgttgaacctgttgtctaaggatagcttgattgtgcttgttaaccattcgaataggctaggataccactctattcgattaccccatccttaggaatttttcgtctatctgatttctctgttttatcgttatcgcttaatcgttctcattgcctgtttcttagtttttgcaattactcgactaacttactcgaccacacccagtgtctggcaatagactgtgcagtggagtacagttgtctcgttttctgtctgttactcgatcagcatactcgaccacatccagtgtctggcaatagactgtgcagtcgagtatagttgtttcatttcctgtctgttactcgacctgttactcgaccacatcctgcttctggcatcagcttgttgtggtcgagtgattttagtaattctgttattgtttctgttttctgcatgttcgccatgttcgcttaggattgttagaaatctcaaaactgttattgcttggcttgacttagtgacttctgatttcatctcatttgtttgcaacacacccatttagattgacaaccttcagtactacaacgacatgatagtgctttaggattaattgatcttaaaaacttattatcaatttggcgccgttgccaattgggtgtttgtttgatatatttgagatttcagaatatttaagatcaagttctttttcatttttactgaaagttactaactttgtggtttttctttgttgattcaggtactgcgaatcaccagcttcacgagttggtactcgttgtatgcaaacacggtcacaaagaaatcagaatcttctattaaacgataacattgaccgtattgctcgccaactgagaacacagacagaaacagacacaatggctgcagttgtagatgagctagtggaaccaaacaacataagtgcaggcgatgcaccacgcaaccataatcagcgtaatggcatcgtgcctccaccagtgcagaacaacaactttgagatcaagagcggtctcattgccatggttcagagcaacaagttccacggcctcgctatggaggatccactcgatcacctggacgagtttgataggctttgcagcctaacaaagatcaatggagttagtgaggatggcttcaacctcagattgtttccattctctcttggagacaaagcccatcagtgtgaaaagtcgcttcctcaaggctctatcacctcctgaaatgactggaagaaagccttcttggctaagtttctctcaaactccaggactgcgagactacggaatgatatttctggtttcacacagacaaataatgagaccttctgtgaagcatggaagcgcttcaaaggttatcagacgcaatgtcctcatcatggtttctccaaagcttcacttctcagcactctatacagagatgtgcttcccaagatcaggatgcttcttgataccacttctaacggaaacttcctcaacaaagacgttgaagaaggatgggagctggtaaagaacttggctcagtcggatgacaactacaatgaagattatgacagaagcatccgcaccagctctaattctgatgagaagcatcgcagggatatgaaagctatgaatgacaagctggacaagctactccttgtgcaatagaagcacgttcattttctaggtgattatgagatgttccaagtccatgatggggagactctgtagtcagaagaggtcagctgtgtgcaaaaccaaggaggttacaacaaaggtttcaacaacttcaagcagaaccatcccaatctttcttacagaagtacaaatgttgcaaacccgcaggatcaagtctacccctcacagcagcaaaatcaacccacgccctttattccatagaaccaaggtcaggggtatgttcctaagcagcagtaccaggacaactatcagcagcaacttccaccacctgggtttgcacagcagcaccaacaaccagcttcaacaactccagattcagacttgaagaacatgttacagcagattctccagggacaagcagcaggagcaatggatctcgctaaaaagatggcagaaatccacaacaaggttgattgcactttcaacgatctgaacatcaaacttgaggcacttacctctaaggtcctttacatggaaggacaaacaaggtccacctctgctcccaaagtaacaggacttccagggaagtcaatccaaaacccgaaggaatacgccaccgctcacgcaatcactatctgccatgatcgagagctgccaactcgacatgtctccaacgtaattactgtggacaatgatgttcaggacgaggaggcttctacacagattgagattttagttgttggactcgaccattcagcttgatcccgttttcaaactcagtccaacctagacgagaaagcagccatcattgagaggatggtaaaacgattcaagccagcaccattaccttcacgtgctcttccatggaaattcaggaaaacatggatagaaagatacaattctcttgcagagaagcagcttgatgagatggaagcggtgatgcccttaatggaagttctcaacctgatcctggagcctcacaaagatgtgagaaattcaattctagaaaggatcaagatgtatcaagattcagaagatgaatgtgatgttaatccgtctagagccactgttaagaggagcgttcaagaaaagctggaagatcatggatgtttcactctaccatgttcgattcggcaattggcgttcagcagttgtctgtgtgacttaagagcttcagtaagcttaatgtcactctctatggcaaggaagctggaattcactcagtacatgccttgcgacctgactttaatccttgctgataggtcttcaagaaaactcttcagcctgctaaaaaatctaccagtaatgattaatggagtggaagtgcctacggatttcgttgtgcttgagatggaagcagaacctaaggatcctctaatcctaggaagacctttcttagccttagtgggagcgatgatagatgtcaaatatgggagaataagtctaaaccttgcgaagcacatcaagctgctgtttgacatcaacaaaacttcgcaaaggtcaactgtagaagaacagatcacagctcaacctcagccttcgaattcagtcacccgatcaagcacaacctctacacctgacttgcgagaaccaaaaagaaatctgatgagcaagaagaaaccatagagaagctagctcagacggttgaggaacttaagagtaaactggatcagatacgagagaaagctcaaccaaaatgcgggattgataccatcccgagaaaaaagtttacttcaagatgaggagatagattatccaccagaagagaaagaggcatatttcgaggaaagaagaattgagtattctgctacgcatctctcaacagaggatgctgaatatgatgatgagatcagagaggactatgcagatcctctctatcacccattttcttcttaatgagtgtgagaggtcaagctagtgactttaaacaagctcactttggaggaattcccaagaatgttcatgtaaataaaacttttattttcttgttatttttgatttgtttttggttatgtttgtgattctcaggaacacagaaacaacgtggaggtagagtaaaaattcaaaaattttactctacagagcaacagagaatcgagtatgtcagtatagagaaattcaaaaatttgaaaatgttctgttgcactcagagaaccatgagatcgagtaggttggtcgagtattagtgatgattttaaaacccaaaattttgaaaatatctttatactcgacctacaaaagctacaaagacttacagggagtttacagaggattacagaaggttctagtcaaaagggaacaatgcttcaggacaaacagacagagcgtggcccaccacctctccattttgttcccccacgcatttctaaggataagaaaatcccttcccttcttcccaaccactcgatccagccctatctcccttcccaccgacaccatctctcttcctctccaatcactcgacctcaccgactaactcgacctcaccggctcactcgacctcaccgatccggtttcaccatctctcaccacttcgtcttccttctcactcgaccacaactcagctctctccgctcacgtcaccaccttctctctctctttcactcgacgacgtgaccagtttcgccatctctcatcactctcgtctcgccgtttactcgaccaccggaccttcaccgtctctccatcgcttccgttttactcgaccaagctaaaaatcagacggagaagctcttcactcgatttctcacaaaccgctagagcttctctctctcattctcgcgaaccactcgatcgctcatctctcaacgcctctcactcactcaaccggagttcaccgtctctcatcacctccatccactcgacctcatcgttgccatctctcatcaaaaccaccaccgtcttctctccactccgatttctttcactcgacctcacgccgttcactcaccgtaaagctcaactcgaccgctcatcaaaccgccgctgtttcccggtgaagattactcgacctcgccggacacaccgccaccactcgaccgcaatccacctagaaacgaaaacccaaggcacaatttcacacgaccggttactcgaccggtttacacgacctggttattccacggtttactcgaccgagttactctatcggttcggtctattggtatactcgaccgcttgtgtttgttgggactaacatattgacgtttatctttgagttgtattttttctcaggaaatcaatatgagtaactacagtagcgaatcctctatggatgcggattacaacgtcgatgaagctgagtcttggtcaactagaccagagaaagagcaacaggcttgtgagagcttcagaggtgacacccaacgctcagtagctcgacacaatgagaggaaagctgagattgctagaggaaagagagcaatgacaagtagatgcgaattgatcgacgaagatattgacgtcgagtatgagcctgagtcatgacacagagagacgaagctgttgaacaggcctgatgaaattacagttgaggagtacatcagacttttcgagctgaacgacttctgggaatgaggtatccctgttatcagactttagtccagttggggctactagaggacgtacagcacttatttgagaagtatcatctggagacactgatgtcttacccgtacgtcgcctacaaaaaggaaacaatagagtttcttccactctgcaagtggagatgtatcagggacttacagcaaatgagctggagagtgaagggttggggttcttgactttttcagtgagcgagcagcgctaccagttatctgtcaagagtctggaaggattgtttggtttccctagtggaaagggaactaaacccaagttcgagagggaagagttgaaggatttgtggttaactattgggaacgatatggcgcttaactttgcgaggtcgaagagtaaccagattcgaagccctgtgatccgctactatcaacgctctatagcgtatgttctgtactccagggaatctacaggcaccgtgtctaacatagacatggagatgatagattctgcactcaagggcattctccgcagaacaaaggggaagaaggtactgaagggcgacctcaatgatgcacctccgattatgcttctgttgatccacctgtgtggatacaggaagtgggcgcacaccaacgggaagaagagggcgcgaggagcattttgggtaggaagtgttgtgacactaattctgatagcctgtggtgtacctctcacgtctcaggggttcgatccgaggatgagggacttagatcacttgcgtcgttgtgagtttctagagcatgacatggtcggcgatttctatcgctacaaattcgagcactccttgacccgaacagccaacattctgcttccctgcaatgaagccataaccatattgcagggcgaaaacattgatttcaagcctgagcgtgattatctctacattgagagcgctccaccgactgatgacaacgtccctacaacagaagctacagaggatgagattgctgagacagatgaggataaggaggaggagtacgatacaagaatgtatcatttcagtgagcatgtacctccagcgagggagagcaagagcttgagcgaagctcacagaaacaacagcaagttgcagaaatggtgcaagaaacaagataggctactcatcaagtgcttcaaggtcatcaagtttttgacagacaagctaaactgctcctcttctaccacagctatttcgcagggacaacctcctcaggacatgccctcgaggagatatgacgcgccagagcaaagtcaccactggcctgagccaagtcaccacaggcctaagcctagtgacctagtagtctcacaagtccctgcgaggcattcatcattcgagcctcgggagctcgggagaaagaagaaggctgcagtggctcgatctagcagcaggattacacgacttctccagtcccgaagcttacgcgaccgtagtgctggccgcagtagaagaagagaggtcgagtaccatcagagcggtgctggctgcaacaaaggagcagaggtcgagtacccccagggcaaagctgagacacaacagggagattcttcaatggcctaggagcaatcacaggcaactattgacgaccaactccgctccttcttcaactgagctaagcatctcacttcaccattgtattataccatctcttgtttttattttgtttctgtgatgatttttgtcttgagtactctcttccaagtttggtcacacagtggactgtgtgatttaagtttggggaagggctcaggaagtgtgtgttgcattgtatataatcttgagtctgcattcaacaaaggcatagaaaaaaacaaaaaaattgaaaaatttcggaaaatgatttcacaaaaatatagtgttcatgtagttgcattgcatttaggatcgagtctaaagtgtttcatttaggattgttgcatatgcatatgggataacgatgagatagccttgtaagcattttggttcaccagataaactcagtgccctcgttgtgagttgtctgatgcgtagtcaatgaaattgaagtaaaattgcaccatgcctagattgctctactcgaccacactgttatgatttgataccattctctatcaatttgaacttgaacctgatttagaattatcatgtcttggcatcgaatttgaactcatgaataccctaaaatacttggattttcctactcattttaaccactcttgttaatccaagtagctgactctccttattagagtcgttaacccgaacccaaacctaaactttctttcaagccctatatcacttgtgagtgtttgtgaggtcttatttcgattgagcttggtagaaagtgttaggtttgtaacgatagagatagtgtctcatgtagttctagttcacgtttttcagactggataggactaggtgggcgcttatatcatgggttgggatgtgtttaaaaggaaagggtgaattcattgttgataaggaaagggaaagaattctaggggaagtaagctaaagaagttagaaaacaaaatatagtaaaggttttgggaatgttaaagaaacgaatgaggttcttagctaaagaagaagggtttaaagcctttggttttaaagattgaaaacaggaaccttagttgttaaagaaacccaaatccgctagatgtatcaaagtgttgagaaagcttctcctagagttaagagaaagaaaagaatgatatgaaaaagggtttaaaaagattcatgaatgcaaagggtagagttaaggtcttatttgggactagagttgggattaccattagagcttcattgttatactctgggtagatgggatcttatctctgtatgcataacttttgacttacctttagcattctactaaagctcaatcattttttaagagattccctgttactgaagcctattctgtaggggaccatctttgtctcttgacctttaccttacccaaatgagttcattgatgatgcattgcttgattcacgttccagaactaatgaatgttaaagggattagtagatttgaaagcatgtgtaggtcgagtataagagacggattgattaataccaaggcatggctaacgtttttgagtaaaattcgatcatatcgcatctcagaactaccaacttggacattgattttatttgctctatctgatgctttggttatgagtccccatcttcaaacctcaccttcaactatgtcttcttatttgcttgagggcaagcaaagactaagcttgggggagttgatatgtctataatttgcatgttttcagtgttcattcatcattgttttgagtctagtttcatatcattcattactgttttatatcatttctcatcattcttgcatattttgcatgattaggatagctttgcatacatattgcatttctgagttattttcaggtgatttggagctgtttgcgggcaaattgaaagaagcaagccagaaccagaggacatactcgacccccaagtcgagtacatccagcaaaatactcgacaccctggtcgagtgactttggagccattcttcccatctactcgaccccgtggtcgagtaacctcagctcaggccactcgatgacgccactcgaccccctggtcgaatatctcttcgccacaccacctgatcacactctgccgttcactcaaccacatcactcgacccctggtcgagtatcatcactcaccacaaacaccatcactcgaccaagcactcgatcacatcttcatagtctactcaaatccgcactcaaccagacaagctgagcacaaggaagagaaaaggagaagaagaagtgtttggaagcggcctagagctccatcggatcacgaagcccatctcggtccattatcactctatgggccgggcgattaggttaccggcccgtctactatcattttattttgttttgtataaataggtgtctgagggttttatcctgaggcatctaatcgacattgagtttttgcttcagttttattttctgttttactctggctacgtggcttttgcttctgcaacctgtaattcgagatttttccaagttattcagattccgcatttgatttcatctgtcatgttgtttctatactctttatctatttacttatgcaatatacttgtttacctgcgtttatgtctttgagcatgttgtctaagtagtgacatagagttcttaaggatgggatataatggttgtggaatccttagtctgtagaatggttaagttttagaattgattgaatcccttcaggactagttgtgtttactggaattcgatcccaagcattcctgcacccagaaggtgttcgatggaatgcttgatccactagttcctgagatattcgtctctatcccaagagattgaccgtttagagcgtttattgactttatcagtctgttcttattgcctgaatagttagattccgttaatgggaattagtctgggctagctttgatggagaatttctatcacgggagtaaattgatctgttgttgaacctgttgtctagggatagcttgattacgcttgttaactatttgaataggctaggataccactatattcgattaccccatccttaggaatttttcgtctatctgatttctctgttttatcgttatcgcttaatcgttctcattgcatgtttcttagtttttgcaattactcgaccaacttactcgaccaaacccagtgtgtggcaacagactgtgcagtcgagtacagttgtctcgtttcctgtctgttactcgaccagcatactcgaccacatccagtttctggcaagagattgtgtagtcgagtatagctgtttcatttcctgtctgttactcgaccacatcctgcttctggcatcagcttgttgtggtcgagtgattttagtaattctgttattgtttctgttttctgcatgttcgcttaggattgttagaaacctcaaaactgttattgcttggcttgacttagtgacttctgatcacatctcatctgtttgcatcacacccatttggattgacaaccttcagtactacaacgacatgatattactttaggattaattgatcttaaaaacctattatcactaaacacagggacttctgatgacgatccaagttctaccctaggtggaagcatggggttatcttgattgtttaagaggtttagaaaacttgaatgatgagtagtatatggattacttgaatccatatcaacttgtttatgtgtgtttattatggtttcgtgttttaaaaagacaatgaaggaaagagcttcagtgttttaaagcattatgtttaaaacgattgagttatggtttggtgttaagttacatcattgataacagaggtaaagtgttcacagagtgcaatctatgacatacacaaaatatttatcttagctaaacctaccaatcattgataatagagagcataaagatgatgaagacaccaaaaaactttaacataatatcaatcagtcataatcgaccaaataaaacaaccatttatcacaataaatacacttatcattcattaaaatattgaattctttacctactaaaatataacctactacacaatatgattatatgaatttacctttcattaggctgttgaaagattgaatgactacaacaaatagtgatcattgttgcaagtgttccaattaacctcaaccaaaacagagagacgtataaatatcaaaattcaattcagagaaacaaaatggcaagacatatgtagatgatttcacagatatatgaagatcatattgacaaacatatcaaaatcatattctttttttttttttttgaataccaggaggttctgagccaaaccccgtaatccccccagccctgaaaccacaacatgtaatattagtttcgtcccaagcgtcactcgaactggcgacctctaagcttcgcatagggtctttaccaattgagctaacgtcacttggttatcaaaatcaaattcaattcagaaaaccatagagacatatgaattgttaagcgatgacaaatacatatgaagctacaacaagatcatatcgattgtcgaaaatccagctcttatttgggataagaataaaataggaatgatcatgtgagcaagcataatacttcacaatatgatagtagaggatgaacgagataggtacactaactttgatgcatctcaactcacacaacaagaatcaaccagctcttcacaagtggatttcaactattctacatatatgccttcaaatctcggtattattatgaccgctcgagctcaagtttctgatcgggctctacattaacaattgaaagcttatttggttgagcatatacggcaaacatttaccgagaatcaagctaacaactaatcattattctggttttcgattttcgtattttatatatgcttttatgtcatgtatctttaaaatttaagcatttgcaataattattcagttttatgaaataaaatatttctaatttttattttaataataataaaaaatatacttaaggctcttccattggacaaagaaatatttaaggacccatccaaaactctaatatttgaattttctaaaatttttgattaaaaattttggaagagccccataaagggcctaccattggggtttctctaagaacctctattggaggtggtctaagtaactatgaaagaaaaagaagtacaaaccaaaaaaaatcttcttcttttgattaactataaaattatcattgaattaaaaattatttggtaacttcagtatcttgtcgatagttttttcttttttccactaacaaacttaattaattctattcaaagagtcattacaaagacatatacagaattactataacacagttattacatacatagatgtatgtctcatatactaataaaaatatagtataaaggagtttaacgatgctttcctattggtgtcttactcgctaaccgatcataagaacggttactatccaactttatatttgatttttctttgttacaatttgtatgcaataacttttggctgaaacttcttttcacaaaacataatattcaaccaaatgtgcccatatctaattctgaaatgtagacacaatggcaccaacgcttttgtaccaggtctttctgaaatattttgacgactgtgtaattctcttcaacataactacacatagttttattgtatcatcccatgtagccctcttgaatcaataggtttccatctaactgtcactaatgcatttcgcacctaccaaatctgcgcaataccaatcaaatcttgtcaccagtatttgacaaagcccacgtgtaatctcgacatcacaatccaacaaaagccgaatttatgcaactataaatctattccacaatcaatataataatgaacgagagtgatatatccttattttcactgattttatctatgttttatgtataaggttttcagtctttatgttatttctcgattctttttagtgtcttttcaggtattctatgcagtaagacaacaatggagatgagaagacattttagagcaaaagctaaggaaaatgaagctaaggacaattttcagttcttgattcagaggagtgtcaatcgacaaactcctggagtcaatcgacaccagtttcagcccagcaaagtccatgacgcttccaagtttacaaaagaggaaatttgcccagaagacttttttatttgcattattagtccctagacgttttatagggtttttaaattgtttttagacctaagtttcatatatcaagttctttgcaaaaccctattttgagagacataagctattcatcccctgttcttcagagatagcaccatatatagcagtgaaccacattgtccccagtgtttgagttaggatctcctcttgttggcaatgctcgttcgcttcttagagtgattgtgtgagcatacccctttaaactttgtattggttttcctgggatgtatcctgtgtgagctgatgttgaagatgttgtgccttttatatatctcacttttaaggtcaatgcttccaacttgttgttaaaaccgttcaagtttcaatctacgtttgtgtttaacatggccatcttcttagcaatgtacttggctcatgtggcttggccttgaatgatgtgctggagcatagtctttatgtctgaatcttgaggcgtaggtgcttgatgttgttgtgattggaaaccatgtggtggttgctgttgttgatatcctccttgaaattgctgctttggaacgaacccttggctttggttgtaaggaacaaaaggtttgggttggttctgttgctgctgatattgagggtagacttggtcctgagggttgacgacattgatgcttctgtatgatagatttggcttgggtctataattgttgtaccacttgttgtagccaccttgattctgaacataactaatttcagcacactgatcattctccccctcttggacttggaataattcatcttcagaggtgaagtgaacatgcttctggtgcactaggaggagtttgtccgttttgtcattgagagctttaatctctcagcgatgattgtcatcagattcagagccggtgcggatggttctatcatagtcctcgctgtaattgccatccgactgagccaagttttcaactagctcccatccttcttcaacatccttgttcgggaaattcccattggaagtggtatcaagcagcatcctaatcttaggcaggacgtctctgtaaagtgtgcttagaagagaagcttgcttaaatccgtgatgagggcatttgagtgaattcggatatctcattccggagtcttgcagtttttgagttggagaagaattttgccaagaaggcctttttgcagtcatgccaagttgtgattgatccctcggataacgtcttttcccacagattggttttatctctaagtaagaaaggaaacaagggaagcttgaaaccatcttcactgactccattaattttagtaaggctacaaagcctttcaaactcgtcaagatgatctaacggatcctccattggcaagccatgaaacttgttcccggaaccattgctatgagaccgcttttgatctcaaagttgttgtactgtactggaggtggaacaatgccatgacgctggttgtggttgtgtggaaagtcaccagcacaaatgttggtagtttgctcttgctcacctacaacgtcagtcattgtgtctctttctgtttgttctctcagttggcgagcaacacgatcgatgttattgttaaataggaggttctgatttccttgggaccgtgtatgcaaacaacaagtagcagcctgactttagtagacgaacagagatgagtctgtgaagctgttgctgggtacctgaaatacaaagacaaaaaagacacaaggttaataacttgtataacaaaaacgaacttgatcttaacgtttctaatgatctcaaatatagcaaacaaacaccaaattagcaacgacgccaaattgataatagatttttagtcaattaatcctaaagcactatcatgttgttgtagtacttagggtgttaatccaatctggtgtgatgcaaagggatgagatatgattagaatgcactaagtcaagccaagtagagagtttgttggttctaacagtcataatgtgcaataacagaaattaaatgaaactaaaagcaaaatggcaatgataggctcatgagtaactaagtagaagtgataacaggcaatcaaatagataaacgattcttaaggatggggtaatcgaatagcgtggtctccttgatctattcaggcggttgacaaaacttcacagaagccgagatatgtgggttatgagaagccgagatagcgtggatagcgtggtcaaggattctttgacatattgaggaacaatattcgtgggttatgagaagccgagataacgagatagcgtgggttatgagaagccgagataactttaatttgtagataacgaaatttacttattcgattcataagtacctatcttattctttgacatattcgtaaaattaaagttatcatgaattgattcttacttttcaaccaagaatacaattgaatccaaccaaattatttcataacaaatctacaaatccaaccaaacctaaactcaactatactaagatgatatattcgtagtattcaatctaaataatcaaaatatgaatgtaagaaacggtgaattcttatgtgacatagttggattttaagttcttataaacccaatccgagctgaacaaaaataaaatcaaacttaaacttaactttttaaaaagaaaaaataactttgtaccaaatctatgtacaatatattttgttttacattcataaactttttaaaatactcaaagtttcctaaacttttatttctaatgaacttttgattctggttactgtgctaattagcttagtttaaaaaatagaatattacgtaattaagcatttttggaaagttaatgcctaattaggcactttaaaaagagcagacactttcgatagattatttgacccatttaccctttaaatacacttttatttcgttacattttatttgtctttctctccttctcctctcacttctctctctttctctcatttttcaagaagagacaatcaagcggagaaaataaaaacctttaaaataaaaacctccctccctctctgcccatcatcagtcaacttataaatttgtttctcaattttgttatacttgaatttctagggttttgttgaaatctgagattcagattttgcttctctctctctctctctctctctctctctctctctctctctctctctctctctctctctctctctctctctctctctctctctctctctctctctctctctctctctctctctctctctctctctctctctctctctctctctctctctctctctctctctctctctctctctctctctctctctctctctcgcaaaattactacaaatccttgctctctgggatagcttattagtcaagtttcggattacaaaaacgacgtgaagcaaatctgtcaccgtcttaaggcgtaacatcatgcacatccgcgattggttcgaagaagaatcctccgctgccttctccaattctccatctaacacactaagcacatgtgttcgtgtctttgattcatgtcattatctctaatgctctatcttacatttcttcaaatctttacttaaatcttagattcgttctccagctaattcttggtatcaatttgatataagaaattgattaaaaaaaaagtttcctttgttcattgttcttatgtttagcatttagatatgcaattaatagtggtctaatttcgtaaagatcacatttttacgatttaaattgttccaaaagttttttcgtttttctccatcaaatctgactctggcgattatcgttcatacataaacttgtgtattgaaatgaaacgatcccgtgagtcattagatgaccacatggactaaacctcttggacaatcatcaatggacatttatctctcagtaaaattatcactttcttatttatgcttacaatatattttatggtttagagttttgttttacgattttagatttagtggataaggattagggattgaaggtttgggtttaattttagggtaaataaattaggctttagtgcagagccttaagggtataaggtttacacaccacaaaccatttgcttgtgtcaacaacattgtatcacattctcaaaaaaaggtttgttgatgaaccttgtattgatatatataaagcgaattgtttggatatgtttatgtggacaatatatattggatacataattaggaacatagtttttggaactatataatactacttaggcttgaatatttttatttgatttaaagcatttcatataatgcgaagtgtttggataagtttacttggacaatatatattagatacataattaggaacgtagtttaatatctgatatttgttgggaatatataatactacttaggcttaaatatttttattgatttaaagcatttcatataatgcgaactctttggatatgtttacgtggacaatatatattagatacataattaggaacatagtttaatatctgatatttgttgcgaatataatattacttaggcttaaatatttttatttgatataattaaactaaattttaacagatttgaccattaatgtttaacttgttatctcaatctaatgccacgtatattgcttttagtaactagattataacccgcggtacaccgtgaggctattaatttttttaaaaagtaaaaatttaatttgtttagtacgttaacaatatatatgatttaattttttgtatttttgaaaattacaattcttatatctgtatatttttagtgtataactactatgtttattttttactgtttaaaaatatggaaacaataacatacagttcattaacttaaaatctagattataactatataatttaaatttaaattattttttttaataatattgtttgttttgttttgtgtttaagataatgtaattgtatcttaattgttatatctaagattttacccatagtataccgtctcgtattactatcaactcaaacccgtcataccttctaatctcgttcaatgaaattaaacatatctaatgaatttcacacgtggtatactatctcgtattactatcgacccaaacctgtcttaccatctaaccccgttcagtgaaattaaacattattttgttatttttcttttaataatactttaatttaaaatatatataattcaaatcaatttaaaagttttctttcaaatggttatttaatttttataaaattcatataatataatattataaacccgtcctaccatctaatcccgttcgataaaattaaacatcttttttaataatactcttattaaaatatttataattcaaatcaatttaaacttttctttcaaatgattattttttttttttaagatttcacatattataaataatctaaacgtttttccgttaaatattctaaatgtttaataaattataaataattacaacaattatcttttaataaagtataatattaataatatccaaaaatttctcttttttgaagtaattagaatttatggaaatatattagataatgaaatgctagtagttaggaatattaatttattgataataactaatgctaatggcattctttgtaaatatgttccaactctaagatttatttcacaaaatgactgcaaaaatatatatgtagattggcaacaatattaactcatttgctgttttttttttcctctcacgtttgtaagggtaaattggtcagaaagtcaataaaaaagttgaaaaagtgttcactccctcaaaagtgtctcaaacgtccaaacttcctttataagtgtattataatggaacgttccctttaaaaaaccaactaacacaaaaaacttgtctacctaaaattctatatatatatatacacgtgcatgtgtaagattagatttacattttctattttctctctatcatgggcaacaataaattatcacctcccaactttagtaatgacattaactctctccacatcgattatgaaaatgctctcaaccatgtcgttacaacaactgtttaatacatggacaaactacatgactatcaaaattacaacttctcaggccccattaaacaagccatttatcttccaagtgtcaatgcaaaacagataataaaaagttgcattttctaaagaaatgatattgcatttgtgaaagagatgataaaaatatactataatatttgagaaatataattaaaaaaaattacataatttaaatagaagatgaagcgtagatgaacagcctaattgcaaattataatatttaaaaccataatatttatcttggaatataatgaaatttggataaatatgttgtgtttttatgttctgttttttaccatatttttttttactcatggtttttgcgcttaaaatatgaattatattgatatttagttcttaataacaaagtaatatcaaacaggctaaaattaaaaagtttataattaattcatgtgaagtggatagagactaaaattattgggtttataaataattcatggtgaagcggatagagaataaaagtattcaatttataattaattcatggttaagtggagagaaactagaagtacgggataatttgagttgagtgcctatagtacatgtggatttctacatgcagcccataaaattataaattcctaatatgtaccaatatatttggtttatatgaaaagcttgtaatgataattgtcacacacgtctcccttaacattgagacgacgtgctttttaccttatttaaatttttcctttcttccgctttcttaattcaaatataaacttgtcttaaaaaccatcttaaatcactgaaaaatctttagtaaaacgtataagaaaataacaatagtagaaaataaatatgatgttaccaaaatacaccataagcgagacggacttgagcgactacacacgattctcaccgtgacctagggaaaaaagaggaaaaaggggtgagtaaagaaatatccgattcaggtttccgggtcaaaaacttaaaaaaaactctgacccgattagatttcttaaaatgtacttcaaaaatgttaagtagatgtactataaaaaaagcactaaaatatgcattagccttggcggaagcataattcattgaaagagcataggttatcattttcacatggtgtagttggtttccttattacctagttgaattcaaaatcatgccgaaccgggagcatactacactaaccggtaaacacaaagcattttggagaatcattgtctaaataatgttccaattgagaacaaggcatgagattgattattgcacaccaaatcaagcctaagaagaataatggttcatgtggggtgataacatcgatttttgtcaatttttactatatttttatttggatttccatggataaatgaagagatgttggatactttaaggctgagttcaagtatatatgcttcaagaaattttaataagtttccaatcaaaaaggagtaacagagacttaagatgaaaactctacgacttgtacacggcctctttgagcttcttttcacatcctcctgcatagcaacatcgatgcatgcagcctccaagctctctgtcgtccaccttcgagcttatagaagtcctcccttgaagatctactcttgttcatcattgttttatcttatgttctctctactctttcttatactgcttttggggagacgagttatcttttgtgacatctagagaagtttcttttgaaccctctttaatatttgatttgtttatgatgatatactttattgtaatgattttatttctttgcatcatgagcgagtagtttacttagggttttatggggtgattcaaaagcgattcatggttaaaatcttattaggttgttagatccgatttattcataatttgattcttttgggacattgtttacttaaggttttgaatggttacggcgatcgaggtgtgatagaccacaattttcaccaattctaggtatgatttaggtataggttttagagtctttttgttatttctgaaatcttttctagttattttcaagtttttgcactttagggatgcattggaagttcatggactattctggagcttgatataggtcaaattaatcctaagaccactctctcaaataaagaggtcagttgcagcacttagggatcgaattcacaaagttctcggatcacgcaatagacgaatggcaaatcgaattatgctaagtaaaatagtaaataaaataaagagaaacaaaagtaaccaatagaaaattgtgagttgtggaaacaagataatgaaagcgtcaggtttagggtattcccaggagatagatgatagtagatctaataatagctaagttgttatcgaaccgttctcgaacttaaactatgattttagagtaaccggtggtgttccgcgaaactctctatgcctatagctaagaataaccggagaagtcgagagatctttaacttaaacatgcattattatcaagtttgattagttcacctagtatctaaaccagagtcgttgtatgagcctacatgttctttcttaaatgcctaggctcatctatgatagatcaaatagcaagtacctatggtgggcatacctatcatctaatatcaagttctagttaactactctaaaactagcattaagattaatcaagatgaagaatcctacagataacctagcaagggggcaatctactaaatcatctaaatccctaatgataaaccctaaacctaacaagtggattactcaaacatgatcaaagaaacacaaatcatattccgaataagaaattaatgatgaaaataacaagagaagagagtaagaaagatccaaaagggattttccacagggtttagctcccaaagtacaaaagagatccagggaatagcctcccaaagtacaaaagagatccagggaatagcctcccaaagcttagggtctaaaacaatgacctaaaaactatatatatgtcttaaaaacgtgatggaccttaattaaacataggagaaagttcagggccgaatttggaaatcttcaaaacatcaataagttgcgtctcgaaattgccgtcaggtattggtgtcgctcgacaccaggggtggtgtcgttcgacacctacgtgcattttcgtcccggattgcttatgctgttgatcactagaatgttccataatctccaaatacatcccaaacatgtaaagaccagaaaaggactagaaaagactttagaaataacaattagactctaaaacctatacctaaatcatagctaaaatcagtaaaaatagggttatatcagagctcaaccgaagaattcaagcttgagggacgaattcagattctgatcaaggcaaaagtgtcgactgacactctcttggtattgatcgaaaccgttcgcggcccaacaagaaatctgacggtttgaagttttgaagtttctagaatttacctcgaaagatttccttatttgcattgttagtctctgcacttttttagaaacttatatatatttttaaggtcattgtttagaccgaacctttatacactttttgaaaccttattttaagtttcattagagatttcaaaactctatagagagaagatcttttctaaactctattctttttttttatttctttatgcaatcttattcaaacatgttttctgtttctatgatcatgtctgagtaatctactttttggatttagggtttctcactagggatctagatgatatagtagattaacaacctgttaggatctttagagttttccatcttgattgttcttaatgttagttctagagtagctaactagaacttgatcttaggtaataggtagcatttgagaaggcatctattatatgaactatcatagatgggctagagtatttaaatacatatagctttggtttttatacttcgatgaacttatcaaacatgatcttactgcatgttttgcgattaggggtttgcaacaagagttgggatccctagttggtcgatcatatattagtgatttgagttttagattggttcgataaaaatcatgatcatagctaaatctattagtcgtctatttcttgagaatatccttaaacatgacgttttaatcatctgaatttacttcaatctatctgttgcatgcttgcttgttttcttttacttttaatacctattgatttagcttaatttccatactatcaccttctgtgtgaacaaaaaaactttgtgaattcgatcctaaagtagtacaactgaactcttatttgagagagtgcttgaggttagtttgagccttatcaaggtggacaacaaaccactgcggatcaactatatttgaatgtaaaagcgatccgtggttggctcgtggcagttttcttttatatatttttgagtctacaccactatgtacatagactttctcgtaccttgattgttgtttgaagctaattgcttgatattttttttcgtgagcaaattatttagctatacaaagataaaagaataactcccttttattagtttaggaatatcactcaaaacctaaactctcttaatctctcaaaactcttgaggaataccacaccttggcatctctcttatataagaaaagaactagaccatttcctaatccttttaggaaaacacacatataattatttaggcaaacttcctaaatacaaaagtctaattctaatcctaatctctttagcttataactcaagctttcttcaagcttacttcaacattctcccctttaagcttgaactcaacctctttcaaatcttgtactcaaataaaaattctcatttccttgaacttgatccttccaagggctttagttaggatatcagcctttttctcgtctccggaaacgtgttctacgtccactagctcattctcaacacactctcgaataaaatgatatctcttcttgatatgtttgcttcgtccgtgaaatacgaggttcttggcgagagctatcgcggacttggtatcgattcagagtgtcactttctcacatgtttctccggtaaattcactaagaagatcttgaagccatagtgattgctttgtatacgcttcacacgacgaaagagctaccgtatattgcttttgtgtgcaccaagtaatcagacattcatgcaggtaaaagagttgcccagttgtgcttttcccgtcatcttcatccacgttatggctgctatcactatagcctacaagatctttttcagtcccacgagcaaactccaagccgtattcttatgttccctttaagtacctgagaatctgtttgagtgctgcaccattagattccttatgttcctgcatatatctgcttagtacaccaacagaaaaagagagatcaggtcgcgtatgaagcaagtaacgaagacacccaatgcttctccgatattcttttccgtcaatatctttctcattgtgtgccgtagataatttcaaccccaaggccattggtgtgtgaacaacattacattcctccatcttggtttcttctaggatctttctcgcatatctctcttgctttaaggtaatacctttgtcatgttgcaatacttcaataccaagataataagttagcatcccaatatcactcatttcaaatttggattccattccgttcttgaaatcgagtatcatacttaaacttgaacctctgacaagaagatcatccacataaaccgctacaagaagaaggtgctcattttcttgcttctgatacaaggagagctctttcgaacacttaacaaactccaattcgttaagtattttgtttaacttgttgttccacgcccttggtgcttgccttaaaccatatagtgctttgtttagcttgtaaaccttttcttcactgtctttaactacaaatccttctggttgagcaacgtgtacgatctcctttaattcaccatgtaggaatgcggtttttacatcaagatgatgcaccttccaaccatttgaagctgccaaagctatgatgaaacagattgtttagatgcgtgcaacaggggcaaacacttcatcaaaatctacaccatgtctttggacatagccttccgctacaagtcttgcctttgaacttatttatacttctgtctgagttttgtttgatctcaaagacccactttaatccaattagcttagctccgacgggaagatcaactagattctatgtattgtttctttcaatagatgaaatttcttcttttcacgcttctatccattcttttgactcttttgcttcattgtaatcccaaggcttttcatttaacatcatcaagagatactcactttcaatattagcgagcaagacgtagtcctccaagtattttggctttgaaacttgttgttgtgatactcttagttggggctggattatttgcacttgttggacaatattctcactttcagtactaggagaattgttctcttgctatgagtcctcatcattctcgttttcatcacactcttcttctgtttcttctctacttccttcgttctctccaccagcttcttcttcttctcttagaccattattcccaaactcttcaaggctgactttaaacatgccagcattatcactgttttcaccatttaagttactccacttccatctcttgctttcatcgaagacaacatctctactcactattattcttcggtttgttgggcccaacaagcggtatgcttttgagccaggctcggttcctaagtgtacaaatgttcgtgatcggtcatcaagtttcttaaggtgtggagtttctatttttgcatagcctccaaacacacacaaatgctcaacgtttggttttcggcctttgaatacttcatatggagtttgtgcaaccaatactcttgttcccactctatttatcaagtatgtaatgtatctcacagcttctccccataagtagttaggtacactcatatgtttcaagagactcctagtcatctccatgagcgttctgtttcgtctctcaaccaccccgttttgctgcggagtgtaaggcgcagtcaagtgtctttgtatgccagcactgtcacagaacgttctgaactcttgagataagaattctccacccctatctgttcggaaagtcttaatggtagttcccaatttttgttcaaccatcatcttgaatgtcttgaatttgtcaaaggcttctcccttttctttcaagagaatagaccacatatatcgtgagtaatcatcaattaagacaaaaacatacctcttatgtgcaattaaaacacaaaggtctccatgaattaattcaagcttttgtgttgctctatacggtggtgcttgtggagaaacccgccttacttgttttccaagtaaacatgaagcacatgtttctttctctatcgacatcaatggcaagctt

SEQ ID NO: 221 - DNA, 25332 bp, Arabidopsis thaliana
tgaatggtcttgcggcatgaaaacagctctctgctctcgcaagaaatttggttttcttgatggctcgattgctaggccagcagaagggtctgcagatcttgacgattggtggacgattcaggccttacttgtgtcctggatcaagatgtccatcgattcatctctccgttcgagtatttcccatcgtgatgttgccaaagatttgtgggacaacttgaagaagagattttctgtgacgaatggtccgcgtattcagcaactgaaggcggagttggcgtgttgcaagcaacgtggtctcgccattgaggcgtactactgaaaactgaaccagatttgggacaacatggctcattatcgtcccgtgcgtgtctgcaaatgtggaaagtgtgactgcgatcttggatttctccaagaacaggaccgtgaaagtgacaaagttcatgagtttctgtctggtcttgactacagttttcgaactgttcgatcttctctggtttcccgtgtgcctatccagtctctggaggaggtttacaatgttgttcgtcaagaggaagatctcaaaactacggtgcatcactatgaagattcctctcaagttgtggctcatgcggttcaaaccaagtcacgtcccatctccgatcgaattgatgctttcgagagagctgtggtttgtaaacattgtaatcgctccggtcatgcctccaacaactgctttgcagtcgtcgggtatcctgaatggtggggtgagagaccacgtagccgtgttgttaatggaagaggcaaaggcgtcacacccggagctgcttctgttggtcgagggcgtcatatcaacgtcaatgctgttcatgtttctcaacaaccacaaacagaacaagcgaattatgttatcactgatgcagaccgtgatggtgtgagtggctttagtgatgtggagtggcgtcgtttgaaggtcttactcaatggtggtgcaagcacgagcacagaaaaactctcgggtaagtctttaacatcctcttggatattagatacgggtgcttctcaccacttaacgggaaattttgatctgctcacaagtgttagagatatggatcctgttttagtcatactagctgatgggagacagaggatttccgtaaaagaaggctatgttgttttggattcccatcttgtgttaaaatcagtttattttgttgaggagtaaacaacggatctgattgttgttggtcagttaatggatgaaaatcgttgtgttgttcaactcgctgatcagtttcttgtggttcaggaccgcgtttcgaggatggtgattggtgcggtaggagagaggctggaacctacactacaagaaaacagtcaatttgcgaggaagggttgcgagggaaggcattcctcgcagtttttgagagggtattgcgagaaaggtgctacgtaccgcacgcgcgtagcaattccgtcgcaaaacttgcgagggaagacttcctcgcaaatttgcgagggaagtacgatggtttcgcaagaaagatattatccgtcgcaaatcccaagcagatacgtcgcaaatctttaccctaaaccctaaaatacataaaagtgttttgcaatctttgattctcatttataaatatgaatctaagtgaccatataatcattcaagttgattatatggtttgaacaaaaaaatattgtattggtttcaatattaacatttcattttgaaaatgttaaacattcatgattcatacttaaagaaaaccataagatcatcattgatgtatttgggggaaaaacacattcgaattatatgatgataaaataggttcaaatgtagataattaacgttctaatgattcaaaaaaatgaatccaaatgattttgagtagtgattgttgtatttttcgaaattgattatacattgcgaggtgtttgctagtacgcgtagcacttccctcgcaatatttacactaaaccctaaaatatttagaatttttagtcatgttcttattttgctgagggtcttactagaaataggagagactgaatcaaatataattattgaatcagatatgatttaattggttaaaacactgcgagggatttgctaggcgctctcgcagttccctcgcaatgtaagcagcattttgattggtttaaaagacggttcctcgcaatttcctagtaaggtttgcgagtgatttgcgaggaaatatattcttatatatactcgataacctagtttgagcggagctcaaacctgccgcatcaaaccctaaacctaatttttttcttcgattctcttcttctccgatctattttcctcgtcgccggcttctcttcttctccgatctattttcttcgccgccgcctctcttcttcttcgatctgattacgtcgccgcctctcttcttcttctccgccgcgtctcttattctccagcagccgccgcaactcttcttctccagcttcagccgcaagtcgatctgtttcttctccaaggtaatgtcttcttctccgatataacttcttctttccattccaacttccaccgtccgatctaacttcttcttctccgtcgcgtctcgtcttctccagcagccgtcgcgactcttcttctctagcagccgtcgcgactcttcttctccagcagcagccgcaactcgatctcttttgcctccaaggtaacgtcttcttctccaatctaactgcttctctccgatctaacttcttcttcatctccgatctgacattgttttccagatctaatctgttctagtttacggatctaaactctgggttttgtttgttttgcaagatgccgtcgtcagagaatacttatgcacgatataggtcacagcagcgagacccgttgcatgtcaattctcctgttagtgctgggaatatttcaggggttcaaggttcacgccatccaccatcgtctccaacgctaaccactcagccttctgtcaatcattctgattctcaagctgagcgtctcaacaatctcacactggagaagcttcttgatagtcctggtcgtgctggcttgacaaggctagacccaaagcgtcctctgggaactctctggtaaggttaaattcattgtcatagaacagcttaggttgtagtgccttagaactttgtagtgccttagagcgtaatggaattaggttgtagtgccttaggttgtagtgccttagagcgtaatggacaaatagaacagcttggttgtacttagcattgtgatgtcttagaagtttaaagatatagaaatccttatgtgtgggctggttggtcttcttgtaggtttgacgatgacgctgcagttgcagcaacagtccgcagcatctttgaaagagattttaaagaacctcatgccaattggtcacaaacatcaaaggctacaatcgatcgatggtatgaaacgtttgcggtaagttttgtgctcttttgatgtttatgcttgttttgtgtatggtttcatttctgatgttagcttctcttttgtagcaagtatataactgggaccgttcaataaacaaaagagtaagggttgagtttgaagcaaagctaaagtctaggatgactgatcaagtgtcatagtggaagggaaattggaaggagaagggtgatgaagccaagccaaaatggattgatcctgatgtgtggaaaggtctagtactgttttggcaagatccaaagtcagaaaaaagagtaacaacaacagaaatgctaggtatcatgatccggatggcaaaggcatctataaacactgttcaggccagacctcatacaaagctcgtgtaagaaaacgggtaagataagtattcttctctccttaccattacttaatctagaattacatactgacatcttgtttatctctttgtgtttcagtgtgagaagactggagaaaaaactcctgatttccttgagctgctagatgagacacacagaaaagcggatggaagcttcatcaatgagaagtcagaggagatctacaagcaagtgacatctaggattgaagaggaagagtctcatatgggttcaggggacaatccggagagcactggatcaggtggactttctgttcatgccaagaacaagatatttactgaagtaaattttatgtgctctttctgttgtctgaaatcttatactttgtgtagtgttgtgtttgaattgcttttgtgtctgaaatcttattgtgttgtctgaaatcttattgtgttgtctgaaatcttattgacaacttattgtgttgtctgaaatcttgacagcttattcattatactttgtgtagtgttgtgtttgaattgctaactattgcaagtgtggttgtgttgtgtacttgataatcactgttagcgttgtctagttgtgtctgaaatcttattgtgttgtctgaaatcttattgacaacttattgtgttgtctgaaatcttgacagcttattcattatactttgtgtagtgttttgtttgaattgctttctattgcaagtgtggttgtgttgtgtacttgatagtcattgttagcgttgtctagttgtgtttgaattcttttgtcttgtgttgaacttgttttctcacttgttttctgttgtgtccttgtgagtttttgtgacctttgcaggttgctccgagaaagaaaggaaggatttatggtgttggatctctgcattttgaagcatcttcagcccatagtggtccaacacttcctagtgatgatccggttatactttctgagaagctggctgccgctgaagcttgcattcaaaatcaggctgggaagatcaacaacttcgatatcctctttgactatcttgctgagaaagatccagctttagctgccattcttcgacgaggttcctcgacacagacaagaccggttagcgcaaatgaaccacctgtagctacagctccggaacagcaagccaatgaggagacagctgctgctgctgccctagctaaccttgcaacaggatcctctttatcatcagtattttgagaacattgtctttctcttttttccttgtaatctttttagaaaatggtttcaaacattggcattgtagtatacattttagataatgataatttcagcttcttcttcttcttgtgtctttatttaagaagcaaaaataatctctaatcaaatcctaattaactaggtaattagagtctaattaaccaggtaattagagtctaattaaccactaatcaagccttattatatcaggaaattagttgcaaaatacttgctaggcagaaagaaaagaatcgcaaatctctcgcaacagttgcgagggaagtactagaactgtagttggatgtgttttgcgagggaattgcgactttttaccatttgcgagaagcgatttgcgaggaacttgatttcctcgcaagtccctcgcgtatggctgtttgcgagggattagcgagtaatttttccctcgcaaaacgactgttttcttgtagtgctactacttttgcaaaacggagttggcagcatcggtgaggacacaagatgacaagtcatatgagctgtggcatcatcgcatgggacatccgtgtgcacaagttgttggctctcttaagaatgttacagtttcaattcgttctgatattttgaataaagcgtgtgatgtctgtctccgcgccaagcaaactagatctccttttccgattagtatcaataaaactacacaagcttttgagttgattcattctgatttgtggggtccgtaccgaacaatttcgcattgtggagctcgctattttttaacacttgttgatgatttctcaagaagtgtttggattcatcttcttaacgacaaaacagaggctcctacttggataaagaattttattgccatggtagaaacgcagttttcaacaagagtaaagagttttcgcagtgataatggaaccgagttcacaagtttggcaagctattttcgacagcaagggattctttaagagacttcctgtgtgggtacaccacaacaaaattgaagagccgaacgcaaacaccgacacattctgaatgtggcaagagcattgcgctttcaaggacacttaccaatccaattttggggtgagtgtatcctcacagctggttatttaattaatcgtattccttcatcagttctgaatggtctaacaccatatgagaaattgtataagaaagagcccgattatacacatctcaaagtatttgggagcttgtgctatgctcataatcaaggtcataagggagacaagtttgaatcgagaagttgaaagtgtgtgtttgttggctatccatatggcaaaaagggttggaggctatatgattgcgaaacagaggagtttttcatctctcgcgatgtggtgttctgcgaagatcagtttccgtttgataagtcatcttcatcatcggcttctcctgtacacgaagaagaagaagagttatgggcttcattcagtatgaacccattagctgaaattgaagataggcccgataagggcaaaagcccactaactgattcaagtccatcttcattatccagcccagatacaaacattgcttcttcatcctctacgagtctctcgacgcctccgtccacttcctctgattcatcttcgtcaccaccgacctccacaactcagtctgacaattccgatcaaggattgactaccctcgaagctacgtctaactccacgaatcctgtgccaccatcatcaaatctgttgggtcgaggaaagagaccgaaaattccatctgtcagactcaacaattatgtggttaatacggcacatggaaaattgctcaacaagtctggtaaaacccaatatcccattgcaaactatgtctcttgtacacgtttttcagagacacatcgtgtttatctagcggctatcactgagaatattgagcccaaatcattcaagtcagctatggagaatgaacgatggaagaaagctatgggcacagaggtgggtgcttcagaagaaaacgaaacatggacattagagaatcttccacctgggaaacgagccattgggagcaaatgggtctacaagatcaagtacaattcggacggcacgattgaacgttacaaggcaaggttggttgctcttggtaacaaacaaattgaaggtgaaggctatggagaaacgtttgctccagtagctaaaatgggtacgattcgtttgtttttaaaggttgcagctgggaatgattggccggtttatcagatggacgtttacaacgcctttcttcacggagatcttgaagaagaggtgtatatgaaaccaccacctggtttttatccaaaagatgagcagaaagtttgtcggttaagaaagttaatatatggccttaaacaagctccgaggtgttggttcgaaaaattcacatcatctcttcgtgactatgggtttcagcaaacacatgctgattattcgttgttcacctttgatagagatggtattcagattcgcttgctcatatacgtcgacgacatgattcttaccggtaacaatgacgcatcattggaagaatttaaggtctatctctcctcttgcttcaagatgaaagatcttggtcctttaaaatactttctgggtatagaggtctctcgcaacaaatctgggttctatctgagccaacgaaaatacgctttggatattgtcaccgaaaccgacatgttagcctccaagcctgcctcatttccgttggaacaaaatcaccaacttgctttatcaacgtcacctctgttggtcgatccgtctccatatcgccgcttaataggtcggtttatctacttggcaaccactcgacctgatttagctttttgtgttcatactctggcgcagtttatgcaacagccgcgtgaagatcattggcacacagctttgcatgttgttcgctacattaaaggtaccgctggtcaaggaatcctcttgagttctgccaatgattttaaggttaatgggtggtgtgattccgactggtcgagctgtcctattactcgtcgttcagtgacggggtattttgttcagttgggacaatctccaatatcatggaagacgaagaaacaagacacggtgagcaagtaatccgcggaggctgaatacagagcaatatctcatcttcgagatgaactattatggataaagaaggtacttctatcaatgggtgttcgtcatgatcaaccgatgaacattttctgtgatagcaaagcagcgatctacataagtactaatccagtctttcatgaacgtaccaagcacatcgagaatgactgtcatgttgttcgtgtgaaatacaaaaaggaaccatgtctccacatcatgtttccacaactcaacagctagccgacatttttacgaaaccgttaggacgacaagcatatgagctatttcgcagcaagctgggcattcttgatctccacgcaccagcttgggagggggtaatagcgtatcctaacgtatcaatgtgatacgctccaatatcaatcacatttactgtgaattgattttgatttgtatctctttaggaaagtagatatcgtctcttacctatataacaatgtaaaggctactgtgaataaggacaagaaacttcttctcatacatcaatctctatttgttcactttgtataaaaatgccaattagactggattttgtagatttaatgtacccgaaaaaaacacacggtaaaatgatgtctagtatgttcggcactcacatcacatcattattttatgatgtacatacacaagtaacttgacaaagagaaacttgtcatatacatattaaactccaaagtagtaaacagaattacataaccaagaatgaaatgatccagcttggttgttactgaagatgacatacaaactcttttcgtatattgttcgatgtcccacatgttttgctaggaaagttgtagcctaattcaaagattcagacatattctataaaattaagaactataagtctataagcttagtttatagatttactggttgagtgagaaaacttaccctagtctgattgatttttctctaggagctggttgtagttgtatgagttgaagttgcggtggtgcatatgttgtggttccattgcttattggatctacacttgaattgccttcaatcgcatttgttcttccatgaacctgttggccacgacaagtgtttaattaggttaacatgatcaagaaatgtttctacataaacattttttttttatctaaataaaagcatttgtgtcaccttcttttgcaatttaatattttccttacgcattatatctacaatattttgtagctcgtgattctctttttggatgatttgtccctgtaatagaatcaaacattgttggtttaaagatgaaaaaaaaaaatcatcaaacattgtcaatcttcttattaaccccaaaagaacatattttgattatttggctaacaaaccttacgattaagttctctgatttcatttgtcataagttgatcctacaaaagagaataattagttgtccaaatagtatggcagtgaaagagaggcaccaataatctttgtccaaaatatgtttgtataaaatgttccttaaaaccatacctttttgagacgaacaccttttagacttgttactagctggtcttcaaggttttgtaggtcgttagcattcattccagaaagttcctctcccactagtttccttcatagtattataggttaattttataatgcatttgggagtgaaatataatttgtttaacatgctagctcttcggtcaaaatctatttgtttttacttgcaatttcttatatataattgatagtttttgtaaataagtagcgagattagattagtatattgtatcttataatactcagtttctgttttgacatgtgcaatagctcttacctgtggcattcttgtagatattggagctgctgctgcaaacttgcaacctctctttgccaaaactgataacataaagagaaaactaatgatgtgaatgtaaatgaatatattaaagtggccctagtcataacaactatatattggttgcctcaaaccagagcttcatgttcttagactcatggacgatcatatgtgtagatgttcgattaatttaattagcaatcattataagctaagctttttaaaaaatagaaacaatctcgttaatgatcatcaactcacaaatcacaaactatttagatacttctagaaatatagaagtttttagggtttcaaaataggttgattatgtagcagaaaatgggaaagattaaaactaactaaattgaaattatgagactttatttatataaaatattatgatataagctttcaactcaaaaccaattagcaaagcatttgtccatttatcttatgtactaattaaggtcccttgttttttctaaaatgagcaattgttatccataatatgtccatattcgagatgatggctctttaaaccattatattaatcttggtatgttcgtgcaagcatttagatcagtaagacaataaatttgttaccttaaactaattatcataactacaggctacagctaatatggtcaaagaaattgtatttttcttttgattgctttgataccgtatatatcagcctctttgttacaattaaaaaatatagtttttattaatattaattttataaactaaaaacgatttttcatttttgtagcaaaaaatcagagcttatgtagttattcgaaacagttaaaccgatattaagaagattctagatatatagcatagaaacatcaagaaccgattaagctcacaacaaggagagggggttgtgagaaatacaaaggcgggatccaaacgtggtttgcttcgacgagataacactgtcgatagtatctatttgattttttaaaaaagttttttgcattcatatgtataaacgtttatttattttttaaaaataatttaatattatatttaaaaaaaattgaaatcatcaatttttgttttcagttacaaatttgaaagcatcaattattaaatcaaaaattatttggttagtttcttttatgtatgttttataaatgttttcagaacgctatttaaaaaaatcttccatttaattaataaatttatttaattataaaaaaaaaacagaaaaacaatcatttgaaaaacctaaaaagaatgtgggttcattcagaagtttatcatcctaatgagataaattataatttagagaaaaaggtaaaaatctttactatgaatacctttatctctgaggcatgattcagaagttgatgctgctcctcttttactctgttgtaccgctcaatgattgttttcatactattcaggttcgaaaagataacaatgttattaatcatacattaattaacatattaaaattaactcaacagacaacagtaagtaatataacttaagtaactcaaatttgtcgtttgaattattttttaaaatttgtgaattttgatatcaattatataagatagatacaagttttacaatgccaattccagtatatgcatgaagtttgtctacctatatcgtttgagcacctacaaggctacaacaatagttcgaacatatatagaaatatcgtaatattactaacaaaaaaagtaagtacggatgtaaaagcaacgtatgacatgaaagatgcaagtgttttaagaaaataacatgttattttgtatatttcagacacaagccaaaatacatcaaacttacttacaattctaccaccatatatatatcgtaaataagtctccgcatatatagccatttacaaaattcattctattttagacttactaaaatatttcgatatttttgtaagtacctgcacggaagtctacacataagagaaactaagtgtacaaacaccacacacacacacacacacaagaaggtattaacttaagagaaagaagtggacaatctattcttttttgtccgtacacgttcacggtttgtaccgacgacattgtgggtgattagaacaaatttcattatctagattgggaatccatgctccagcatcttccctcttactcgttttattgatcgataaatcaacccacaataggttagtttcgcttcgctccttgaccttctccaaaaggtggtttcgagcaaaaggaattctttcattcctttcttattatcttagatttcacacaaacattttgactactaattttatatttaaatgatgaatgaagtatgatcatcaaaacaaaagaatgaaaaaactacatacatttaattcaattcatttaccttccaaaatattagagacatatatatttcttataaattgttgttaaatatttagatttcagatgaatgtttttctcctgttttttatttactgtaaaagtagatgaatctttcattttagcatatatatgtctctaatatttttgaaatatatatacaaattgaatatatatataagaaagctatgagggaaataaatataatgaaagaataatatcagggacataaaatatagtgatgaatgaaatatatatatcttacagatttttgaagtataaatattagagacatatatattttttagacagaaatttcagggaaatgcgcatgaatgtcttttctttaattatgtacttacattacatacttagcttatacaaaattggaaaatgtatttttttaaacacttgttaaaacacagaatcaaatgctttttgttctatattatatgaaagaaaaccacaaactaatcttttcaagttcaaattttatcaaatagcacatggtcacatatatgtgacatattacgaattcaaatcaattataataaaaggtgaaaatgtagatagagtaaaatacaaacaattctaatcaatatagtctgtatacatcacatagtgaagaagtagaaataatttttttgatctgtatatagtactggttcatgttctttctataattgaacacttagcaaggcataaatcagtaaccatttatcttgatgcacttgcaacaaacatagatacacgtgcatatacttatcgaaagctatgagggaaataaaataatttgaagttaagaatgttcaaatcataatttgctatgcaagtcttacatggatatatcgtctgtattcaaatcaatgtgtgtaagataaactaaagcctatctaaagatatataataatttaagtttgatttgaaaaaacgaaggagaaacaaacatcaaaaatcatcgttcaaaatagctaaacatgtgctataaccctatcgagaaactaatacttagacaaaaaaaaaaagagagagagacaaaaagtgtgtaacgatgagacattatcattagtgacaattgtatatacacacacatgtcttgggatcaagagaactgaggaatctaacaggcaagacaaatgcaaaattacttcattgacttgtactaaggaagtaaagaagctaaccttgaattgcttgcgtagtcgtagagctttccggtgctagagaatatgataacaccaacttctgcatcacaaaggatcgataactctttagctttcttaagcaaaccactccttctcttggagaaagtcacttgtctacttgtagagttatcgatccttcgtataactatcttccctctccccatctctctccccaaaagactaacaccaaaaccaactgcatcaaagtttatcaagaataagtaagcacatcgtaaatgtcaaaatgatcaaatctagataatcttcctgattcaaacttgacttagatttgtcctctttcatagatttctcctagtttcttggattgaatttatatacatatgtgttcgtgaagatttgacttacttgatcagggtttgcaataaatggaaagaagaaggcagaggaagaggagaagcttctttttttttttccttctcaaaagatatcttctgtggtttctgtttgtggtatatatggcaagagagcggattcagaacaaaaccactgctggttttattacaaaagagtagtttcaataaagccccacttgcgtgagtatagtaaacatttatactcgctctcttatgcgcaagtctgattgagtcaaacatttgacttcgtaaattgctaaaatcacgacaagaaaagcgagtacagtcgaattatagacacgagcgcgtgagatttaaatatcctcggactatcaggtgtacccaaccacgaatcgtggggcgttaatacaaggtggtattgaaacaatcaatagatgactgacacgtggataagttagagatgcttttgtaaagtccgaggggtaatttagtaattgcaaacaatagtatctttctgtaattgacaaatggttttggcttttggcagagctggtgctgtacttgtactgttgtccgatgatatctcttccacttattattttattgtttttttgtgtggtatcatcttttctggttttgatatttttgaggtttaaaaagtcggacatgcgtatattttttcgaataatatatgtaataatctatattatctttaactctaatccttggtcattgagtaaaactttttttaataaatctggccaataaatgactaatgaaagagaatatgtaagttcttattgcatccgtttagaaatttggaagtttctatacaatcgaggataccattttagtgtgattttattttacatatatatattacatgttgagtatatattttttaaattccttattgttttttaatttttatattttttctgtcaatgtaaaattttatatattaatttcatgaatgtgacactactcatgaatcgttttacaaccttgttctttaatctagttggtattggattctccattcatattttaatttttcttgatcttgaatgaatttttatttcacttattacattgagtatgtataaatatttctacatcattgtcatgaatatgtttactactcataaatgatttaactataacaactttgttcttagataatttataagtatgattatttgttaaatttaaaggtccaaaatgccaaaaaaaaaaacaaaaaaaaagcttaagataacaaaaggtaattcggatcgaatatggttcgatttatctattgaattttttaacggtcgagtagtccatccattatatttatttagggatctaaaggatgacactattttgacagttcaaacaacagttgggtatttgaaacccattggtaaccaggataggatctttatgctagaattaaagaaataatttagattgcgtggatgtgagactcagtgacttatatcacatgtcatcactaggacatgtgaaggtcattgtattggatgtatgagcaaaatctaaaaccagttcaaaaattgactctctgtaacgacatttgttttattactgaggctggaaagaattcatgataaggtctaataattttctagttgttaaattttccttgagtttagtgatctcttggatataaactttaaatatattggatacaaaaactaagtaaaatttaatgtaatgagagactgagagtatcagtatgggcctaactcacacccaaaagctagcttaaaagtggaggtttaccatatacttatttattgctcgacaaattattaaagtctcgatgtgggacatattctaacatacctccctcacgctcaggactggacatctgaagcgtgaagtttgtggaacttcacatccacgggtggtccacaatcgagacacattgaaactataggctctgataccatattagtatgagcctaactaatactcaaaaggtaactcaagagtagagatttaccacatacttatatattgctccacaaattattaaagtctcgatgtgggatatattctaatagagggtttctataattatggttgttgcaaaattggtcattgtggtgttctcagtttctcccttcgtaatattttcttcgactttcaggacagtggttgtattgagattggttgtcttaacaacgaacatttgtttgagtaacactgctaaaagatttggtgatgaagcatgactcgcgtgactcaagctttctttgtgttggagatgatattcttggagaagcaagttcgacctagtgacaaatggcggtgtttaatatttaacaatcatgatgttttcatacttcgcattcaatccattgaatatgtacatgaccaaagttatatctgtaatatgagcatctacattgaaaaaagttcaagagcgtcttgaactattggcaagaatttgtattgagtcatcgctaatttctttcttaactagttacagagttgtatagtcttgaccatgactggtcctgagaataattggactagaacaaaataaaaaatgggagttaaaattttctattacatatcatacaataaatacaaaattaatgaaaaaatagatttgtttattaattaggcagtccatataaaaatttattagattttgatatttatgtttctttctcgtgaaactctttatatgacttatacatataaaaacttttatttcaaaataagccacttaaattttgggccacagcaaatgaaaacatttgctgtgctcaggacaagtcctggtcctgacatatgtgttatctttggagttcggagtggttttgctacataaccatagtgtctctattcaacaagaacttcttgtaagatcactcgaagtgtgttggttaacttttattaatcacaacagaaaagggctctttaattcttttgtaaaaaaattggcattaataataggtaaaattttatttccaggtcgattaaagcattctaaagatatttccacttttttttttttttgtcgtcaaagatattcccacttgtgtactgtaactgcataagaaaccgaatatatataatatatattaataaattataaaatgaaatttatgtaattcggtttaccacaccaaaacagcaaaactgattataggacatagagagtctagatccactatacgatcaacgcaagtgggagttttatagataaagaatctaaaataagataatgagagaaaatgtagagacctcgttttctatgttccagatccaattttaaggttacctaaaaaagcatagttcagttttaccttactaatacgaataatgaataataacaatattttactaccaacttgcttgagtcgggatcttcaacgcttgctcattatttccttttttttttttttttctttttgcatctcgttttgattttgctttttacctggaagaaaaagtaaaccaaatatttgtctcccatatgtatattttttataaagcatcttcattacaaatcatgaaaacgaggtttgtggtttgacgtcaaaacgagattctatggttttgggctggcaagaacctgtgactaaaaccatagaatctcgttttgacgtcaaaccacaaatctcgttttcgtgactcgattgatgatgagatcaaaggtcgtgcagaccatgcgcccctcttctcctttccaactctgcaactgagtaaaacctaattttatagttgattttgcctctccggcaacggtttcctttaccggttgccggagagggcttctctctctcccttttctctctgttggtcatctccgtctctcctctgttgctttggtagtgctctgtccttggatggcttttcgtctcttgttggtggtgaggcggcgtgtggcttcgttcgacgcacggtgcaagggatagtgtgcctgctctcttagtgtgctcttgtttttggcgcttgtggacggtgctgttacagagcttcttctccgacgagtttggcttccgatctgtccttgtgtgagtgtccctcgtcggttctggttgtggctctggtgaggcgataggtacaacggtgtagctcctagcggcgggaccattctcctttttgagttactggtggtgcatcaccgtttcttgaaaatcgtcgtttccttttgtgggatgtgctctacgttgagtgctcggtgagtcggttctcctcttctcgggtctctcttcccttatttttctccagctctggtggtggtgtatttggatccagtgggcatctcttttggaggcaagcctggagttatcttgtggcttgtttggtttgttcgttgcggttagatactttgcggtttcttgttttggtggtcatcgtgtctcctccattggtggactgtggaaggtggcagcttcttcaatcatggttatggcttctccgtggccatttgtcattctccctgatacgttgtcgctagttgcattaaggtggagtattgttgttgaaggtgttgttggtgtcggttctttttgtgtaggtgagcttctaggtgcattgactaggttatccgagtatgaatagaggcggcgaataggtctaagtggtgtcgctaacacttgtgttagtgtagaagtccatggttgcttgtacgtttttgcgttagttttcggagaagttgtaggcttctatatcgaggttttgtggatgggcctcgagtagtttagctcgtggcaactaagatgaggattccagtgcttcggctctgtggcaaccacgcgaatttccgagtttcgcgagttcggaatcggtgtttcatctcgtaacttggtcttgaacgcttagaagcgatccgaaacaatttgagtagtaatgttgtatttattttctgtagattgctttaatctgtttcatgtaatctctgtaattctgtcaaaaatcaaaaatgatataaaacttaaccttttaccaaaaaaagaaaaaaaagacctgtgactatgtggttttagcaaatgccatattagtagattaacatggttttgctactttagaaagaaaacaaaatccaaattgatatcataactttagaaaagaagaaatgtgagcaacaaaatgatatcctcatctgccacgatttttcggaaacgtgaacaacaaaatattctatgatggcaatctttattgcccatgcgatccataaatcacaaaactcacacaaatatcatatctaataatactaaatcaacagtcagtttagtagaaactgcctatctatctatttgacacataagcaataccccaaatttttgcatgtttagaattttctcaattaattaattaaaaaaatgtttcgaaagtttatttctccatctcctccacccacaatcccacgttctcttaattaggattcgctgacaatacttttgttttcatcccgtaaacacataaataattaattagtttctttttcttcttcttttgagatactatttgctgttcttttgagatactatttgctggaatttggatcaaaattatacttaaactggattagcaattgaaggtaattaaacatgcatacaaatgcagatatattcaacgacaaaatctcttacatatatttcttattgatattttggtctatctctttgacagacttttatttataagtgattcaaaatttctagagttcacatgtatttattttgggggaaatagagaagattgttttggaattgtaatggtatgtgcatccgatcgtttatggctattggctaacaagagaaactgctaatatccaaccaaatctatgtttcctctgtacgtatataaattcagtcattatgtttgttacttgagttaattcctattatccatatttgttcaaatatatgtatatagataactaaatttgatatttgttatcttttaaaatatatactaaaactaagtccctgcatagcaggtgccataatgctagtgttcatataaatgtgttgagtgactcgacaaaatggcatgcacggttgggacacattggtgtagaaatcatgaagcatatggttaaagaagaattagtcataagcttgccattgatgtcgatagagaaagaaacatgtgcttcatgtttacttggaaaacaagtaaggcgggtttctccacaagcaccaccgtatagagcaacacaaaagcttgaattaattcatggagacctttgtgttttaattgcacataagaggtatgtttttgtcttaattgatgattactcacgatatatgtggtctattctcttgaaagaaaagggagaagcctttgacaaattcaagacattcaagatgatggttgaacaaaaattgggaactaccattaagactttccgaacagataggggtggagaattcttatctcaagagttcagaacgttctgtgacagtgctggcatacaaagacacttgactgcgccttacactccgcagcaaaacggggtggttgagagacgaaacagaacgctcatggagatgactaggagtctcttgaaacatatgagtgtacctaactacttatggggagaagctgtgagatacattacatacttgataaatagagtgggaacaagagtattggttgcacaaactccatatgaagtattcaaaggccgaaaaccaaacgttgagcatttgtgtgtgtttggaggctatgcaaaaatagaaactccacaccttaagaaacttgatgaccgatcacgaacatttgtacacttaggaaccgagcctggctcaaaagcataccgcttgttgggcccaacaaaccgaagaataatagtgagtagagatgttgtcttcgatgaaagcaagagatggaagtggagtaacttaaatggtgaaaacagtgataatgctggcatgtttaaagtcagccttgaagagtttgggaataatggtctaagagaagaagaagaagctggtggagagaacgaaggaagtagagaagaaacagaagaagagtgtgatgaaaacgagaatgatgaggactcatagcaagagaacaattctcctagtactgaaagtgagaatattgtccaacaagtgcaaataatccagccccaactaagagtatcacaacaacaagtttcaaagccaaaatacttggaggactacgtcttgctcgctaatattgaaagtgagtatctcttgatgatgttaaatgaaaagccttgggattacaatgaagcaaaagagtcaaaagaatggatagaagcgtgaaaagaagaaatttcatctattgaaagaaacaatacatagaatctagttgatcttcccgtcggagctaagctaattggattaaagtgggtctttgagatcaaacaaaactcagacagaagtataaataagttcaaaggcaagacttgtagcggaaggctatgtccaaagacatggtgtagattttgatgaagtgtttgcccctgttgcacgcatctaaacaatctgtttcatcatagctttggcagcttcaaatggttggaaggtgcatcatcttgatgtaaaaaccgcattcctacatggtgaattaaaggagatcgtacacgttgctcaaccagaaggatttgtagttaaagacagtgaagaaaaggtttacaagctaaacaaagcactatatggtttaaggcaagcaccaagggcgtggaacaacaagttaaacaaaatacttaacgaattggagtttgttaagtgttcgaaagagctctccttgtatcagaagcaagaaaatgagcaccttcttcttgtagcggtttatgtggatgatcttcttgtcagaggttcaagtttaagtatgatactcgatttcaagaacggaatggaatccaaatttgaaatgagtgatattgggatgctaacttattatcttggtattgaagtattgcaacatgacaaaggtattaccttaaagcaagagagatatgcgagaaagatcctagaagaaaccaagatggaggaatgtaatgttgttcacacaccaatggccttggggttgaaattatctacggcacacaatgagaaagatattgacggaaaagaatatcggagaagcattgggtgtcttcgttacttgcttcatacgcgacctgatctctctttttctgttggtgtactaagcagatatatgcaggaacataaggaatctaatggtgcagcactcaaacagattctcaggtacttaaagggaacataagaatacggcttggagtttgctcgtgggactgaaaaagatcttgtaggctatagtgatagcagccataacgtggatgaagatgacgggaaaagcacaactgggcaactcttttacctgcatgaatgtctgattacttggtgcacacaaaagcaatatacggtagctctttcgtcgtgtgaagcgtatacaaagcaatcactatggcttcaagatcttcttagtgaatttaccggagaaacatgtgagaaagtgacactctgaatcgataccaagtccgcgatagctctcgccaagaacctcgtatttcacggacgaagcaaacatatcaagaagagatatcattttattcgagagtgtgttgagaatgagctagtggacgtagaacacgtttccggagacgagaaaaaggctgatatcctaactaaagcccttggaaggatcaagttcaaggaaatgagaatttttatttgagtacaagatttgaaagaggttgagttcaagcttaaaggggagaatgttgaagtaagcttgaagaaagcttgagttataagctaaagagattaggattagaattagacttttgtatttaggaagtttgcctaaataattatatgtgtgttttcctaaaaggattaggaaatggtctagttcttttcttatataagagagatgccaaggtgtggtattcctcaagagttttgagagattaagagagtttaggttttgagtgatattcctaaactaataaaagggagttattcttttatctttgtatagctaaataatttgctcacgaaaaaaaatatcaagcaattagcttcaaacaacaatcaaggtacgagaaagtctatgtacatagtggtgtagactcaaaaatatataaaagaaaactgccacgagccaaccacggatcgcttttacattcaaatatagttgatccgcagtggtttgttgtccaccttgataaggctcaaactaacctcaagcactctctcaaataagagttcagttgtactactttaggatcgaattcacaaagtttttttgttcacacagaaggtgatagtatggaaattaagctaaatcaataggtattaaaagtaaaagaaaacaagcaagcatgcaacagatagattgaagtaaattcagatgattaaaacgtcatgtttaaggatattctcaagaaatagacgactaatagatttagctatgatcatgatttttatcgaaccaatctaaaactcaaatcactaatatatgatcgaccaactagggatcccaactcttgttgcaaacccctaatcgcaaaacatgcagtaagatcatgtttgataagttcatcgaagtataaaaaccaaagctatatgtatttaaatactctagcccatctatgatagttcatataatagatgccttctcaaatgctacctattacctaagatcaagttctagttagctactctagaactaacattaagaacaatcaagatggaaaactctaaagatcctaacaggttgttaatctactatatcatctagatccctagtgagaaaccctaaatccaaaaagtagattactcagacatgatcatagaaacagaaaacatgtttgaataagattgcataaagaaataaaaaaaaagaatagagtttagaaaagatcttctctctatagagttttgaaatctctaatgaaacttaaaataaggtttcaaaaagtgtataaaggttcggtctaaacaatgaccttaaaaatatatataagtttctaaaaaagtgcagagactaacaatgcaaataaggaaatctttcgaggtaaattctagaaacttcaaaacttcaaaccgtcagatttcttgttgggccgcgaacggtttcgatcaataccaagagagtgtcagtcgacacttttgccttgatcagaatctgaattcgtccctcaagcttgaattcttcggttgagctctgatataaccctatttttactgattttagctatgatttaggtataggttttagagtctaattgttatttctaaagtcttttctagtccttttctggtctttacatgtttgggatgtatttggagattatggaacattctagtgatcaacagcataagcaatccgggacgaaaatgcacgtaggtgtcgaacgacaccacccctggtgtcgagcgacaccaatacctgacggcaatttcgagacgcaacttattgatgttttgaagatttccaaattcggccctgaactttctcctatgtttaattaaggtccatcacgtttttaagacatatatatagtttttaggtcattgttttagaccctaagctttgggaggctattccctggatctcttttgtactttgggaggctattccctggatctcttttgtactttgggagctaaaccctgtggaaaatcccttttggatctttcttactctcttctcttgttattttcatcattaatttcttattcggaatatgatttgtgtttctttgatcatgtttgagtaatccacttgttaggtttagggtttatcattagggatttagatgatttagtagattgcccccttgctaggttatctgtaggattcttcatcttgattaatcttaatgctagttttagagtagttaactagaacttgatattagatgataggtatgcccaccataggtacttgctatttgatctatcatagatgagcctaggcatttaagaaagaacatgtaggctcatacaacgactctggtttagatactaggtgaactaatcaaacttgataataatgcatgtttaagttaaagatctctcgacttctccggttattcttagctataggcatagagagtttcgcggaacaccaccggttactctaaaatcatagtttaagttcgagaacggttcgataacaacttagctattattagatctactatcatctatctcctgggaataccctaaacctgacgctttcattatcttgtttccacaactcacaattttctattggttacttttgtttctctttattttatttactattttacttagcataattcgatttgccattcgtctattgcgtgatccgagaactttgtgaattcgatccctaagtgctgcaactgacctctttatttgagagagtggtcttaggattaatttgacctatatcaagctccagaatagtccatgaacttccaatgcatccctaaagtgcaaaaacttgaaaataactagaaaagatttcagaaataacaaa

SEQ ID NO: 222 - DNA, 89281 bp, Arabidopsis thaliana
aagctttgttgagatctgtaaagtcgatgcaaactctatcctttccattcttctttttgactacaacggtgtttgctaaccaatctggatattgtacctcccttatagatccaattttcagaagtttatccacttcgtcatttactgcttttgctctctccactccgagttttcttcgattctagaatcacttcgatcacaacatcatccactttctgcccgctaggaaatcttgggattactcctttctttgcgggtttcgttaattgctattggatttttaatcggtggctagctaaataacaagttctcgaagcttcttgatctgtctgaattgtttccactccgctcggagttgggaattagagacattggtgataggtagaaggaaccgctttcatttgatagatccacggagttccaaaaaatatgttataggctgctggtttatcgaacacgacaaaatccgcaatcttcgagatctttccagccaaaactggtggcttgatagttccgagagacattactgattcactcgtgaaagccactaagggtgatgggggtcctaccacgtcggctctgcttatccccattctttccaaagtgctaagaaaaattaagtctaccgaactgccagtatcaatgaggatccttgacacttcgaagttagcaacatccaacgtaactacgagtgcatcatcatgagatctttcgaggtgttgcgtctccttctcatcgaacaatatcgaagtgctttgaaaatctacttcctcacttaagcttaatttcaaatgaacgttacggctatgtttcttgattacactgatggaatcacggcagagtttagatcctccgagaattacgctgattttaccctttgaagttcttggtccctcttcgctcgccggccttggtcttttagagttttgattctctggattatcccttgattcatgatattgtttgatgaagttctccatgtcgaattttgagagatctccactggcctataattctgcgagatgcctcttaaggacgctgcagtctttggtcagatgtcccatgactcggtgtatatcgcagtacgagctttcatcacggatccaggtattcgaccttcctttcccctgaaactgctttccgacgttgttattgaatggtagcaaaccaaacttccttggtccctgattctcccgaggttcgaactttttgggcggaaaagtgaccgctggttttgcttgcttatctctttttgcgaaactttctttttcatcttcgacttccatccaattattcgctcgaaatagtgcgtcttgaatagtatcaagtttatgaagtatcagatcttccttaaacctcgaatcataccataatccctttcgcagagccgatagagccgattgttgtgagattctagagagctttgaaagcacgtatttgaatttggtaatgaaagcccgaagtgtctcattcggcccttgagatagattccagaggtcggtgtccgaaatgctcttatccatcagaattgagtattgttttaaaaatactaccgatagttcgttgaaattactgatcgatcctggttccaactgagtgaaccacatcagggcttgcccacacagattttcggagaaaagtttgcaataccttacgtcttcatcggcctcgtttaggtcaactcgcccagcggctatcagaaaggctgcgagataacctttcggatcttccaaaccattgtatgattctaagttgagttttcgagaatctctgattctcaaacttgtaatttgcggagtgaatggtgtttgcctagctttctcgataacccggttgatatccggttctgagcttgtagcttggaggaatttcgacctcatttctttcaactcccgacttacttccttcatggtttcgagttggtcgaagttttcctgctcgtgctggtcaccgaactggttatcatcttcaggatgcgtttctccatcttctggttgattctccgcgtttgtaccatccggggtcgtttggtctcttgttgcatttcgcggaagagaatttggggatccgaagatggttctccaaactctagaattccctacatttaaagaacggacacgagactgaatggtactaacattctggctgagtgatacctggtttgtttgcaatgtttcgacggttttttccacgcttgcaaacttttgcgtcatatcggtcatagcttgttgcatggccttgagggtttcggctatctaaacgttggtagcatcctctctagacattgcggatcacttcgggtatataatgcacagaaagaatctgatgactcaagaatcctccatccccacagacggcgccaaaatgtggatgtcggattcacactcaagtatttatttgtttagtgagaaggattattcttgaggtcaaatatactaaaaaataagtagatgattatagagaaaattatgagtattgtaaaagaaaatgtatagctaatttgcaccaaaatatgcgtgtgtccttacatgacctttgactctcaatatatatccaaagaatacatttaattcttatttaatcacaatcattctatcttaaacgtatccgtttctagtcttcaaattaattatccgaacgtttgaatttgaatccactccgggccttcttgacttcaccttttggcccatttggcctcttcaatccgagtagtcttgacctcgacgccgcattcacttcgcaggtcaacaccccatccatattttcacctcgagaacgcttatgggccttctctgttatgggcctcttttatccacgtagcaatctttgtccggatctgagcccgtggtgcgggatccgacaccaacagacggcgcctggtatgaaagggatttttcgtgtttaagtggtggagttaaagtgtttagggttaccgtatagtctcgaatgcaggatatgttgcaaaaccgcaagagagaacagatcggttgaggtccacaatttccaaccacttcttcttttaaacaccttcttctcctttacttctttcttactttcggttccccagacttagttttttccgagggggctctcttctgtaattggctcatcttccacttggccggctgagtttgcgttcgtccggaccggcaagcaaggtgttgcctaggccgcaaggtggggcaagtccggcgaaggtgtggcaaagtccggcggactacggccaatggtcggcgcggattggctggctccggccaatgtttgaaatggtcaggcagactttggtcaatggttggcacggtctggcggacttcagccaaaggttggcgcgcattggcgggctccagccaaggtttgttgcggccgggacaacttctcctggcggtgccagttactcgggcaagtagctgggccggttgtcacaaccttctcttcttttttgggttttctacttctatttttctattttttttatatgtttttttataaaaatctgaaacaaatacttaaaaggtcaaaagcaaaagcaaaataaaattctaagggaaaatgtagctatctagtgggttgcctcccacttagtgcgcttatttaacgtcgttggctcgacgtttgggtcttactaggtgtagtaacacgagtttcttcgccctaggcgagctctcttggatacagattcgtccggaggtttcttcaggttgtctctcttcttcttgaagattgatcttctcgtcctttcaaacgtttctcgcactcgttctttagagatgtagctttccatgaagagtcttttaattggaaatttctcccatgcttcgtcgaaagaggtgtcaagtcggatgactcttaccaagtttcgaaaggtgcatcgcataccattttcgtgagtggtgcagatcatctcttcgatctccaaagcttctatctcttcgatttccaaagcttccatctcttcctctcctgaatctgggtaggattgttcgccctcggaactcggggcgttgtaatcttctccttctgatccggaggtatcctctccttcctcttataagtctccgccaggccatggtactacggctttacaaggaaagatgggctttgggtcttgctcatggccttgtggtttggtttcgtctcgaccctttttggactctcttcatgagttctcttttatgcgtttctcgcagatggtagcacgtaggagtaacgagttgtacttcttatccaacctctcgattgtctcgttaaaggtcgtctccgtagatcccagcttagactttatcccatgcaacaggttgagggacttatcgaatttgatatggattgtctcggttagaagtttatagctatcttctaaattcttgatcttgaccatggtcgccttagccttgtcctcatacttctttatttgagccgccgaactcaaatcgttactaaagagaactttaaaatcagacatgtgattctttccggcttctctttggcagtcggctagctcacgaaggagaaagatctcctcatggagtttctcttcgttcttgttagctctctcttcaagcattttgagtctttcttccaagactgtattcttgtcaaggagctctctaacggtcgagcatgacctttcttttcctcggctatccggatggccaattctccgatggtttgagcacttccttgattattctctaaatccttccctcagttcttttctatagtttttaccttctttgtcaaggtggcaacgtctttcgtgagcttgatcttcattctcctaaagctcaaggaaagctcatcgatcatacctgagagaatgccatcgaccttatccatcttgaagtggagagtcctcgtgcctagcgcttgttgatccaagtattggctcatcaagctttcaaggatctgctcacgactcttttgtctccatggtatgtgagagtgatcttatagagacgaaatcgggtgacgaaatggttgaaccgatcggttcaagctgaacaggtccttgcccctttggcttttactgcccgagctctttcctcttcccgagggtggggaagcaataggcggggcatcatcatggtttcctctaatgatagtttcttttagggtttcgggttgtccgaaaccatactcttcgagagtttcttcatcgagaatcatgataggtatgcaggagtaggtgtccttaaatcttgcgaaactggcttcttctcttgaagaatcggtgagcccatcagtactttttgaacaatcttcagtctgatgaccctgagcatgcccttcttgagttttatagctcccgccattagcgtatgtatcaaccatcgaatcttcttctagtgagacggcttcttcttcttctaagtcctcttcttgctcgatttggtcttgatttccctttcatagtgatttatgcattccatgcaatggtgtcctatgatttaggtggcttaaagcatttttaaaacatgtgacctttaatacaaatatttgggttaaaaaaattgtattcaaatattagaaaagtattgaaaaattgttgattatttttaagaaagtataaaatattctacttcttataaaaactaactttctaaattattgcagcaaatatattgatttattgaagacttttttctatcaaaacattgatgtacttaaccagcggatcacacaagtaattttaaaattatggccttccgattattaattttatatttgtggcctaaaggaagtgcttcacttgctttatggacaggccaggcctgattccatgagaggaggcaaataatcattagatcaaaatagtcaccaaaacatccaaacaaacttcatatatgttgcatcaacaacattaattaaaactgatctctcttcctcttcccattgaactcaccatgaccaatcttctataacaaatataatatctatgttatttcggcaatgatccctgatatatatactagtgaagtatatggagtttggtttgatagcattaatgttatgattagcatgcataatgatacccaagtcaacaaatatagtttaatcaccgaaggaatgcacctatcagcaaccgcgtagttgtgccgattttaattagaattcttcttgtagatgctgaaactttcaaaaaaaaaaatctgtaagtcggatgataaatcaaggaatcttattttagcatcgatagttacaatgtctagaaggtaacctcggaaaatataccttgaaaatccttggtaacaccgtaatgtagaggaatgtcagtataatgatcatcacctttcttgcaaaaggctaaatatgtgtcaaagtaattgaagaaccgcactacaacgaactcttttttttttcgtctccgtacccacaaaagactcctcaaaatttcggtgttcactgttcagaatatcttacttctgtttatcgttgactgaatcttaaaggaaaaaaatattattactaatattatttttctcttataaccaaagtgtaatccgcatttttgaccacttgactagtcctccagtgttgttggatatgggcttcgccccaacaacatggttaaagcccaacatatcgtaattggcaacgagggaggaaagaagagaagatcggcccgtttaaagacgaaagagcccaacaccagacgaagcccaccttcagggagctgctggtcaggagagagtcccaaatcgagaagaaaattgtactatagattgtccttgcagtattataaatactgacaaaggaatgtcaggaaaggacacctgaaatctgcagagaaaagcaatagaaacttctcattctgattcagaaacataagtctaattttgacttgtgaagtttgtatttatgttaagagatcagaaatctaatctcggttgtagaaatactctgtaaacggccgaacttcagtgatattaataaagatcttccttcaggctcgtcatttccttctttggtttagaggttcggtttatacaccaacaattggcgcgccaggtaggggtctaccacaagaaaagaagaagagaaggccaaggaagatctgcgagaaggaaggatgccgcgaagtgaaaatgaaagtgaccgtggggagtttgtggaagacaccccagacaggatccagcatgccgccgtcgctccaacaggaggtgagcagggcaaagacgcgacgaacccgatcgaggtcaatcccgtggagaacgaacccacactcaacacaccaacgccgaccgtgggattggagccaggagtacaagggatggaaggacgcccagctctgactccaccagcaaggccagatgatccaggagcattgatgcgtaacattctggcgcaaattcaagctcaggatcgaaagaatgtcgaactgttcgacgttctcactaacgcttacacggacctccgaggtcaaccaacagctcaacattcggaaggattcgcaagcgccatgcgccgagcaaataacacaaggccgagcggtctaaatgccgttggacgtggatatcaagaacgatctcaaaacgaggaaatttaggagctgagaagtacaattcaggcgatgtcccagaaagttcatcaggcaaccagctccactcccgaattagagcagatcctggaaaaaaaccagaagacgccttttgccgtgcatattagtaatgtctcagttcggcatgataacaagatcaagttaaaaagttatgaaggtaacacggacccacaacaatttttatcgtctttcagcgtcgccacacaaagagaccatttccatccgagcgaagctgaggtcggcaagtgtcagttattctccgaacatctcacaagggcggccttgaattggtttttcgacctacctgctaattcaataggaagttttctggaactttcaatcgccttcctgaagcattactccatgtacatcgagcgcggcacgacacacgcagacctttggactatggcccaaggcccaaaggaaccgcttcgcaccttcattgacaggttcaaggcagtcgtttctcacatcgccgtcccggatgaggcggccatctcggcactacgcaacgccgtgtagcatgagtcaccctttcgcgatgatttgttgttaaaccgaccggtgtatctagaggacgccctccacaaggcgacgcgctatatggaaatggaagaagaaaagctggccttcagcaagaaacatacttctaacaaacagtcgaaggaaaaagttcaagatgactactgcgaaccccgccaacactacaaccacgagtaccggcaggagaccgaaaggaaggctgcatcgtatctcgtaagcgaggcagacccagttgctcagccagccaatttcgataaggctcggcgaacagatgaagagaatagattggatcaatattgcgatttccacaaacgatctggccattccaccgccgcatgtcggcacttacaaagtatcctactgaacaagtacaagaagggcgacatcgaggttcagcatagacaatacaaaagccataacaatacctacgcggcacgtggaggccgagatggcaataacgtgttccaccgtttaggtccacatactggccgtcagcaagaagcaccaccagctaatgaagaagaacgacatcctgacatggaaccccccaaaaaaaatcgagaaaacgaccaacaacataacgacgcaccagttccccgccgaagggttaacatgattatgggaggtttaaccgcttgccgcgactctttccgatcaatcaaggaatacattaagtcaggggctgccactttatggtcgtcacctgcaacaaaggagatgacccccctaaccttcacctcagaagatcttttcggcgtagatctgccacacaatgatccgttggtaatcgagctccacatcggagaaagtgaagtcactcgaatcttaatcgatactggaagttctgtaaacgtcgtattcaaggacgtcttgcaaaaaatgaaagtccatgaccgccacattaagccatcggtccgccccttaacaggtttcgacgggaacacaatgatgacaaacggaacaattaaattgccgatctatctgggaggagcggcgacatggcataagtttgtagtcgtggataagccaacaatctacaatataatcctaggcacgccatggatccacgacatgcaggcgattccctcgtcatatcatcagtgcattaaaatcccaacaagcatcggcatcgaaacaatcaggggaaaccaaaacttagctcgtacgtgtttcttaattgaatgtaaacttcgaaaggagctggatttatagcaattaaaggacgccgagctcaagggaacagccgaaccgactactaaaaagcgagcttcagaaatcagcacgatgagcccaaacctaagagaagggcagaaaaagaaaattctcctgccagagagctggtaatgcaagttaacatcgatgacttaaactcagagcgatgcgtagggatcggcgctgacctcgccgaggatataagggtcgagctcgtaaaatttcttaagaaaaatgtcgcaacgttcgccgggtcaatagatgacatggtcggcatagatcctgaggtcgcatgtcacgaattgaatgttgacccaaccttcaaactagttaaacaaaaacgacggaagctcggcccggagcgctcaaaagctgttaacgacgaggttgataaactcctcgacgctggctccattgtcgaagtcaagtatcccgaatggttagcaaaccccgttgtcgtaaaaaagaagaacgacaaatggagggtttgcatcgatttcacggacctcaacaaagcatgtcctaaagatagctttccactcccccatattgatcggatggttgaagccacgaccggcaacgagttattgtcattcatggatgctttctctggatataaccaaataccgatgcataaagacgaccaggaaaaaacctccttcatcatagacagaggaacgtactgctacaaggttatgccgttcggactaaagaacgttggggctcgttatcaacgattggtaaaccagatgttcgcccctcagctaggaaagacaatggaggtttacattgatgatatgctggtcaaatcgacaaggtccgcagatcacatcgaccacctaaaagcctgcttcgaaacgttgaacaaatataacatgaagttgaatccagctaaatgtttgtttggtgtaacgtccggcgaattcctaggatatattgttacaaagcgcggcatcgaagcaaacccaaaacaaatacgagccatccttgatctccaatcgccgcgcaacaagaaagaagtccagagattgacagggcgaatagctgggttaaacagattcatcgcgcgttccacggacaaaagtttgccgttctaccaactgttaaggtcggcaaataaaacattcgaatgaactaacgaatgtgaagatgctttcattgaactcaagcggtatttgtcacaatcaagcgaagaaaataaaaacctttactatgattttccttcttcgggttttcattatatgttttcagaatgagacgaccgttagtcaaaccagataattaacgggacataagttatttaagaaagctttaaaattcttccgttacctatatgttataactttttttttgtagacaaaaaaatgctaaagaaataaatttatatgttataacttataaacacttaagtattctaattaattacataatttaatactgttttgttttctattttattcaatcctataaattctaaacttctttccctacccaaaccatccaaatatcaaagcaaatacaagtcaaagagagatgggaaacaattcaagagctattttctctttattcttagttgtagccttatgtgctgcaattttaatcactcccggaatagctcatgatgaacaaccaccgccccgctcacaatttccaccggattttcctattgatgtggaaaaatgttggtcatcacttttcaatactcaaggatgcgtattcgaacttttgaagtcagttttttctggtcggtttggagatgttggagttgcatgttgcaaagcattctcgaccgtagatgctaactgttggcctcatatgttcccgcttaacccgttctttccacctctgcttaaggacaactgtgcgcacatcgtacccaattccccctcaaagtaacttaatgctttataatatagtcgagttagtttagtaatctaaagaaattctcctatatatgtaccaagtgccttatatatgaataaaggaaattctcctatatatgttccaagtgccttatatatcttttgttcccatttattgatattgtggtaatttattagtttactctattctgtctttgtttacgaatatatatgggaattaaagatataataacttacttagtttccatacactaaattagctgaagcatgtagattacttagaaagtattttcttcaaattggaatgcttatttgactttgcattttctctataagacaaacaaacaaaaaaataacgtttccttcaaacaatttataaaaaaatagaccgtttcaatcgaacattttgtcacctcccacatttgacctagtatcacaaaacttaaggtatgtaattctgtatgatataatttgcatttgagatatctcataaaaatgatatattatttatcgcgtattttataatgatagataaaaaaataacaccagcgaatatgtcatatttcgccatcacatagctttttaagttagtgctgagaatatatatagttacttgtagtagaaactagaaacacagttcgaatggccatttcttattcaatttatgtttgattgcagttttctagattacgattttcttttttcttggtcaacatcatccgttactctcattagtaatttatttcgtttcttgcactgatttcccatttcattttcccaacttctaaaatagaggtcataaccaaaatataataaaatttccaaatcaaaatcaaaagcttaatctattgagaaagagatgatgcgacacttctagtacttttgctttagattgctcagacctgatttctatcctagacaaccaagacgattgacccatattcgcagcggaattgacttcttaccgttctttagtttgtttttttccttctttccgtattagatttcttcctcgtaattttaatactcgaacagattatttagctaaaaaaagctcgggctcgaaatagccttttctcccatgtaagcacatcggttcttgaatagctctctctagcggagaatctcttcccgatattttaatataaatagtgtttgtgaaaaaaaaaagagatgatgacgtggccggctagatcatcgccgcaaaagacgaggaagccaaattacgtcgtgcatagcccaccgaacacagacgtagacaatatatcggccggttcaggttttaacccattcgggtcaccccttaacgatcagggtcaggtttgccacttccatcatcactcggtggccgagtcatcttcgtatccacgatcgtcaggaccattgagaaacgagtacagaagtgtccaagtgcatgatcttgaccgtcgaactcatgaagatgaagattacgatgaaatggacggtccggatgagacgaggagaacgataacgaggttttactcgtgcttgttgtttacgttggtgttggccttcactatcttctgtctcattttatggggcgtttccaaatctttctcacctattgccactttgaaggtaattgatagaagtttgatcgcttggaacgtgaaaattttacatttctttctgttttcaaaatttaattttatgaaagtataagaagaaaactagaactaaactaataaaaagagacatatcataattagtaaataaaagttcctattgtacgatgagttggttaaaaacaaaattgaaatcgttagtttaaattaacattacggtttattacgctccatcataaaaactgtcaatattatgttgaagttattgttgaaattaccatcttatttactgcaaccctaattttgttattatattaacatttaaaattgtcactccatctaaacgacaagtggatgtcgtaacgaatcagagtccgaatgtagtttttatgtaaataaatttttaaaaccaacggaaacatcctaattaatagagaatatttcaaaactaagtgaataagatttctttttatcctttttgtgagatctatatatgctaatctagtgttgatcaatataatataaatgctaatgttattatatttgagatcttcactaataaaagagtactagatcataacccgtgctatacagcacaagcattaatattttgtataaattaaattgtatattttgtttgaattacataagaaatagtatagtataaaagtgacgccataatatttttaatgtttttactatttgcatataatctgcattggattgactttgtttaaaaatgttatttttataattaatacaacatatgtagttttaagtaaatgtgtaaaatttgtatacatgttttctttgtattagaggatctaatttttggcctaacttagaattagtctttatatagtattttggttatatttgtggacctaattggggcctatattagattatctttaatagggctgacgaaaaaacggatccgataaccaacccaatacccgaatcaaaaaattgggttagggcgggttaaaattttaggaaaattccttattggataaagttagagtaaacccgtggatatccgattgttccggaaattacccgttacccaaaaagaatattcaaaaactcaaacattaatttaatatccaaaatattaattatctttaatcgtaacattatctaattatctaagattataattataaatctaaatatgtcaattaattttggacctaaatatccaaaacaactaaactattcaaaaattatttgttatgtttgtcaaaatttagtaaaatatattcaaatataattaaatttattaaaacttaacaaatttaaaagttttttttgtttggagacccgctatctacatacaaattttccgtttctattttttgggtatttttagggtctaaacctttttatccaaactgacccaaacccaactggatccaacccaaaccagaaccgaatatttagaattattctattgggtagtaaatcatatacccattaatcccaaacccaaactcgaatgggttactcatatgcctaaccctatttctctgatttaattatctaaaaactccaaaaaaaacatatgttttgctgactactttttattcaaaaaattttacatcctcttctgccaaattcatttcataagacatcccaaaactcttgcaataatgattctatgaatgaagaatcctaatttgaatataccaagagattttgaaaggttttaagtttttgataggtatgtatgtgagaaggtacagacatcgtgatggtaatctgtttatttataattttaacttgcagtataccgcatgtatgcttatattttagctaaactaaaaacttttattgtaaagatgattataaatatatgatattattttatttgattttaaatgtatagtaaactgcgagttgtatatgttttgttgatattcctactatattatttgggatgtacattttaaatataaccttattttttgtaagtaattacataggtatgccattagaaataaaatttaaagagtaaattaattcttctcttaattatagagcttattggatttaaagacgggtcatcaaagatttcctaaagggcttattggatttaaagacgggtcatcaaagatttcctaaactgaaacaaaatatactgaatattcaaatatatatctgttaccaaattataaacaaataagttcgtaaaacaatttaatattttatatatgaaatcaattaaatcttaataacataaagattagcacaaaaaaaatattgtacattcgggtctatagtatttttgcaagactttttggtggatttgggtaaaagtgcattcgggtcatatgaaacattcccctattaaataaatatggtgcactcatatgttattagctaaaatgtttaaattataattcagagtcatatcataaataaaattaatattaataaaataaaaggctttttggcaagacggatttggagagacgggtttttgaatcaacattaataaaaagtaaaatataattaatccaccgtttcaatacgggttaaatctttaatttattattttttaagaccactaatattaaacatatcaaatcatcctaatttataagaaattatataaaaccaaaaatgttatgtggtatgtataatgttactatatattaaattaaaatataaaatataaatgtattagagaatgatacaatttgcaaaacttttatatataataaataatttttaaattttaaaaattactacattaaaaaaaaattcacgagacgggtaaaaaaattacagaacgggatttattttggaattggattatatggtggatgtatttgaatcaatatttataaaattttaaaatattattaatatgctgttttaataggggttaaaacttcagtttttgaacaattgtctcatggattcgtggtatagcgttacttaataacaattataaactgtaaaatataaatattttataaaaataaaatttgcaaattttaatatatattacttttaataaataaatcatcctgcggtataccgcgggttaaaatctagtatttatattgtttagtgtttaaaattatacacttgtattttgattgttaattttagagttttacatgtagtataccatcttgtattaatatcgatttaaacccgtcaattctaggattttccagcttatattaaaaattgaatcacatcaaacacataaaaaatctaatatgttattaattattgtagtatataagattataaatttttaaaataatatgtataaaattgaatataaatattcaaattatgacccagactcagtaaaatttttttttaaatctatttttgacccgttataatattttttcatgtattgaacagtttatattcgtttttaaaaattcaaattatggcatatgcgaaaaaactctaattattttttataacgatgatattattttttcgcaaaaatagaatcatataaagatgagaggtgaactataataattaataaaaaattaatatgataatttagatatcaaatctaatttgttgattttaattggttacttttttggaaattaataatgtatttcgttttttaattaaatttaattaattaaattagtatttgactttaatttttaaagagatgaattaatttactctttaaattttatttctaatggcatacctatgtaattacttacaaaaaataaggttatatttaaaatgtacttcccaaataatatagtaggattaaatctagtgctataaatttttatatatttttctaatgaaatgtgtaatattagatattatatttagaatgtctatattaaaagagtttggaatccaattagtttttgtttttgtttttgcaaaaacatgtaacttatactaaatgctaaactatctagttacttttcacacaagcatccaaaccctattttttgtgggtagacgagaaaacaaatgactacgttgttgtttggttctttgattgtgagtataccaattctgttttcttttgcatgaaaggagatgatcgttatacttacattccgttgcgttatggagtcgtggagtgtatacaacacatatatgatgtggcactccgaggtcagagtctctatattttaaccactcatcattgttatattcggatcattgatttatctggaccgcgaggttttcgagatgttggaacctcctcctccatgtcgagatgaagctgattgttattgttgttaacgaatcaggagagcttttgttagttaagagtatccttgaccagacttgcgttgataccattaggagcttccgtgtcttcaaggctcctgatcctgatatgtatcagttaagagttagagttagagtttgagcattacactgaggaggtatatattctctaggtgaggagggcttgcttcttggcttgcatgttacggtgcctggtattgaaccgaactccatatatttcaccagtcatgactctcccgattaccgtagacagaagactatgcccattgacatctgtgcactaggctctccaacatgaagctcaagactactctatggtttctccctaggacttgagtgggactttcttcttgtgttatgttctctttgaaaagcttatcaaattttccaagacaggagaaaaattcggagaactatataaccaattgttgtatgaatattgcaaatttttttttttttttttgaagtattttgcactgcgtcgagtattgatttctctaacctctcctccaagctcaagacacttggagttttttttttttttgtagatatatatgatagcaaaaaaaatagtttctttgctgttggaacaaataagactgatcaaaaaagcagcacgtatagtccataaagagctttatcatcaagaaacagaacatgcacgagaaaaagagcttctaagcaacatttagtactagacagttgtaagttacaaacttctcataaacctactgttcagtaataaatgtagagcaggattgtgatacgtgctgctgtgtacaagtcaagaaacaattgcggaagataaaccccaacaaaactgtcaggactatgtgtaccactctgatcactgatgttcttaagggtcttttgatacaagactcggtggtgagttttgtatctgatagagatggtgggttcacaagctggcggtcgcttctctcttgtgaaggaaagatggtcgatgatgaagatctaacacgatggtgatcgcttctctcgtgtgggatcgaatggaggggaagtgctggcgaattgaagtacaccacagagatgtgatgagtctctgatacagtacacggacttggccttggtgaatcgcacacataagacaaagaacaatcttattctcttaagaacacttaaagagaagaagtgagaaaatgcggttctttattgatagtcaaaggtgaaaaatcgtacaactgctgcaggcggactttataagagtccttcagctagccgtagggccgaaattaaatgtaaaaacgcaacaaggaagcaaataaaatcaaaacacaaaaaccattgtttttagaaagaaaataagctaaaataaggaaactaattaagttctcttgaggagcacggttggtgatgattctagccattgtctgggctgtgtggacctgcaaagatagtataaactaaataaaccttaccaaaatgcgttttaggcccaatagatgtcgcctgagtcatttcctgtagtacttcttgaggtacttctggaatcaagtcttgtgctcgtttgttggctggttccttgaagtaggggtctttttggagttcctcttgagtagcttgatcaatgtcctcgagcttttccacgtccttgatgtcttgttcttgatcttgactctctcgatcactttcagatgtgacacttgaatcgtccatctcttgaagctccaaagtcttctcttggtttctagaggtccttgaacctgtcaaacgatatttcatacctgggggagtagttcgatcaagactcatttgggtgaatgcttcagcaagctctaggaagctcaaaatatcttgcacaactaagttgaaccttttcttcagttgtttagcctttgaacgtgtcatgataaccttcgggacttctggtacatgatgtagtacaggatgtggtacagattgtagttcggcggtttgtgaagtaaggttgatgtccgcatcattccctccctcttcaaaaggttttgtcctcaaaactgaatctcctggatcataagtagacaagtcagcaacattaaaagtgtgagaaatttttacctcaattggcagctctaaacgataggcattatcgttgatcttttcgaggatcttgaagggaccgtcgcctcttggtgctagcttggatgctctctgtgtaggaaacctctcaggtcgcatatgtagccaaacccaatctcctggttcaaataacatttccttccttctccgatcagctttacgtttgttttcggcggccttcttttctaagtttgatttcgccttatcatgtatcttcttgatgatttctccacgtctcaaaccatcttggcaaaactgttatttctcaggcaaaggtactaaatccaatggagacaaggggttaattccatagactatctcaaaaggagatagttttgtaccggagtgaacatcacgattataagcaaattcgataaaaggaatgtaatcaagccatgtgctcatatttttaccaagagtagctctaagtaaagttgagagagttcggattaccacttccgtttgtccatccgtttgaggatgacaagttgttgagaatagaagcttggtacctaactttctccaaatagtcctccaaaagtgactcaagaacttggtgtcacgatcagaaacgatggtccttggaatcccatggaggcgtaccacttccttgaagaacaactctgcggtttgagtcgcgtcattggtcttgtcacacgggatgaagtgtgccatcttagagaaccggtccacaacaacaaagattgaatccttgtgtttaatctttgacaatcctaaaacaaagtccatagaaacatctacccaaggggcgttaggaataggtaatggtaaatagagaccatgaggatgtgaccttgatttggctttgtggcaaacaatgcaacgggcacaaaacctctcaacatctttcttgaggtggggccaaaagaaatgctccattaccttggccaaagtcttgtctacaccaaagtgtcccatcaaacctccaccatgcgcttcagtaagtatcaactctcgcattgaaccttgagggatgcacaaccgcttgtctttgaatagaaacccatcttgcaagtagaatgtcttgtaaagtcctttaccatgctctcggtagcattctcctaactcagggtcgtctttgtacaactctttgatatgctcaaaacccatcactttagcctccatagtagctataagggcatgtctcctagacaaagcgtctgctaccacattctcctttcctttcttgtacttaatcacatatgggaacgtctctacaaactccaacaacttggcatgtctcctcttaagccaagtctgacccttaagatgcttgagagtctcgtgatcggtatgaatgatgaattccttggacaacaagtaatgttgccaagtctcaagagctcaaaccaaagcatagagctccttgtcgtatgttgggtaactcaatgctgctccacttagtttctcactaaagaaagctacgggcctctttctctgatgtagtacagctccaattctcaatcctgaagcataacactctacttcgaacattacttcaaaatctggtaaggctaagaccggtgcttgcgtgagcctctccttcaacgtgttgaaagacttatcttgaggttctccacatgagaaaggcacgttcttttttatcacaacagtcattggcgcagccactatacttaagtctctaacgaaccttctgtagaaactcgctagtccatggaaactacggacgtgtgcaatagatattggagtaggccattcatggattgacttgatcttctccttatctacttgtagtccctgtttactcactacaaaacctaagaacacacacttgtcaaaacaaaatgtgcacttctattatggtcgcggaagcaaatcaaacaaattgcaaaataatacagaatagcaaaactgaaactaataacaaactaaacaaggaagatttttttttttttttatctattatggtcgcggaagcaaatcaaacaaattgcaagaaacaaattttcattttagtttttcgatttaaatgaaacaaaataaacaaaacagaaaaagataaaggttgaaatgaaacaacctggtggggataggagcttttagctctgataccacttgatacaaacacgggaatccacccaatgcttttatcaacggaagcaaaggttcgaagctttgatggtcgatgaacgaagatagagatggaagatggaggttttgttgaatgaatccacaatcaacacacgaattaaacaacttgaatccacaagttattcagcccgcaaatcacacaagagaagtgaatccacactcaacttgaaatgacaaaacacaaagacaattctttgtaaaacaaacttaaagtttattgagataatttctaaaatgattggtgaatacaaatgaaatcgagagagagcttatacagaagctctagtacaacggctatataccaaaacaaaggaaacagatcgcaaacaataaaggaatagagccgttagaggctttatggtgtaatcggccaaataaggcaagtgtagccttaatttgtatctaaataactttggaagaaatgtgcggtttcttggaagctttaggatcacttggatgcttttaaaaacgcaaacttttagaagaggaaagagtcgttgaggtgtgatctcatgcgaatccaaaataggaaagaagtgactcaacgactcttaagtgaggtaaggtgtagcataactcgggtggggaaccttatggaaagtttggagtgtcttcttgattcccttacacggatcattaataagggtaatgtccctttccttatttggcatcgaataatcttgtacgaaaagtacttcagcaagtccttcagggagtccttcagcgaaaccttcggtaagtccttcagcgagtccatcagcaagtttgtcagttccagtaagatcaatgttggtattgattcttacatcatgttagtttgatatcttggttctgttcacgcagttctgctcctcgtgcacggtttctcatcaatggatcttctctccgttggtgttggcgtctcaatggggtcgggtggtggatcatcttcatcatccaagtcaggaaactcctccgcctcctcgcgggcattcctacgagcctggtcatgcccccattcaaccctgggatggggctgcttcaagcggcctagccgttgccttaatccccttaactcctccgtcaaagtagccatcatttgcattacggcgttttggggaatttctgttgcctctgccatagtatatgcctaaaactgacctgtgcttagacaaaaacacaacaaagaaatcaacataccacaacaatagaaaaagaaagatcagaaacaagaaagctagaacttgttgaatcacttcctgacacacttgctcatgtagtacaaagttaacaataatattttatttttttgattgatattacgaaactcaaaaacaaatacttaacacgaaataaactgaatttgattttttttgtttttttttaatttaaataaaacagaaactagactaatgcagaaactaattcagaaagtaaggcagactaaaagaaacgatgaaacctggcaaggaagcgcaactgcgctctgataccaagatgatacaagactcggtggtgagctttatatctgatagagatggtggcttcacaagctggcggtcgcttctctcttgtgaaggaaagatggtcgatgatggagatctaacacgatggcgatcgcttctctcgtgtgggatctaatggaggggaagtgctggcggattgaagtacaccacagagatgtgataagtctctgatacagtacatgaacttggtcttggtgaatcgcacacagaagacaaagaacaagcttattctcttaagaacacttaaagagaagaagtgagaaaatgcggttctttattgataatcaaaggtaaaactcgtacaactgctgtagggggactttataagagttcttcagctagccttcgggccgaaattaaatgtaacaacgcaacaaggaaacaaataaaatcaaaacacaaaaaccattgtttttagaaagaaaataagctaaataaggaaactaattaagttctcttaaggagcacggttggtgatggtctagccattatctgggctgtgtggatctgcaaagatagtataaactaaataaaccttaccaaaatgcgttttaggcccaatagctgtcgtctgagtcacttcttgtagtacttcttgaggtacttctggcatcaagtcttgtgcttgttttctggcttgttccttgaagtaggggtctttctggggttcctcctgagtagctttatcaatgtcttcgagctgttctatgtccttgatgtcttgttcttgatcttgactctctcaatcactttcaactgtgacactctaatcgtccgtctcttgaagctccaaagtcttctcttggtttctaggggtccttgaacctgtcaaacaatatttcatacctgggggagtagttcgttcaagactcatctgggtgaatgcttcagcaagctcttctttgggtattagatcatatctggtatggggtgctacggaccagtttactcataactgtagggagctcaaaatatcttgcacaactaagttgaacattttcttcagttgtttagcctttgaacgtgtcatgataccctccaggacttctgctacaggatgtagaacatgatatggtacaggttgtagttcagcggtttgtgaagtaaggtttatgtctgcatcatcttttgtgggtagacaagaaaacacaagactacattgttatttggttctttgacgcacctgccagtcgtgtatggttttgcaagaaaggtgatgatcactacacttacattccactactttttggagtctcctagaggttacaaaacatatatgatgtggtactccgaggttatagtccactagagcatgtgtgttcaaccttgcaacaaagaaccttaaacgcttccctagtctctccaatatgaagctcaaggttgctcgtgtgttttctccctgtccctccttctacttgagcgtgacttcgttcatgcattctattgttcttgaaatttccagactttttcctctgttattttctctggacttttcacttttgaaaagcttgtagaacagattctctataatatcataatttaagttataagaaaaactatatcctatctagttccgaaaagataatcaacaaagagactcatatctctaacacataccagaacggagttcctctatctctatcaacaagatattagactgtggggttccaacttaaaaccaattggcaatacgtggagtgaccctaaccctttatatactaagattctactcaacttcagatgtaggacaatatccctaatacaagacacacatgaacttgacatgttgatgaacttctggtattttatttagagcaagtaattattttagtgtttggaataaaattattttatttcatgctctaaggaagacaatttatacacaaggctagagaatagaagaaaacacgcactgcatcagctctaactgtgaagcaagatccatgtgacattcccgccgtcatcgacaagaaaggaaaggatccatgtgagaacatactcgactttgaagctcccaaacagcttatatggagcatggaactgtaaggttgtcaataggacaaacctttataatgatgtttcaaaggtaatctagaaatgacataatcaaaaccctcaaagtgaatcatacttttgttggtgacttgatgtccctgaaaaatttagaacgaatactccattgagcaacccaagtacttccgaattgtattagagacatatttagctgaatacaatgccggctcaatattttcatgggctctagggcaaatgttttttgagtcttaatgtaaatttttttaataatatttttttgctataaagaaattttgtatgataattctattaataatttaattaacaaaaacaaaaaaaaatgcattcaaaaatattataggttcattctaaatttaatttttgtgttatatctaattttttaaaatatttagaagcaaaaataaaataaaaaatgtgtctcttaattattgaaacataggattagacacttggccgtcgcacttctcgcccccctatctgagcctgaatacattacctgcaatttatacaattaaaagtagcttaatgcctcaaaaatctggctctctttatctataattggagaaacaatctcgactaaaaaaagaccgatgagtttcaggattattaacacatacaaaaacagaagcataatcagaatcataaagagtgcccgtacagaaatccttcttccactaaaccaaaatggcaaaatcatttccagaattttgccagttccgcgaaaaaaaaaaaaaaaaggccccagagcaaaggaaactgtgtaaagccccaaaaacagaggagaggtagagaacaggagaacacagagatttctgaacccgtaatctatggtgatagagagcggaagcttggataacaagtcaggaaaccctaataaaaggaaaaatatataaataaaaatttggtcgactacagagacggattagaccacgacgaataagagtcgtcactcaagcgtcactattgtacggtccccgtgaaatcgacaagggtgcttcacattggtactaattttggtttcggttacagtttggtattatatttcggaccaaagactaattaacaagaccaataaccaaagcctcaggtgctccaacactagacgcatcaccataccttttacatccagatgatcaaaatcacacgaaatcaagtgtctttagctacatgcatacatattaaagtgaataagatagatccagatgatagaattcacactaatcaacgaactagatttttcccatttcgtgacaaatcgaccatcataagttacaataaagtgacattgttttgttaagattgtcccttctctttatcacggttgtcatatttgatcaaaactaacatttgatttttactaatttcttaaaaaagttgtaagaataaatgcttgaaaagaagtgtagtggcataacatgaacatgaggtaataatatgcataattttattaggttttgtttattttgaatattagtaaagaaaaatgtttatcagctacatgaagtataagccaacacatcgtcacacatgcagactttaaaaatgtttcgttagctacacaaagtattgatatcacatacgcacaaacacgaacaaacataagtcatgttgccaacaccataaccatcctactttgatgctacggtcatcggaatccggcattgaccaatgttgaccagcgttgaccgatgttgaccggcgttgactaaaaaatatttcaatttttttcattttttaataaacaaataaaaataataatttattacataaatttaacaaaatatacaacgaataatataacaaatttggtatatattttgaacttcttaatatatataaaatgtaaaggtcatatattatgatcgtaaataaaagtatatctttatttttaaaaataaaactaaccataaatttataaaaaaagaaaaatgattgtcaaaaggaagaatttctctatagagtaatagataatagctctcggatcctcattaaatggtgagtgctaacaaaaaataataattttattgggtttaaccaatactcaaggatacggtgttacgtctattcagctatcaatctcttgtgagaaagttgatttaaaacaagaacatttaggatccgaatggtgactgtgttttgcggtgcgggaaaagtgcggtgcggttcaaataataacgaaactacatagatacatatgtatatgtagagattttgatactgttactacactgttgcggtgcgattttggttgcgatttttgtcaccattcggagccttagtgttcggttaccatgcgttgtgcaagacaatttatgagttatacagtactctttatctaaatggaagcaaaatttgcaaatatcttattatacccacttatccttatgataatggggagcttttgtaaaattattaaaactttctaagcttatcaaagtataataagattagctttatttatttcatcaaaaaacaaaccagatatcaaatcgccagtttactattgatttatatcatttcttacaacaacatttaaaatgtggtgataaaccaatacatcctccatccgagtaccccctgtctatacacaatggcttgcatgcatcatctaaaaaagttattgaacattctacaatgcaataatcatatccaaatccgttgattactgcataaatacaaccaagttaaagaaaaataaatatatacgcacatatatacaaataaatcggttttaggaaaaagaaaaaaatattcaaaaattactctgttaaatgatcaatgatagatgaccaataacaacatacccgatgaaggcaaagcattggagttgcacaacgacgttgctagaagaataaaaatcacaaaaacttgtgtcatagccattattttcttccttatggttaataattctatgaaaaataagaagtccgatatgctttatttatatgactctgttaaagaggtttgaaagtaaagagatttagaaaaatagaaaatcctacacttgtaaagtttgagaagactctcattaaatagaaataaatattacaataaataccataaagtatatcagattcaatgcaagatttctgactatagaaaattaatgttagataagtatattagattcaatgcaagatttttgactatagaaaattaatgttagataagtatattagattcagtacaagatttttgactatagaaaattaatgttagataagtatattagattcagtgcaagatttttgacagaaaattaatgttagatgtaagttgaaatgatttttgccccaaaaaaaatagctgaaatgacaattatataaagttaacttttgagtcaaaaaatgaaaaatcctacagggcatatacaaccaattttttttttctattgtagctttagaaaacatagcttggttgataatttatttttattgtagaagaaaaattaggctttagataggtcctacctcccaaccaattttcccctttaataatataaagactacaatctatatctatattattaattgggaagcattttgtaaactacaacattgtgagggtagtttaaaattaactaaataaatttttacataggcaatttagtaaattaactactactaaataaatttagttttcataaaaatcaggctattgatttcaaaattgtatattttggtaatatattttgagatatttctggaaacgaaaaaatcaatttaatatcatcatatattttagattttaatatatttccttaagaaactatactaataattttaaaaacatttacaaagataaataaacttatttaaaacgaccaaaaataaatatacttataagatattttcatatattttttttatcaatacctaacaaaccaataatatttaaaacaaatatttatatattattatttcttattgtaaaagataattagatcaaataaaaatagtacttaatggtcatgatcttcatgtttaaaataatagattgctagattaaattggaaaaaacgaattcattgctttatataattaaagaatccttaatatatcaaacctacaaaatgcacatatatatatatatagcaaaatcaacactattgtaatatatgtcaaagaatttaaaattatttatggtaactcaaatagattttccttttttgcaatatcagttttttgtatcttactttattttaaagatatgccatagatatttttatccttaattttaaaaatcgtaaattgcttattaacatttttaatagaaaataaaatttttaattgattaataaactcgatttcgtagtctttatggttttagatgagcaaacttttacgagtataacttgtcgaagatgtttttcttctttccaagcaccaatttaactgtgttgtatgttttttattattagattatagatattgtgcggttcacaacattagatatcttgtcataaataatattttatacttttctatgttcattataatttatacattacaatataaatcacaaaaataatctatattttaaaaaaaaaaattacaaatatttttttaaaaatatgaaactccgcatgtacgtctcggtcatgataaagacagaggatacaaactgggtttacattaacatgtattttggtacaaattaaaaactttcggcttgaattatgagccactaaaataatttttgttagagaagttttttgagttaccaaattttaatttataaactaattttgcatagaaattttacactatttaaaatctaattttcacaaatatatatttctattataagtttataactattagacttctgaaactgttcaaattatttgttatgcaggaagaccaaactatttatataaataaaatactaataaatgatgcaaaaaattttaaatctttaaataactaaagtttctattcaaatttcaaaactaataaaaaacagaaaataaacgtgtgtaccaaagtaatgttaaagacaaaaaaaaaaattccaatgaaatgttactattatgatatatatgctattatataattcactgaccccaaaaaaaaaaaatcttaattaaaactttttgaaaaaatttacattaccttccacacatctaagtaattgataaaattcactagtacaacttaatacaaacttttatcaaaaccatatgataatacttacaacccgcataatgtgcggttcacaacattagcttatgtcataaataacactatacatttttatgtgtacattataatttattcactacaatatcttttactaaaaatttattctaatacattttttaaaatatgaaatcccgcacgtatgtgcggctcagaatctagtttgtttttgctttttcagtcaactataaaattgttgtatttcgttttattctatagatagttttgtaaaatctggattgttgaaaaattaacaaattggtttgatttgtatgatcttatgtttatttaatagaagattgataaaaaaatatattttgtattgactatttattttatttatatgtagaatactttaatcatggtttagaatggagtatttaattttaggaaagtaatttttgtagtttaaatgcattaaattttagttgatagattaagacaattgttcacagttatttgcaagaattaacattagaattttgaaattattatttttggaaaaattaggattcttcagattgtttagaaactgctgttagtataatcaaaatatttcttgtataaaataaatctattgtcaataagatatagtcgaattaaattaaacaaagtaagaaatttgttgatttcacacgtagcacaagtgtttctcctctaatatggtaaatgatttgttttgttaggaacaccatacacttgtgacttgtcaaataatataattactatatcataacccgtgctatacagcacgggcattaatattttatttaaattaaattatatattttatttaaattatataagaaatcgtatagtataaaagtgatgctataatatttttcaatgttttactatttggatataatattgcattggattgactttgtttaaaaatgttatttttataataaatacaacatatgtagttttaagtaaatgtgtaaaatttgtatacaagttgttttggtaagaaacatgtttcctttgtattagaggatctaatttttggcctaacttagaattagtctttgtatagtattttcgttatatttgtgaacctaattgggccctatattagattatctttgtatagtattttggttatatttgtgaacctaattgggccctatattagattatctttgatagggctcacgaaaaaacggacccgataaccaatccaatatccgaaccaaaaaaccgggtcatggcggattagaattttaggaaatttccttattgggtagagttttagtaaacccgtagatatccgattggtccagaaattacccgttacaagggtattcaaaaacccaaacattaatttaatatccaaaatattaattattttggacctaaatatccaaaacaactaaactattcaaaaattatttgttatgtttgtcaaaatttagtaaaatatattcaaatataattaaatttattaaaacttaacaaatttaaaagttttttttgtttggatacccgctatctacatacaaaatacccgtttctatttagggcctgaaactttttatccaaactgacccaaacccaaatggacccgacccgaaccagaaccaaatatttagaattattctattgggtagtaaatcatatatccattaatcccaaacccgaacgggttctacccaaactcgaataggttactcatataaagatgagaggtgaactataataattaataaaaaaataatatgataatttagatatcaaatctaatttgttgattttaattggttacttttttggaaattaataatgtatttgtttttttaatttaatttaattaattaaattagtatttgactttttaatttttaaagagatgaattaatttactatttaaaattttatttctaatggcatacctatgtaattacttacaaaagataaggttacatttaaaatgtacttcctaaataatatagtaggatttacaatttatttcgtaatatatattgccaaacattatttagttttctataataaccttattattaaaaatatctaaactcatttaacgaatttttaacaataggtgtccacattagtaaactataaagatttggaaaatctacttagataaattcaataatacttaatatacaacaaacaacatacaattaatacttaatttacacatgctaaatgtacatttaaattatgcctctggaatagattacactgtatatatatatatacataatatttagtaaaataaaaatctctaaatttttagcgaaaatatcatctcgcagtgtaccacgaatcaatttctagttctaattaaatttggaatatgtttagttcacaattatagcttagaaagtcttaataatttcacaaaagcttagcattatcaatgtttgatgtgtgttgcttatagcatgaaattgatgctcagacaattgatgtttcgattgatatatgctcaaccaaatcactttcacggactatgcaaaatcgcggcggctcgtctgtctccaccacttatttgacgcctaaccggctgccttgggcgatttttagaaccttaaaactatacatccaatcaaatttggacacgtgtccgtctctctcatattctcaaacctctattcacagagacgcctctctcattttaattcagttttgattaatttttgatccaaaatttcaagagaattaacctaccaaaaattgcattacaacctcccattggaaatgctcttagtgtctgacatgttttctcttcttttcagttttcttgtcgtttttacgatgtttcttcagatagtcctttcttatcctcggaccatgctcgttatctgagtcttgtgtcaatgaaggtggtctctcgatcggagcccaagactactttccgttccctgttcatccatcataggaccaatagagcctctgcctattatttacaagagagtcacattaaagttttttcatgtgaaggaaaatgagggtagctagcaaactcatctgctaggtaaagagtgtgaaaggacacaccgtgattggagaaaagtctcaatgtcatcatctcctaagccttcctcatcttctgaataccatctcttgtttgatgactcacacgtaacctttttctcatcaccggagctgaatctcttatctaaactccttctcatgaaactaccattctgcttcattcggctactaccgctttcctctcgtgattttccatcttcttagtcaagaaacagaacatgtaaacaatatgcttttaacaccttctttctcagctttccttctcaattctgctgcttctctaaatagaattgaacctattcgattctcagtttgaagatccatctcctaaatcgattcgttaaagttagtaaattcaagatccctaaagctttctaaccacaatcttgtggaaaagatttgatctttcgaatgtgagacgagagcaagaaccaacaatctaaaaaacagagaataacataatttcttacgaattgtggactaagagaaattcaattaccagtaaaatcgaatacttgacgaatcaaagcttcacagagtcttgcggcggacttctccggtacgcgagcacagatcaccaccaaaggactttgatatgtccatcgaataagaatcgttcaccgaagttttttagtaaaccggaccaaacccgtgcaataaattgaataaatggcaggaatgccactatctgcgaaaaagtaaccaggaatgctactcttctaattcccattttttgtcgaaccctaatttttaaaatcaaaccgtttctgctctcattcaattcaaattttccaaaatcaaattcaaaattttctcgcctttcacgattttccgacgaattcttgattagtgtaatagtttgatggctcgtgttagagacggtattgctggccctgtatatgattcgacggagaagtcgtcgtccggtgaagtttcgacatcagaaccagttacttcagaaattgagaacgagggagatgccgccgacttagttccgaccgaaccagcaggtccgacagaaccagcagcacgagatgttgcggcgaatgatactacaaagaaaccgctgaaattgaaaaggctatggaggaaccgcgtgttggtgatgaggcttctcctaaaggaaccgccgaaattgaagaggatcagacagggacaactttgaaacctctaattgacgctgtcattcaacaattcgaagaagcgaaagacgggaatggggaggagttggaggaggaggaaatggtgaatacaattccaaaagaaggggtagaaaacgttaatcgtcaggtatatacaattgaatctctatgacacatttttgttttgtttgagtattagttctcgtattagttagaaatgttcaactagttcatctgtgacacatgtttgatttaagtaatttgatggaactagttcaattggtacatataaattgttagtttggtacatatgaattcttcaattggttaatgtttattgaatttggaggatacttgtgaggccgaggatgatgaggtttctgttaaagagacagaggaagatgaggctagcaatgatggtttagaggatgatgatttagattctcagccactgccgccacagaccatgcattttcttttttcagaatacggcaaagtgtgcaagataagcagtaggtgccacgtcacgcagacagttgaattgatagagaggaagtttaaagaagaagttgtatggttcaaaagacacgatcagttcaagcatatattccacatgcctcaggagcctaaccagtagacgcaaggcatgtgggtgcttatgctgcgcacagtgaagacagatttgctcgaggaggcttggtttgtggtaaatggagtacctattaggtattccattaaagagcatgtgttgttaagtgggtttgattgccacagttacccaaaagaactgaatacaatggggaatattaactttgtgaagaggatatttaaaaaagaatctgggataaaggttgtagatgttcttgctaagtgctcgaagatgaagcatggttcagataggttgaagttagtgttgttgtacttcttggtcaaggtagtaaaagctggtgcaaagaatgatggaaacattgaagagtttctattaaggattattggcgatatgaatgcgtgcgagacgtttccgtggggccgttattcctttttggaatgtatggcaggaataaggaaaatgatgaagaacatgaatggtttcgtgaaaccaaaagctcaaccttgcttcagtggattcattgtgcctcttgaggtaagtaatttatgatcattatatgagaataaggtctaatgtacaggttttatgatattaacattgttttgttatttctagattctggcttatgaggctattccacagcttggactgaaatttagagtccttgtacgctccgctttgaatgattgtccaaggatgtgcaaacataagtttaaagaatgtagcatgaaaggtgtcccgttggaagttatatataaagagcttgggaatagtaaggttagagtttctgtatttacttgattgtgtgtctagtctatcatgagattgattgattgctaaatgaatttcttttaacaggattttccaagcattttggtacctgcctatcatgagaaatatctgttgaaagatctcttagacgatgatgttgatgatgactgtggtccaatagatattgttattgacagttagagagagcgactattagtagagaagaagaggatatggtggaaaggaatgtgtgagatggacatttcttctcgatgtattgtaaatgatatttcagatgaggaagtccatgagattgagaatgagctccccgagaaagatgtccctccgactgttgtccctcctcgattccctgatttagatacagttgtgacatctataacctcactgacgcagatgatgaccaaaggctttgatgaaacaaaagataagattgatgtcattgatgtgagagtgaagtctattgagttatttgtggcacatctgaaggaaagggaacatgggaagcaaacagaggaggcaagtcaacatgggcatgcaacagacgatgacgtgttatttgcttcgccagatggttttgtgaccaccggcaggatgcaacaacgggatgtagtgatctacagagaacattctccagaggttgcagaaaacagtaagtataataattaatgtcagttgggtataaaaatgtgaatatatgacttaggttttgttttaaaatgtgtgcaggtaataaggagacaaacacgacggagaaagaggtgaaaggaaaagcgaagaagaatggcgggggcaagaagaagcaggaggtgccacctgtaatagaaaccggaaagaagcgaacaaggggagcatcccgccttattaaaacaccgtttgtgggggatgataagaagcgtaagagaatgcggaaggcagattgatcagtttaatggtagttgtggaacaattggtttatttaaaaatgtttggcttgatttgcattgtaatgatgtttacttttgtgaaattttaaacatttggcttgtaattggtcttttaggttcaactgtttattttggttcatctactatggttcaactggaaagttactatgtcacaacggatagttcagatagttcaacactaggattatccggttcgacttattagttcaaatggttcaatttggttcgactgattagttcaaatggttcaaatgtgttcgactggttagttcaaacggttcgacctatatagttcatccggttcgactgattagttcaaatagttcatccggtttgactaaaagttcaaatggctcgactaagtagtccaaatggttcgaccaataaagtacatccgttcgactgattatataattgttagcaaaatttactttcaaaacacagatagttatattcaaacatttagattcatacattgtattcaaaacatagatagttagcaaaataaagatttaaaaccaaaatttagatttagatttatcttacaaacttaagcaaaacaaagacataatgtttattgaaagagagagtcaggaggatactcgcgtggaggctcatccactctccagtagtaacttccatcatctggttcatcgtcctcctcaatgagaattggctccgcgaaacacacataattcggtgacgatccatcgtgctcaacacaccatctccttagtggcagtggaatgtcagcaactttgtcgaaatcgtatctcacccagtctttcggatgagcctccaaccgcctcatacctctctccaggtcttgcaacttaatgagtagttggcggtgatgccttcgataagcttggtgttgattatccacctgtccaacaatagaaatgtcaatttctcgctaaatatccatcaatacaactataccaccactatatgattcacctaatataaccaacaatcaacacaactaaaacctaaacctgaaatttgattaaaccctaaacctaaccacattggcaacaacgaaacactattcttacatttaccttttgaatgaacatttgacatgcgtcatgcatctcatcggatagattcgtttgaccaaaaaactttccgggccaaataacctcacctgggatgaaatctcttggggctggaacaaaatccgaccccatatctcctggtaaaggagaccacatccacggtaccgtcggctccactgctccatgagggattacacggtgaagcggaacccccaaatgttggcggataatcccgatgtcaactaaccactcaggtgctggtggagaagaacaatccggtgatgttggagtcagagacgcaggagaggaaggcgccgacgttcttactctttgaatgctctggcgatgatccatgtagttcaccggtgaacagtttcaatttcttgaattctctggtttcgtgtaaaattaaaagcagacgagtaaattgaatagacgtgactcttcggctgtgccatctgaactttgacgccgaacgattaagaaaatgggttgggcttgggcctttcgtttactaggggttttagcatccctaaaataagtattcgttttgggccttttgccatctttaatgggcttataaattacaaagacaaaatcaaataaattttaaaaaaatagagtctgctttatgcaaaattcataattcaaaattcgaaaaggcaaaaacgatttcaatccctaaatcgaaaaattcgaattccagttccgaattgcaaaattgatttagggttttgtgagtgccttctctaactactccgatgagttcaagttcagtgtcagtgtcatctggtgttgacggagcccgtggttttccggtgaaatgtgcgtgtggagcagatgtgacgatcttcacatccaagagtcaagacaatcccggaagacctttttccggtgtaaaaccaaaagagatccgaatacgtggacaaacaaaagagatgtaagtagagttggtgtgtatattgtgtatttatgtagttgctaaacttgtcggatttggtttgtgggttgtgcaatagggtcatttgtttaagtgggttgaggatgttgtgcaagaagaggtcgaagatgctctagagaaatttggaatcattgcaaatgagcttaacaaaatcaaatctgaggcgaaagagctacatgtgtaatgtttgcttaacaatgtgttttgtgtggctttgcttgatcaccattgccattgtttacgtaatgtttggtaataaaaagaaacaggaatttgtaatgttgtattagatctttaatatcttgtaatgactttggaatgtcggatttatgaccttattattccctgattttataatacttttgatttatgactttgtaatgttatttcattggttcgactgaactagagatagttcatctggttcgaaacagtttagttcaaatgcatctttcatcactttacactgttcaactgtatattttggttgcacatcgtaataaatcataaatacttgcatatttaaaacaaagtggttcacaaggttcatacataaatacttgcatatttaaaacaaagtggttcacaaggttcatacataaatacttgcataattaaaacaaagtggttcacatggttcaaaagtaaatacttgcataatgaaaagaatgtggttcacatggttcatacatggttcaacgagaaccacgccctcctctagctcggaggatactaatagcactcctcattgatcgtagttccttgaataattgggtctcaaggtcagtgatccggtcattcataatgcgtatcttctcgtggatgggctcgaacatcggaacttgccaagcaagaggtcattcttctcgcttgtccttctggctacagtacttcgtatactcctcttcaatggcttcctcccaccacttttgcaagtgttctccatccacctcggtcagatttagtggacgtcggaatcttgttttcccgtggagattgccaccaaccacattacccttttcaacgtctcttccacagtagcacttagtcggaatgccccaatttccgtcccgtattgcattgtagtagtcgaaaccgtcagatttctcactaggagaggagtcggagcttcctttaaaagagataggcatgtctgtcaaatacaaaatagaaaactatcaaatacttgactaaaccctagatcttgacaaaaataaaccctagatcttgactaaaataaaccctagatcttgactattataaaccctagatcttgactaaaataaaccacataaaccctatatctttaatagaaaagacctaaccttgtgaagaaatgacgtcgtttgccggaaaaatctcgtcgccggaaaatacttgacgccgctaaagaacgccgtcgtcttcttcagcagagggttttctcgaattttcaatttatcacacaagtaaatgattaaatatagatgaaaatcctcaaaacccaccaaaatctaacttgagttgataaatccagacatttattccttaagttgatatacagtatgccagctggaattatgcggtatgccagctggaattttacacatagttgtacagctgaactatcatacacatagatgtacttttcactgttttcatatattgcagctgaactttaatgtacatacttgataactatgtcgaacccaacctaactgtgatttattttgcatattcaaagttttggcagaatcatatttgatatacgaccatattcacgtaattcacttcatttgaggtgatctcatagtaactactccttatcatataagaggttgtttatgtgaacacataccatgatttcaatttttataaaaaaatatttatcaatgacactttaatagtaatagtagattttttgttgagctagtagtaaacttcaaacgtttctacatattataaaattgttaaacacattttactaagtgattatagttgaacgagctgaacctgttgtactaggcttacagattttgggaattacaaaagaaacatagaaagatttgttattagttaaaataataaagtcagattacaaatttcttcgtttatacgaataatacaaagtacccaaaaactaaaatactacataaattttatcaacttccggaatttccagattaccaaacacctttgacacggggccatgactcacaagcttcggtttagaatgaccgctcacacgccagcaaacgagtacagccacaattgccggactacaaagactctgaaagtgagcttgaaagtccaaagcttgttgattgtgtgcttcacaatagagaacttcactgctgcagttcatataaattatttacttgatcagaaattgtgaacatgaccatctgaactaggtctgctgaaccatttgaactatagcacttgaaccatcagaatagaccaagtgaaccatgtgaactatagcaatttgaaccatttgaactagagtaggtgcaccatgtgaactatagcaatttgaaccatttgaactagagtaggtgaacatgtgaactaaagcatttgaaccatttgaactagaataggtgcaccatgtgaactaaaataggtgaaccgtttaaactatatcatttgaaccatttgaactaatcccaaaatagtaaccaagtttcattataataagtgaagatggaggcacttactgttgattcattatcttgaaagaaaacttcacaccgtcgatgccttcggtcaatcggccctgccaaataatcgcacctaccgcatcttgtgtataataatagaagtaagtattcgtacaatttctcaaagaaaatactataaaattgtcaaaaaaactcaccgaccaacacatacttgttaactgtcttctctatgatgttgtcgaaaggagtaaaattccaaaacgagagtgcatccgttcgcaaagctttagtagcaatagtctgttccataaaccatatctggtagtcatgggatgttgctctcacagactcagcgtcgtttcggaccgagaaattagtgataattatccactcatactcatattctcgtattcgatcaaagtaaaatgatgcaaggcgacgaggaatggtagccttgattcgggaacggggaccctacaccaaataattttaactatatacctgcaagttatgtgaaagaaacaaaattaaacatattcgcaatatattaccgttcgatctgccaatatgaggcccaagtcgaactcatccggtgccacaaacttcttgaactccatcacaacaaaaacgcaaatagtccatccactgatagtcggacaaagttcggaaacagaatgatatccatccatgttggcaaacgacggcttcctttattagtggggtgggctcttttttttggataggatgaaatatgaatggtgtaaaatcgattgtaatcctgtcttaaataatattccaaccaacgcgacgattggtactcgcagtgccacctgtcactgctaatatttcaactaacgcgttgaatgggatgccacccgtgtttatagttgacccagatgaacttgttgtactaggtttgccaaacaacgactggttcgtagttgaacctgttgaactatgtttggcaattatgttgaactaaaaaactaaactatgcttaaaaattccgaaaacacaaatttaaacacaaaggattgttcttaattgaacctgtcgaacaatatttgacaattccgagaaacacaaatttacacacaaagactttatcgtagttgaacttcttgtactagttgacgagttaacgtcaatcatcattggtttcaggctgcaaccacctcttcaagttgatgccacgcgtagctttgttattagtcttctttcggcgcttctcacctatggatggaaaccgggtttcttgattccttcctttttttggagtgtaatccggcggttttgcgacctactccacataatcaggaggaaagaaccagtgagcctgatgcggcaccacataaatcgttctgtaatatgccaatgcccacgtctcgatcaagtaatacttcgagcaaagaccatagatacttacattcaagattgaacggctattccaatccatcttagatcgctttatggctgcaggtatagcatggacgcacaggtacttgtctatatcaaattctctgcaagaacaagtattcctttccaagtccaccaaataagaaaaaccatcatttccaattacgctgtattcttgtcggaagctgtttagttcagttgcatttagctttgcacaaattggacagcgaatgtgtaatatattctccacaacaggcaccacttgccttttgttcgatgcagacgcggaatctttgcgatgtgtgttgaaccactcagaaaatttctcaaaaatcgcatcgatcatcggtaacagatggtacttccttacttctgaaaacacagcgttcattgactctgcggagttgctagtatctatgttgtacgtgtctccctggaaatagcacctagcccatttctcaatcccagttgcccgatccagataggtggctacattaggatgctttctcctaaattctgcatacctaatgttgaactcagtcgcattataaatatgagctaatttcctaaatttggccatacctgcttctttgtcacctgccagcattttcttaatgttttgagacaaatgccatacacaatgtccatgtgatgccttcgggaacaaatccgcgactcccttgatgatgcttccatgtctgtcgcttatgaaaaccaatttcgggtcatccggtataatggaattcaactttctgaaaaaccagttccaactagcatgattctcgctatcaattacaccaaacgcaatggggtaatgatgatgattaggatcctgagctgttgcaataactaacatccctccatatatggttttcagaaaagttgcatcgatcactataactttcctcattgccttaaatccttcaatgcttgcgcccaaagcgatgaataagaacttaaacctgtcatctgcatccaattccacttctgttattgtcccatgattcagagaccttaaaatgtgcagataagcaaacaataacttgtagctagtttcagggctcccacgcacatcactaacatgtttttttttccctcttaaagctgtggagtatgaacaatccaaaccaagtcttcctttaacaatactcattatttgtttaggtttcagagtattaagaagacccggatagtcctcatgcaacacatctgctactaatcgcggtgtgcctttttgtttttcatatctagttgcctctggacaccgagagcatttatgtatttgtgtgtgtttcttcacacactaaaaatctgtgctcgaagtttttgtaactcttaaataccaatcacaacccaatgatgcttgactgcattctaacataagacggcccgggtcagatttaatagttttcacaccaaacacttcctcttttgaagctctattaatcaaatcccatactgcctccttagaacgaaattcttgacctactaaatcaccaataccatcttcccattatttgacaacggcagccacactttcttgtaccggacgtgcaagatgaacatattcttccctaacataatcattatcagaatcttcattaacctcacactctatcatcagcggttcaataacagtttcagtaactccattctctagcatcataggttcactaactgtctcacgctgttcctctagttcaataataggttcattactactcagaattcctgtatttgcatccgcaaccattacaacattggcagccaattccccataattcacaccgcatgaacttcttcgctctactattggaacttgcctattattactttccaaatcactgcataactctacatgcaaaacaggtctaaatccctctttatccaatgacgttaaatatatcaacacatcctcattatctacaatataagactctttccatgctttagatatcttgtaactcaatttcagattccttttctctccacctagagcaatctttctacagatcttatctattaaatccgcatatgttattctctccaaagatgatgtcttaaacactataccgtatattgaatttttgcaactccactcatggtctgctgtatagtaccctccatagtcaaagtgtaggttcgtctggatcctcttcttcatcgcctcctacaaatataaacaatatattagtaccagttgaaccacgagatgtaccagtatttgattcaatttcagttcgtccattcattgtattctgcaaatatggtttgattctgctacacattgattcaattcaattacattgtactaactataatacttacaggagatggaagaactaaagaaggatcgtttccagagtagtcgcagcaaagatcgataaagaatccgatccaacagtatcgactcacgtagcacgcagcaccagagaaatcgacggtcggagaattggattagctgacctagcaaagtttccccagactcgacggagccaatgtcggaagttaatcggaaatcgcctatctcgtcggaattaaatgtcggaattaaatgttggaattaaatgtctaattttgttttgtcggtttatgaaatatagttactcgatttgtattgattcaagtaaattatgattttaatttcaatctactctattatttgagacgtacgttaagtgagttggatttgagatttcgctgaaaaaaaccattttattataggtttaaattgttaatgtcatgaaaataacccgtttaaaaacacgcggatcctttttacccggatttataacttttgggtcatacgttataatcttggtcattcgattgaattgtttatgtccgttcgatttctcagcttcacttaaaaaatacgcggatcctttttacccgtgttttaaactaatgggtcatacgttataatcttggccattcaattgaattgtttttatccgttcaatttcgcggcttcacttaaaaaaacatgcggatcattttacccgggtttaaaatttcggatactcgcctctaatcttggccattgaattgaattgtttgtatccgtttgatttcgtatttccccaaaaaaaacacgcggttctttttatcctgttttaaaaaaatgggattctccgtttaatcctggccattgaatagatttattacaagccgtccgattttgtagtttcatgcataaattcatccgactatattccaggaaactaatcgtatgaatttcattcaatatattgtctatcttcgttcacatttaagtgtatatcacttctccataattatgcatgaaacaatattccttttggattttcttttagaattatcttacattttctccataattatagcacatatgatatttcgtttggatcttcttttggaatcatcttacattttctccataattatagcacatctaatatttcgtttcgatcctcttttgcaattatcttatatttttcacaagtgtttcctatatacatatccacttttacggaaatgatgaatattttcttataattatcggatttttgatatggaataaacttgaattccacggataacatcttttgcgcatattttgtttacctaaccactcattcttataaatatcggacgcctcatttcaatctactcactcatcttacactcagacaactttatttctaatttcattttttttaaatgatgcttgccaatcgtcttccatttactcccttgaaatcgctcaagccttacaagaacgcttggcgtattcaggttaaattgcttcatgtttggaggcaatattctgtaaaggctggtgaatccatcgaagtgattttggttgatgaagctgtacgtgtattatagtttcaactttatattttatccagccttatagtaggttcaagcatcattttcccttattaattattatttatattatttttgtcatatagggtgataagatgtatgctgctatgagaagagagcagatcaagaagtttgaaaggtgcttaaccgagggtgtttggaagatcattacgaccatcactctaaatcctacaagtggccaatatcgtatttctgacttgaaatacaagattggttttgttttcaaaaccaaggtctctccatgtgataccgtttctgatgctttgtttctctcacttgctaagtttgatgtgatcctctctggatccgctaactcaaatatcttgcacggttagattcaagttttcattttattttcgaacatacatgcgttatctcttatatagtcaatatattcatagatttattctctttgtctatacagatgtaatgggtcaggttgtcgatcggtctgaaatccaagatcttaacgctaacaacaagcccaccaaaaaaatcgattttcatttgagagatcagtagtacaaacaatctatattcatattcattcttatttagatgtttattatatttgtactttttactaataaatttattctttccattttagtgacactcgcttggcatatacactttggggaagtatgctgagattgttgaccaagcttgccaggagtcaaccgatagtattgttgtttgcttaatccgatttgcgaagatcaatctctacaacggtaattatattgttatgtgttactacatttctatactatttttaaaaacatgtccttttatttataaaacagatagtaggagtgtttccaattgttttgatgtttcacaagtcttcgtggatcccacattggctgagttgggtctttttaagcaaaggtaattgtatttatttgccactaaatatatttgtttctagataatattaagcaaagtatattttctttatatatagcataacaaccggtaggttaactttgggaagttcgggatcttttcacaagaggttctatgcaccaaaaactgaggatgacgatggtgattatccaaggcaaacaatcaaggaagtcctcacagcttctgatgtactgttcattaatttattttatctactaacttttttattacatttctcatattttaaacttagtttgttaattcctctttatattcatttgaaggtgggtaagtgcaaaacagtttgcagtgtatcggcaattgatacagattgaccgtggtactatttttgttgtcgtgctcacaacgagaaagttgtcaaagaggaagttatcaaacttgaagatgtcaaactacctcaaaagccaagattttggtgtgaaatatgcaatggttttgcaaaatatgttgttgccaagttagtctttatgaaatttttagattgaatgtattatgaattctaatttggtttttataagctaataatcctatttaaattttaggttttggttacatctccatattacggaccaaaccggtgaagctagatgcatgttattcgatagtcatgtaaaagaaattcttggcactactgcccctgaattgcttgatggtgcatttgatgaggtatattgcctttttaaaaacaaattttttcattaaaatgactatgttcatgttataataatctatagtttttttgtagatcgaagacccaactgttttgcctgatgtgatcaatggtttgaaatggaagacttttcagtttctattgtgcattcaaagggaaaacatatttagtggatatgattcattcactgttgcccaagtctacaccggtaacattgctgatgaaatcgttcaagaagactctgatgcatacgttgatccatcatccttaatttcgattgaacaggtttgtcaaataacattaaacaattccaatcatttatatttatattttagagttgtcttattaaaatgtttatgtattttcatatagggttcccttatactcactgatggtgttgatctttctgatgtgaatttatcgtcaacctctactccatcatcaaaacgaaaagattcagatgatgttgatgaaaatgatcaggcttccacaagtaggaataaatgttctaagatgaccatgtctgaggaaggctccgtcgattgatgctcaatgactactccagcttggatcgttttcttctttcttatgtctttgcttaaagttatcgaagttgttttctttttttaagttctaaactatctttattttattttattttattttttgggaattaataaagttaaattcattcatatgtcgttttgttaacaattttattacttaagttacactccctctgttccactaaattttatttattatatgttcacacaaattaagaaaacaactttcatgaaatattattattttgttatttaactataatattagtaatatttctctcttctttttattgtttaacaataacaatagtaatgatgttgatgcagaacatcaatctttttgaaacaataaaaaactcaaaacatcaaattttgtttattattacaaaacacattattttatattataatgttaatcatactaagaactataaacaattttgctaattttgtgttaaatgttcaacaaaatcagaattagcaaatattttgtacactaaataatcagtctaactaaacaaacctattcctatttttcatagattctcattttaataattacaatttgttgtaacacgttaagaattaaatgtcatcattatttttataacctataagaaattatattggttgtagacgattcgttttctttttacacatcaattatttcaacgaggagataattgatcaatcatcccttaatttgtgttccaatttgaacaataatatagtagaaaaactaaattagaatatacattatgtatgccttgccataatagatttagattataaattttttggttaacaaaatattttcatatatattgtttcctaatttttagcatgactatgtttatcatattatttcgtttcttatacatttagctttatactgaaaacaaatcaatattctttgttattttttcgtcgattacaatgaagaaaagaaaggataatgatgaaaatgatgtacatcaacaacaaaaaaatcagaaaaccaaaaaaagaccagacgtttgttcgatgaaccaactttagttctcgtcagttctgtttttggtagagtgtttagtgacattaccaatgtcgatcttaccaaaagaagtcaaactgctcatactcccgtgtccttaccgctatacccgacaaataataatgggagttactcacccattacacctattaattcgatgaactcaactcttacaggtagtattctcatatatcatcatcattacttctttcgactttatattgaatcatatatgtttgcacttcaaaggagacagagtaatttataatacaccaaacacatgagaaaatatagtcaatcgatctaatagctcagaagtttttaatccaacttttacaagagctgccgcaaaaactagaaaatcaggttagtaagttatatactatatgatatacaatattatcatataaatttaattataaaaataatattttatttctaaattattttttatatttatattttttactgctttatccaatacaaaaagtataccatcatcacttcgtaagaaaaccaatgtcaatacaaccaacaattatgatattgttaacaaaacacctattagaagattgtctcatgttaaaggaatggccagaaaaagatcaaacccatcaggttataattttttaatactagatacaatacatattagttaatattattatttttctttatttggttgttgttttctcagtaggatcacctgacttcttaactcctaatcaaactaccccaaacgtaaacacattgtttggggtagattactctagaaatgtcttatcggatataacaaatatatcgggagaatccatcgtctccaccattagattaatgtccaataagaagaaaaaagtatcaacagggcaaggttcgatttatatttgaaagtagctatttatgttattttttagtatgtttgtctaatgttcaatagtcaaacagaaattttattgtttaatatttttgtttgatgattgttaggagtcccccattcaacaaaattacaatcaaaggagaattctacaagtattgtacgtgacaacacactcaatgatgaagaaattgatcattctgaagcaatatattctgatagtggtataatgttaatcatacttttagaattgccacctttatataaacagtataaaattgttttatttgtgctactttcatgttttcttctgtctacagataggtcagaggaattcgatgatcatatatttgactgtagtagtcaagaagagtatgagtcagacaaagattcaccgagcgatcaggttgttgaaccaaataatatgattgacatgaaagatttgttaagaaggaatttaaacaaggaatttgctgcagcagcttcgaacaaagaggatggcagttcatccactagcggcaataattttaaaacatatattatatatattagaaacaaggaaaaacaacatgtattgatgtttgttcgattcaggttatcatgacgaaggtgatgcgaatcacacatgtgtgcattgtagtgcaattttctggtacggtgaaagactaaatagaagaaagaagagtgctaatccggtttatacaggatgttgtatgcaaggacagattgttctaccaatgctaaaagaatcacctgaatatatgtggtggttgcttacaagcgaccatccagatgctaaaaatttagagcaaatatcagaccatacaacatgttgttttcattcacatctattggtggcaaggtggatcgatcagttaaaaagggacgtggtccatctatgtttgctctacaaggagaaaactatcacttgataggcgcgttgaaaccaaaacctggcgagtatgcaaaatttcaacagctttatttcatggacactgataatgaagttgacaattgaattgaagttatgaggtaagtgatagttttaaaaatgagttttatgaaaaaatttatattttaaaggcagctaatacattgtatttattatatgtgtttcgtaattatacaaaattgcagcaaaagtaataatggtgggatgaaatgtggaaaacaaaagttcaaaaaaaaacagtttcagctttgctaaagatgttggataagataaaccctcatgttgcaaattttaggattgcccatgatagattcaacatagagaaagaagaggcaaattttcatatgaggataatatctaaacgcgagacagatggcagagtgtataaccttccatctgtagctgaagttgctgcattgatacctggagattttgacgacaatttagataaaaaagatatagttctacagatgaagtctggaaagttaaggagaatacatgaatgtcacgtttcatatctagctctttagtatccattgttatttccaaaaggagaggatgggtataggcttggaataaaaaaaactcctaccaaaacttcaaaaggaaagaagagtatgaggcagtggtttgactaccgtttacaagagagaaaagatgagaagcacatcctccttcgctcaaaacgtttacttcaacaattcatggttgacgcttttacaatgatagactctaatcggctaagatatattaaaaaaaaatcagacgaagttgcgcagtaccaacaaacaggcagttcaagatgcttctgatgctggagataatgatctttctaataaaggaaaaagttatattattcctccatctttcaccggtggtccagcttatatgcagcagaactacttagatgcaattggtacctgtaaacatttcggctttcccgacctgtttataaccttcacatgtaatcctaagtggccagagatcacaagatttgttaaagagcggaagttgaatgctgaggacaggccggatatcatttgcaggatttataaaatgaaactcgacaacttgatggatgatctaacaaagaatcatatctttggcaaacccaaatcagatactacatgatttcatatttttatacatatatttcatgaattttaatttacatcagacattaactcataattaatatgttgaaacagctatgtatacagtagaatttcaaaaaagaggtcttccacatgctcacataattgtttggatggatcctagatacaagtttcatacagctgatcacgttgacaagattatttttgccgaaattccagataaagaaaaacatccagagctatatcaagctgtctcggaatgtatgattcatggaccatgcagattggttaatcctaattcgccatgcatggaaaatggtaaatgttccaagtattatccaaagaaccatgttgagaacacgtctcttgactataaaggttatccaatatatagacgcagagatagtggtcgtttcatcgagaagaataagtatcaatgtgacaactggtatgttgttccatataacgatgtcctattacggaaatacagggctcacatcaatgtagagtggtgtaaccaatctgtctctattaaatacttattcaagtatgttaacaagggacctgatcgtgtaaccgtctctatagagcctcatcgaaaagaagttgtctccgagcaaaacaatgtaggagaaataaataatgatccacaagaacgaaatcaagttcaggattattttgattgcaggtacttttcattattttattttattttattgtaaacattcttaagagactattttaaatataaaacaatgaaaaataacttaaatgtcattttacatatatgtatctgcatgtgaagcgatgtggaggattagagggtatcctatacattatcgacaaacatcagtaactaaacttacgttccatgagaaaggcaagcaatctgtttatgtcaaggaaggtgagactgctgaatctgttttgtatagagtgaacaatgatgagactcagtttattgcatggttcgagcttaataagcgtgatccggaagcagcaaaacttttatatgaacaaatacctaatttctatacgtgaaatggtaaagataaggattttcgcagaagaaaaatgacaggttttgctattggtagaataaatcatgtacctccaaagatagatgatgcatatcaccttcgcatccttattaacaacataagagctccaaaaggttttgatgatatcaaaaccgtcgagggtgttgttcataaaacatacagagatgcatgctatgctctaggtttgcttgatgatgataaggaatatatccatggtattgaggaggctaatttttggtgttctcctaaatatgttcgcaagtcgtttgttattatgcttatttccgaaagcttgagttccccagtcgttgtatgggaacacacttggaagatactgtttgaagattttcagagaaaagtaagagataagttagaacgtccaggttagttaaatgatttttaaaaatgtaatatacaactttttaaaatgtttttttacatattttattatattcaacctaatattaatgtatatgcagaatacatattgcctgaagaagacaggattcggttatgtttacaagagctgcaaaaaaatattgaaacggcatggaacagatctttggaggtataagatgttgcttgaacctggcgatgaacctgcctttaatcctttgatcatcgatgagcgcaactacaatcgtgaatcattgaaaaaaaaacatgataattggttaaagacgctaactccggaacacaagaaggtatatcatgatgaaattatggatgatgtccttaatgacaaaggaggtgtttttttcttatatgcttttggaggaacagggaaaacctttttgtggaaggttctatccgcagcgataagatgtaaaggagatacttgtttaaatgttgcgtcaagcagcattgcatctctgttattagaaggtggccgaactgcacattctaggtttggtattcctctaactcctcatgagacctcaacatgcaacatggagcgtggtagtgaccttgctgaattagtaacagcagctaagttgattatttgggatgaagatatgccgtttggtagaaaagtaattcttttcggaggtgattttaggcaaattcttcatgtcatccctgcagccggtagggaactgattgtcaaatcgtcactcaattcgtcttatctttggcagcattgcaaagttttgaagttgaccaagaacatgaggcttctccaagatatagacataaatgaggcacgtgagattgaggattttttgaaatggatccttacagtcggcgaggggaaactaaatgagcctagcgacggagtaactcatatacaaataccagatgatattcttatacctgaaggagacaaccctatagaatcgatcattaaagcagtctatggtacaacctttgctcaaaagagagatccaaagtttttccaacacaaagctattttgtgtcccaccaatgacgatgttaactcaattaacgatcatatgctttccaagctaacaggttagtgaattaagtttggatattactcaaaattatatatataactttatccgctgttacttataatgaagtagatgacaatgaactactactctttgcaggtgaagaaaggatttatcgaagttctaattctattgatccttctgacacacgtgcagataaaaaccccatatatacgcctgattttctcaataaaatcaagatttctggattagctaaccatttacttcggttaaaagttggttgcccagttatgttgttgcgtaatttttatccgcatggaggtttgatgaatggtacaagacttcagattgtaagacttggagataaactggtgcaaggacgtatattaacaggtactagagttggtaaactggtcattattcccaggatgtccctaactccttcggatcgtagattgccatttaaaatgaaaaggaggcattttcctttatctgttgcatttgcgatgacgatcaataagagccaaggccagtcattaggcaatgttggtatgtatttaccgaaggctgttttctcacatggatagttgtatgtcgctatgtctagagtgaaatcaaaggcagggctgaaggttcttattacagacagtaaaggaaaacagaagaatgaaacaacaaatgtagttttcaaagaaatattccaaaaccttaagtagattatttcttcaggtatgatttatttattttgattattataacataaatatcattgtacaaaattatataacatgttaacttagtcatttttatatttgtaggttggaataattattaaaagcatttcgttttcccattttcttaatgcaagcttttttaatatcagtgaagaattatgtagtctattcttttttcttttgttttttttaaaattatgagtttgaagtatgaagaaagacattttctaattattatttgtcaaattttataattcacttacatgttaatgatatacacgaaaatgtacaaatctactatgtgtacacctacatataaaaaatatataattacgttcctaaacgtacataccaactatagaaatatattttccatagtacaaaccgaggaaattacatatactaaacaaaatatggtttgacgagactaaatatatttagttgataccaataatacatgataaacaactacatgtttaaagataatgaatatatagtagagtttctgtggaatacacaaaactgagatttgatgattgattaaactaaaaataatgtgcgtagcacggatactgacctaatttctattctattttaaattacgggtagttaggtaaaatggtattatcagattcctaatatgtaggattaattacaatccaaactccaacaaaatattcaaattttacatttaaataagtaaaacagcgtcgtttaagttacgtcatcttacccatttcagttgactcaacaactgtaacgattgattaccacctatttattatgactacaaattaggtattacatataaagtttagatataaaattcaaaaaatttgaagtttgggttggaattaatcctacgtgtttgtatatgtcaaaaaaaacacaattttcaaattgtatgtgtctgaaaatatgctttcttggtttggattttatctataattcaatgtttttgtcaccctaagatattttacaaaaacaaacctaaagtaagttgcatggaatcataagcacatagaaagaagcaaaacttttaagaagtgtgaaaataaataaacggatataaaagataaatatttgattttataaacggatataaaaaataaacatttatgaataacatttaaattctaaaataatccgtattttaaaagaaattatctaataactctgttttaaatatttcaaccaaacacattcttttttgttaatacaatttaattatttgatttaaaacaacacaacgacaaccgttgttagctgcagacaaacaagtaatacatactgtctttgatcgatgtcaatggtcaatatacgctaaatccatgaacaagcaaacaagcaaacgaacagggtctaactcccacatttttcttaccgatgttatgatcctcgttgaaaatcaaactttttattaatcaaaagactagttataattataattgttatgaatttggtgagtaacacggggtcaatactagtcaaaaagggacaacacgcaaacaagaaaggaaaaagaaatgtgagaaaaaagaaatgtgacaaaaaagaaatgtgagaaaatagaaaggaaaaagaacaacaagacgacataagaaaaagcataaaatcaaaagatacgagaaacgtcgaatctccaaaccgttattcaccaatcaagaccatgggaactccaaatcctcgcacctggtcggagctccctccagatttgctgggatctatttttcatcgattaagctttaccgattttcaccgcgcgaagattgtttgttggaactggaacttgagttcgaagctaacagttcccaagaaaataagatctccatggctgatgctgtttccagaaggagataacgaagatggttctgtgctactgttcaatccagaagaagaagaaaagatttacaagacaaagagatacttttcagggattcgattccttgcaaactcgggtaaatggttcctattgatagactctctattcaatctctatatcattgatgtgtttagcgagaacaagatagatcttctgcctctagaagagtctctactagataaagaggaatccgaagatttaacgggtcttttgtgggtagacgaaaagacggcagagtacgttgtagtcttgttcttcaacttccctagcggaaatgttggcttttgcaagaaaggtgatgatcattacactaaaattccgctgcattgcggagtcccgtggaggttacaagggttaatagatgcggtgctcttgggttaccgtctttacatccgcacggagcttagttacattcgtatcctagatttgtctacacaacaaggtttcgaggatgttaacaagtacgaaccattccaagtgttttcttcaactcaagattgtagcattgcggttacaacacgaggagaggttttgttggtcaagagcatcctcgacaacacaaccattggaagccataggaggttttgcatcttcaagaatatagactacaatccgcaagaagaggttgattctctaggtgatgaggccttgcttcttaacttaggtattctcttgcctagcatcgcaccaaactccatctattttacccgtcatggtcgtatctatcacaaggagcattttaacctggacttatgtgtgttcaatctcgaaacaaaaaccctcaaacgcttccctagtctcgccaatatgaagctcaaggatgctcaatggtttttccctggcatttgaaaatttcaaacttttcatttagtttcttttgttttgaatgaatgtaaaattttagttaatccaataaaaaaacctttttacaactacttgttacttcgagtttgaagttttataattacatgtcttggacaattcttcgatcctttgccttattggttgacgttgtgtactaaaaccactttcgtagcactactcttcatagatcttgtttcctaatttgatagaaggacaaacgattaggcatgttcttgtcaattagtttcacaatttggtcttatgttgagatatgttttcatttagtttcctctatgtgtagtcgaccgtttgtcctttttttgttttttgcctggtcttgttccttttctttttgatctttctcgttctaaatatagaccatgacattgcctgcttaggaaacatgtatgccatagaatctctagcctgctatttctacacttcatacttagtagccacacttcacaccggagccaggacggagactcactcgggtcaaaaatctttttaacaaaaaacaaaaagataaactttatgactccggtgtctcgctcctggattgtcggtctgacgagtggcaccacgtgacctccatgagtctggctcatacttcgccggtggctcacctggtggacgggaagatatatgtgttgggaggctgcaaggacaagaattcctccgactagggagaggcgtttgacccaaagacgcaacttgggctgccctgccagtcatggaggaggaggaggaggaggaggatcaatgaaaacaccacggcctacaatgagtttgatacatgacagtgtggtgatagaggacaaggtttacgtggtggattcatggaacaaaagcttcttctactctccgaaacaatgtaaatggggtagagggaatcatgattcaaagcctaagaataaaagggattggtgtatgattgataacttgttatacagttgtggtcagggcgggtgtaaatatttgtgtgagccacatgaattggataggtgtgatgcagaggggatgaattggacgggagtgagaagttttgatttgcagcgtctcaagtacaggttctatcattcgagggtggtccactttggtgggaagatgtcaagagtgtggcaaagcgctcaagatttacttctcggtgccaaattgaccaactttgcgctgaatattgtcgtcttctggaatgttctcgtcggtggtcgtggtcaccaaaccttgcagatttggtgttataagatttccttgtgcaagagagtcgacaacatttggggcgcaaacaacatttggggcacagttgagtgctccaatgttgtcttcactttctattctctcttgagtatcgctaaggtcttgtattatatatctgttgatgtttgaaaactacttggattttcttatgctttctagctaggttgtaacattaataaaattaagctgttccgcttcactattttaacactcaaatgaattttttgctcctagtaatatgtattagattcaaatgaaaatatttgtataatatagcaacatgtcattcttaatatcactttccatacagaaaattttagaataagaaataaagtttggtgtaatgttatgtcaggattatatatgatcaagcattcagttcccactttccattctagaaagtacaaataattgtcatatgttcatttggagtaatgagaaactaaaaggtatatgtttgccaaagtgagagatgtttcctgatgcatatataccttgaatttgtttgtacagaagagacaacacgacagatggaggtctataaaactctaatggttgattgatctaaaaacatatcaaatacttgccttaagtgtagcggttgaagggagagagatgtaccacgatgaattttcatgaccagcctgtcgactctactacctttctgttataacagtagttggtttcggagttaaaagcagagctttctttcataggataggtaagtttagtattgtttgtgcagtctacttggtgtagatagatgtttgtagcaaaatgtggtagaagcaactgtgatatagtatgtctttgctttactcttgagcttgggtccttaccttatgattcttgatgcataacttagtgctcaaccgcttattttaagaaaaaattaacttgtttgtaattgagtaatgtttgtacaaaaaaatttagaacaagaaataaagcttggtgtaatgtttgtcaggaacaacagtactaggagtactctcgagccgcatagcaacaaaattcactagtaaatttggagatctgattgatgtgagtagtttaattactgaagatatttggttttgccttttatcatagagagttgtttgttcattacatcataaagcattgtacacttaatcagtttaagcattccgatgacatttagtggttttcaccaatgaaatagcatttaagatatcttgatattttctttgcaaagcctttgataggctatcagtgagtcccataacaagcaacatcaactgcagataaataacaaaatcaaatgtgtaaaaatacttgagaataccatatgcttgtctttcggtggtgtcgtctacttagactttgacttgtttcttgtacgtaatggcatcaactgaaatcacaaatcaaaacagacatgatctgtacaaaagaaagtttttcaagttctgtagcagaataagaaactataccatcatgtagattactaggtaactaatgaaattattgatgcgatagaacttatattaaccggtgtctaatttgatttctcgcggtgaacggtttagctacagtttgggttttagttttgttttagcaaagtttgtttggttttgatttcattagttttgattttattttggttttaaaataaaaaacaaaatatgaaataatgaattaatatgattatatttgttttagtacatgtatctaattaaactataatttttagtgatttgttaaacaaaaaatcaaacacatactacagtagaaactctacaaattaatactcgataatttaataaatacgataaattaataaattttgtcggtcccaagtcgggccaatataaaaattaaccaaaatcggtaagataataagataatattttttttaattgaatatacaaacaacaaaatatgaagaaaattaaattaagaaacattttaaaaaaaaattagtattgtgttttacgtaagtataaattaatatttattaatttatagaataaattaataaatattattatatattattataaattaataaaatttcataatcttatattattaatttataaagtttcgtagttgtttagactggacacagaaatagaaattgggcaattaatgggccgtaatagagccttttgagaatgattaagcggcacacgcacagttttgagttttgtaaaaatcacaaaatcttcttcttcgtctcaaaaacctcccgaccaaacattttcgttcgctgcaaactcatggctgtaagtttttaatcttccttcgctaatccacgatttcgattccgttatttctttttggaacccagttttagaatttacttctagggcttgcaaaagctctgaagttcgagctcttctcttgttaatttgtccaattagaactaattaatggagtgttcacgaatcagaactgatgggtttggttttaggtttcgaaaaaatttgcttttttcattattatatgtatgaatgaagcttggtttgtaattgaacgtctatagttgatttttaggttactactgttttagatgtaattaaagagtatattaatactaagtagtttcattcaattattcagtggaaacaagagcaatgatccatttttgtttattgttttgaagaccataccagtaaacccgaaaccagcttaaatggggaatggaatacaaaggtattcctattctctgttgaaatgttcctattctttatactttgtctttcttagtaagattgtgctatgactttctttctaaggactggattgtgctatagagaggcaaatcacctcgcggatggtttgactaactatgcttttactagaccattgggtctgcatttactagactcttgtcccgattgtatttcattgttgttgttggatgatgcttgagggtctgcgcacccccaacgaatacgtttgtagttttctttactttcatttaataaagtgagagggacattgtccccttcgccttaccaaaaaaaaactaaagcttataatttcttatttgtcactttcacaggttttctcgcttctgttgactcctacatgaacttgcaggtatggtcttagcttctatgttcaactcaagatcatgttcttgtcattgaagttttaaacagagattgatgttttcaaatttcaatgcttagaaaatctattcttagagtctatgtatagagatacatagatcgtttattcattgtagtcattgagattttccatgcttgttttttgtagctaggaaacaccgaggaatacattgatgggcaattgacaggaaaccttggagagattttgatcaggtaaaacctttcttactgcattctgaaagttttttactgttacagtatttgtgtctttgaacgaaatagttctcgtgaagtgacattacttgatttaacttaagaattggacttacttggccattagatacacattcatcatcttgtctctgttacttggtgtgctcacagatgcaacaacgtcttgtatgttcgtggtgtgccagaagatgaagaactcgaagatgctgatcaagactaacatgtgctgatgacactgaattctcaagtttgtgtttttactttgaaagtaacaacaagccatttagttttatgccatactaaacaaaccttcctgttgttttttttaaccatcttcaatttacggcctgttataagccatgatatgttatgtgatcctcgagggatgttaccttcacgatcttcatattcttcttcgagttctggccttcatttgttcacttataatactctgtgatgtaatacttatatgttctaaaatcgaagtagtttccgcctaatcgtatcagattcagctgttgaatgtagatgagtgaatgtatccaaattctccctacaaaggagatacctataaattaataaaaatgatagattttctcataatcccccctaacattttcgactgccacttatttagatctccaaatagtagaatatgaatgtgaacgttcaagtatctaaaatcagatgtggaacctcaataaatcaatcaaggtgactataccgtactttgatttaggcaaaaaaaaacctgatggccctctaatccctacctccagaccatttgctttacgtataccatgcccttattcgtgtacgtcaaactttcatcatcataaattttatcatgtacacaatgaccggtgcatgtacattgctcagatgcttgaagatcattctcctcaaacgaatagatacttagtccatcacgtacactgtcacatgtgtacttacaaaattataatagttgactcaatatctttgattaaccaacaggcggttgagtgtcaccaacggctccgacataacctataccatattatctaacaacaaaatcataccactttttgccatcgtaatcattgttttctccttcactattgtctataatcggttccagcacactccctattgggattggatcccgaacgctacgttcggatccactcgaagattgccacatggataacaagtcaactgaactagaatacaagtgaattaccgaaccaaagtctcaagataaggttagacgaaccggaaagctcagaggacatgcccgaaggggagcaagagtttgagattgaataaatggactgagtactccaaagcccatcaaaggtttaaaaaggtttaaaagaatacgttatagcttttattacagaattaaaacagacacatttaatagcataatgtgtataagttatagaataaaaattcgtataataaaaacttgcaaaataaaataaaagcaaacaattaataaaaatttgggcaacggtattcttcatggtttttaagaaaacaaatgaagaaaataacttctttttttcgttgaggagaaaataatgatattaaaagatttttaatatagtaaaaattgccaatattagaaagtgtgttaagcataaatatattctttattacaaagtggcccatcacacaactgttcttacccgaaataatctatgtaataactattcgaaagcgaaccaataagtaatgtatacttacatatgttgatatgaatttagattttatttcaagaacttatacaatttattacaagaaaaactattgtatctagttatgatcgatatgagaagatttatgtattttaagttctttctttaccaattcatggggatgccgaagaaattgttactactatagttctatcagttgatctaatttgtgctgcaataatcaaactcacaattttttgcatagtttaacatcttttcaattctattttttgctctctttctcttacattttctgcttgtataagcataactgtttcttaactaataaatttgacatcatatttctacatataattatcaataattttaagtataagaatgataataaatacaaaaacaaaatatttatcattatatataaagttgatataaataacattttctactaacaacataaattcaactacaactttggaaataccatcagttttgacaatatactaaaatcattttttttttaaactaatgttatgaaaaatagtttactataaaatagaccatcgatcttttctctcgcctcaactttttgctaccacatttcctttctatttttaggcttctctccaatttagttgaagaaaaatatctatttttagtttgtgttaactatatttaataagattccaacaagtttttgtaagtaagatacctaattttttattaaagtttggaacaatgagatatactacttcatttatagttttctgtttttacatattcctctttacaaaccttgttcaaggtaataattattttgtatatattttcacaatttgttcctcaaatactaaatttagattatttctttaatgaatagtggttttataaacataaacttttaatatttctgtagtattagatatttactttgacggcaaaaaacattttctaacaacttttcatattataaacaggaggattggtaagaatatgtaaccatagaatcgagggttatggaacatgtgggcctaacggacgtaagatatgtttagacgcattttggaaaaatcaaccatctcccggattatcaaagaacttggagggttgtcaatgtgaagaccgtcgtaagaggccacaattcaaggggctatctcattcgtgtagttgttgttggagttatcaaggtaattcagatgaatgaagagttatcagtcttttgagactatgtcgttgtttgttttgttattgacttggtaaataaggcggacttgtaagaacttagccatgtttgattagtttgctttgttatccttgtttttctctatttcaatttcttgtaagactatatataaactcaattgtgatcactgatttttaaaagttaatctcttgacttgaggcttttctataaatctatagacatttaagaaactaagagaactcttttaaagtcgcaagacaaaggaataagctgttatcacccgaaaagatggtgttgaatggtaggacaacttgaggtcagtcgcattccgcttatagtctactttcttgctccgctttattcattatgtgcactagggcttcagcacataagataaagagaaacggcgacagtgggtcaccttgccgtatacctctctccggtttaatatatcaatgtggtgcactgtttataagaactgagtatgaaactgtacgcacacaactcattatcaattatacccatctcatatcaaaacctagccttatcaacaattcttcaagaaagttacactccattctatcgtaaggctttgacatatcagttttaattgcatggaagtcttcatcacagctcgggtttgtgctcaaagtataaaccatttcatgggttagtaaaatattatccgatatgagacgacctgatacaaatgctccttgagtatctgacacaatagttggtaagaaccattttaatctcgcacgtagcaccttagatacaatcttatagatcaccgagccaaggctaataggacgaagatccgacatttttgttggatttgtcttctttgggatcaaacaaatttgtgtgaaacttccactcggcaggaagagtaccaaatttgaaaatcattgaacctcctcgattaagtaagcatggtaagagtatctggacatcctatcatatatttaataaattttaaacaacataaatataataatgataacaatctgagtaaatgccttttatacttgtgcataattgtttttttatcgcaacgtttcgttaaaatatttatacctgtgtctttttctctcatctttttctttaaatatttacggtaatatttttcgacaattattttgttcaactacaatcgtatcctttcgcatttgaatgtttgtgtctttttttatcgcaacttttcgtaaaagtatttattgttttcgttaaaatatttacgttatttttttttacagttatatttgttcaactatagtcgtatcatttcagttaacggttttgtctttttatcgtatttttttttaaaatatttttagttttttttacatttatacttgttcaactacattcatatcttttcagtttgcggttgtgtctttatatgtgcatctattcatttaatgttaagtctcttaattatatttctttgcatttgttgtcacaactgcgtatgaatagagttgtttatatatttaaaatatttgagatttttaaactctatatatttgtcatttttctaaataatcccatatttttgttttttcatatcgatttttgtatcatgatgaataaaaaaatctgtaaaatggttccaaattctttactctctaaactatttataaacatacatcattttaatatgaaagaaattcttctaattcttaatctaaccaaagtttgttggaatctaataacaaaaagaatttcaataaatgcattttgcatttctaaacggttatgttttttgtcgtactttttcgttaaaatatttacggttatctttttacggtcgtgttttttttgtcgtaccttttctttaacatatttacggtttattttttggacggttatatttgttcaaataaagtcgtatcttttcggttctgtctttttattgtacatttcctttaaaatatatacggttatttcttcacagtaatatctttttatcgcatcttttcgttaaaatgacgcatcatttagtaaaatttatataataattcaattatttgaatatattatcactataatttaatacataaatactaggcatggatgttcggttcgaatttttcggttatagcctcttagaccatctccattaggggtttttcattagagtttttataattaaaacaaacaaaaataatgaaaataaaggagagagtgtatagaaaatttctcatttctcttttcattattggttcaatcttttaactaaaataaaaatttaattacataatcaaattataataaaaatattaattttttttgttgaagaaactctgtttctcattgatggagatgctcttaggattataaaggaacgaaaaaagtttcggtttggtttagttcaattttggttatttttaccgaaaatatccaaaaagaaccaaaatacccaaaacaaattacttaaggctaggattaatgtttgttacttaggattgaaaatagagaatattacactcttagacactttttaaaaactttttacaggataagacactttcaaaacacaaggcactgccaataaaaaaattgtcctttctgcccctgaaaccaattttggtttaattttctaatctcaatttctaaactaaaaccaatttgtgagaaacctctctttcttacccaatccttcacgacgattttagagtttcatttatctgggcagttaaaacccttatcacaacgccgataacatcatctcgactccggcgatcatcccgacgagttttctaccggcgaattcatttcctcgtccctctcccgtcgttatcgtcaacaaagctttcaatcggccgacattaatttgtcctctcccgtcgtcgtcgtcaacacttgctctcccgtcgtcgtcttcattttcttgtctctcaatcgattcgtcgtcttcggcgtgtgctagtaacttctacacggtcctcaaatgcaaggtattaatcttctccaatcattttatttgctctaattattcaatcgtgtgctaattctatttataatatccaacattgtgaaaagctaataggtgaagacatgaatgctttgttaggtgatatttcagaaatgttaatcacaagaccttatcttcttaccacagactttggcttgcttatctcctcattgttgacggtgtcctcatatcctcaaaccaacctagtacgcctacatttaaatatgtagagatgttggcagatttggagaagttccttaactggctgtctatacacatgaggataaatggtcaaagaaacatggataatatactttggattgacgtttattgttcatgtataaacttatttattagtatgaaactaacatgtgagtcattagatgatcatatggactggactgcttggacaatcattaatggacaagtatgtctttgatttgctgcgaatgtgtttatagctcgagaaaattgtatcaacatgtctatatacatgtggataaatggtcaaggaaacatggataatgtactttggattggcgtttattgttcatgtataacttatgtattagtatgaaactaccatgtgagtcattagataaccatatggactggattgcttggacaatcattaatggacaagtatgtctttgatttgctgcaaatgtgtttatagctcgataaaattgtatcaacatgtctatacacatgtggataaatggtcaaagagacatggataatgtactttggattggcgtttattgtttatgtataaacgtatgtattagtatgaaactaccatgtgagtcattagatgaccatatggactgaattgcttggacaatcattaatggacaagtatgtctttgatttgctgcgaatgtgtttatagatcgataaaattagcacttttttgtttgctcatctaacattatcattggagtccaacttgatataacctctctagcttctcttcttcctctcttacaataaacaaaataaccatcaccttctctttcaacctctctacactcctccctcgacgtcatagctacatcggccgatgaagaaatcggagctacaaatccagcaacaccaatcggtatatcaagccttgtaggtcgtttcctctttaaaactcctcccggaggagacgatgcagaaacgataacccgaatctagatggaggtttctcgaaacgaagacgaaatggcgatttaggagaagaaacagtggtggatatagaggaaggagaagatgttggaggtttgcgatgagaaagagattggccggaagaattatcagccatcaacatcgagattgtgagataatcggaagacctgtaattgtgaaggtaactctttctcatctgcaaatctcaactgtcgttttattagatatcaattcaaacaaaaccatgttaaccggttaagcaattgatggtttagtttgaaaaggatataattatcattttatcatccagaaacaagagaaaatgtctcatccctgaaaagtgcctaaaaaaaaaagagaatattacgtgattagacacttttttaaaagttagttcataattatgcactttaaatagagaaagcactttaaatggagaaggcactttaaataaattattttatttatttactctttaactacattttttcaatcggctatctcttctctctccttttcccatctcttcttttttttttctttttttttttctcactttatcgaagaaaaaaacctttcccagaatatcttcaattccaaatctgcaattaatctccaaatccactctacgcgatggctttctcttctctcttgactaattggagaatacgaggtcttggtttctttaagattgtgatttattttgcaatttaaatatttgttttgacataaatttgagatttagttatctaagaaacttcttcttcttcaacaatggcgacttgaattgatttctgctctctctcatgtgtcaaactcgtttcacctatgtagcatcgagattccggttaatcaaatttcctgttattatggacatggtatacataatggatatagatcagtaaaaaggtttccgaatggatatatttaaatggactcgttattatggacaccaaaaaattgtttgttgatttttctttcggtttgtagagacctctaccttcaaaaccttatggacatggaactttagtttctttacaaaacacggttaatcaaatctcctgttattattgatagggtatatagaatgaatatagatcagtagaaaggtttctgaatggatatatttaaatggactcgttattatggacaccaaaaaattgtttgttgatttttctttcagtttgaagagacctccacttccaagatcttatggacatggaactttggtttctttacaaaagcacggttaatcgaatcttctgttattatggacttggtatatagaatgaatattaattagtaaaagttttctgaatggatatatttaaatgaactcgttattatggacacaaaaaaattgtttgttgatttttcttacagtttgtagagacctccacctccaagaccttatggacataaaacttttaccaaattcctgagataatcgagatcgaattgtttaagaaacttctctcaaaagttatggagacgtggagaaagagaggcgctacaaatcatgaagagagagagagagagagggagagagagagagattttatttattttgggtaaggatcgtggaagaggaataacaagaaagagaaattgagaattaaaaacataaatattgaattgagagtaaaaaaatctaagaaaaaaaaaatagtagaaaaaatgtttatttcctataaagtgccttaaatcgaaaaatattttttaaaaatgcctaatattagaacatttccaaaaaaataagattttctaaaaatgcctaaacgtgtcaaattatcttgaaaatacgttgaaacagtggtggaaaaatctcgacccgattggtatcaattaaggatccgacgcgtgtctcttttattactgagaaattgctgaaacgggtcaaatactatgaacttgatccttgcatcgttctctttggccccttgcttctgtgttcgattctttccttcaaaccataacaatctcaatctcttattcccaggtctctctctatctctctctctctgctacaagcttataagtattttgtggtcacatgtcactaatcattctcatgatccttaatcttagctcctagggtttctgtgaattagtctaattttacaattttatgcctttgaggatatatcttaatgtgaaagttttaaacttgtaactcaaaaaccatttgttagttagtaatcatcatcattctgaattgagctttgtttgaatttgagtagggcaacgaaagattcaagttagttgcggtggtaagagtgaggtgttgaagagtgatacaatggaacctcatgaagcagaaacgtttgtgaacaagagaaccctttatgctcccattgagccatatagcagtggaaatttaaaggtttcagatgttcacactctctactgggagcaatcaggcaaacccgatggacacgtatgtaaaaccatcattgttattgaatcaaccatcatgtgttcaagtttctaacttttccattgtatgatgggaattaacatattgcagccggttgtttttcttcacggcgggccgggaggagggacggctcctagtaataggagattcttcgatccggagttttatcggattgttctgtttgatcaggtcggtttgtgaattttgtggacactttgaatacattgatccagcttgtatattcatctttaagtttttattgtcttgttttcttctagagaggtgcggggaagagtacaccgcatgcttgtttggaggaaaacaccacatgggaccttgtgaatgatattgaaaaactaagagaacatttgaaaatacctgaatggctggtgagagattttcttccagagatatggttcttgatgttgttgagatggtttaagagccagaacctctgtttttgtcaggtttttggaggatcatggggaagcactctagctcttgcatacagtcagtctcaccctgacaaggtgcaaatcttgatgtttacattcttacatctgagaataataatggttgtttagggattgattgaatggaatatgatctaataagtagttttcttacctataatttcacatcttttaacttttttggtgcaaggttactggtttggtccttagagggatctttttgttgcgtaaaaaggagattgactggttttacgagggcggtgctgctgctatttaccctgatggtaattctctttcttgtatccctgtgttggagttttgtgtgcagtaggttccatattctcttcttcttaagtgtttgtttctttgtttaaaagcttgggaggagttcagagatcttattccagaaaacgagagaggtagtagccttgtggacgcgtatcacaaaagattgaattctgatgatctggaaattcaagtatgttgagatctaatcactattacacgagaaaaggcattgaccatcgttctttttcggcatttacagcaattgaactctcatcttttagcttttatagccgaaagaatttggactaataaatgtctaccgtagtaattattgcattcttatgatcttgtagtacgcagctgcaagagcttggactaaatgggaaatgatgactgcttatcttcgtccaaatcttgaaaacgttcaaaaggcagaggatgataaattttcattggttagttttatctggattcgttgacctgttactatataaagctcatacattatctttatactgatttcttaacgaccatttggctttgtgctgcaggcgtttgcaaggattgaaaatcactactttgttaacaaaggtttcttcccgtcggactcacacttgctagacaatgttgataaaatacgacatatcaagaccaccattgttcaggtacatccttaatataagaactggaattgtgaattgattgatctaatgaggccgagttgtgtagacgataggttatagaaatggaaacacatgcaacaagaaaaaaacatcggccttaggtttctcacgttgtaaacacaacattgatttggctatatacattacatttatatattatgggattgagattgggtctggattattaaaatggacagggaaggtatgacgtatgctgtcctatgatgtctgcttgggatctgcacaaagcatggccagaggcagaactcaaggtaagtttaaaatcttttccaagatttcttcaagatctttcctaagtttagttttgcttattgtcgtaatgcgaccaacggtctgcagattgtttatgatgctgggcactcggcaaatgagccaggaatatcagcggaactcgtggttgccaatgaaaagatgaaagcacttatgggatgaagtatttgatggaatgaaagctgctcattttgttcatttctttgggacctttgttcatattttcaagtttgttgctgcaaagtaaatatcacattcagagttagttgttaacgcgaaaccgaatgttatttccatggacgtttatacccaaatgaaaaagacaatgacataggtgcagtgttttgaaacccggactataagcaccaatgtaaccaatgaatgggactctaacgaataccttagaaccatggcctttttgaaccgtttaaatgcagaaatccccaacaaaaaccagcggtaaaaacatatgagtcaaataaaaatccttttatcaagaggattggagactatgggtgttgagtagcataatggtgaaactggtaagtgataaaggaaaagatttacagagtgcaagaggtgtgtcaagtaaaggagaagaaacttgaaccttactttgcaatatatgaatcgaagaggagatatatatatacacagtatactaaatcagagggtttatgcatgtaacaatgcgatgaggagatgtaaattcagagaattgaagacgggacaacctcgtcgtccctggtgtagccatgaaccaaaaaatcggtgcagtttcttcgcaagccgtggttataagggttgtagaatcttccgtcaggtccccgcaaataactgaatctcttcgcgttccataattcgttggttgtaatattccgagctatctgcaccagacaaccaacaataactgttatacaatcatttgcagaggggagggagaaccaaatttttactttagctgagacttccttaccatataagactgtgagattgtcaatgtcatagtcgcaatgaaaatgagtaagtcgaaaaacagaaacacggcagcatcagggtgttcaatgactatatgtttaatccatgattctccgtggtgtacctgtgggatacctctccataatcctgtagcaaaaacagatgcttactaatagtcaaatctaatggcaggattgcgagagagagttgttccagtcacatactttgaacagcagttgtgccaccaacgaatgatgttaaagctcccatgatcacaaagactaagaagtagcgtttattcttctgtgaaatgagtaagtgtatcaagataccgttaaccaaaacaatatgcataacagggtgtttcatgtcattactatatccttgccactttaattagcagagcaacaagtgaaagagattcttaccttaccaacacagttggaaatccaggggcagtgatggtcaaactgttcaacgcagcgcttacaagtggggcagtgcttagatcgcaccggtctaattatctgaagaaaaaatgataattgtagttagaaaacaaagaaaatatcgaggtaatcccctgaaataaggattgaggaaaaccttgcaagtggggcagagttgggaccagtttcctttccatgaggggtttttgaaattgatatcaatcaaagggtcctgcaaacatcagaagataatatgtgaatcaaacctttcagaacaaaccttacgactgttcaattgatctaaagtcggtgtctacttaaatcaggcatagttcagcatgatcaagacgaaaagcttaaacaattaacaactgcgcattgatttcgtatatatatgcatgaacccaatttagacggattgccaatctgctagacgaatgttcacatttctctcatcatggaaacatgggaagaaagttcaacttacgttggcagtgtgttggctgttagcttcaccggttcttttaacgtacccgggatctttcctataaaaaaaaaagagacgaattaatcactccaagaccattacaccacatacacctctctcagagtcactacaaagtagttacagcctcacatctcaacctcctcatttcttatgaagaagtaagattagttctcgctgactcattaagtaagtacatcaaactaatatgcacaaaaacttcagataaattgaagatgactaataaggatacctgctaacacgatagaaagttatcagtgcgtaaacaccacatgaaagaccgaaacatgcccacagaccaaccatagcagttatctttgggagattagaagctacacatgaatgcaaaatgtcaggacgaaataatataaatccattagtaagaacctcaacacacacacactattttgttgtatgcgttattcacctgaaacaatggatgtgatgaagaggaccataagaatgactattaagctgaacaacataggagcatagctagtctctcccagttttccacagaagatcttgtccacaaaactattcttacgagttcgcattgccttcgactgaaaaatattaaaatcggattctcagaaagcacatcatatcaaatgattaaaattttaagaaaaactaaaaaaaaccggggcaaacaacattgaacatactctacaaccattaaacaaggcatacctcatcctgtgaactctaaaccctacagtaaccctaaaacagaccgctatcatattgtcgctcttacatctacaccctaaaactgaaacagaccgtagaaacaagttctctaccagaatgatgcttaactatatctgaaaatcagagccagttcatctaaggatactgagaaaaaattctgggttagagctgcataagaaaaagcaaatatcacaaagctgccgtcttttctgcgtttaaggcttatctagtaactgtaaacttataaccatatttacatcaaactttcatatattcaatgctattgttttttcatatgtttgtctgtttgtaaattgtaaatacaaatttacagaactttgaaagggtattttgcatgaaacattttttaaatagccttattaacctattcctgtccatttaatgatgatgaaaatgaaatatgaaggagactttgattttaaggagcgagccagcaagcaaatgtcggatccacaaatcaaatttgaagaagctaattgtgaataatcaagatatgttcctctttacggatgttagaagggtagcaagcaacactaaacattacgtacaaggaaaagagcgagctgcctgtgacctttatcagaagcaagcttaagtggcgtggatccagtgttatctttcaatatcagttcctccttggttccagcatgaactagcagcgtacaagcctcaacgttttccttaatcacagcccagtgcaaaggcgtgcagcctggcaagcaaagtgattaatgtaagaatttctaagaaaatagtgcaaaatatatatcagggtatcagcattctacacttttcgcaagtcattaacagtctggaatgctataacaatccctccataaacaaacactcaaaaatcagagttcataatctcttatccgtttttgcacttatctttacgcatcataaggtacagaaaaaattccgatgtaagccattctttattaattatagagcagacaagtaaatacagttaaaagaaagttttaagagtttctgatttgcctgtgttatcttgtctattttgacatgcgtcccgaaagagaagtaaccggactgtttctgtgaatccattgtaagcagccctgagtcatacaaacatgaaaaatatagagttcacagtagttctccacaaattgtcaaatgataagtaacagagatactatgtacaactaaagaatacacactctaagcatccattaatatctctagtatccataccagtgtagcggactcctcccttcaatatctagtgcgttatagtcagctgcatagtccacaataatatgattcacgaatgctgtttgtccatattgagaagcaacatgaactgcctgcacaacaaaacatgtcgtagatcgacaaaatcttacaagaatctgaagcctatgatcacagcagcaacaagcctgatgcaaaacttataactcctgatccatttcacacacctttagcaaacaaaaacacaaaaattacaacagaaagaagatattaccctgaagccattgacatcaacagcttcaatacgagctccatgttgaagtaaaaggtcagcaacatcaatggagcctttaacagctgcccaatgcaatggtgtctgttgtatattatcagctgaattaacatcaccaccatgctgcagatagttcaaatccaaatcaatcactacaccggagaactatcacagtattatcgagaaattggtacctggatgatatattgagcaacgtggagggaattgttgagtgccgcccattgaagagcgtagaagccattatcgtcgggaagtgagacggaagagccattatgttcgacgaaatgtttaagttggtggagatcgccgtaagcggaggcggagaagacgtcggtgatggttggtgattcggtagggctttggtgagagttggaatctagaggcactacttcgatctctgatgagtccattgttgctcaacgatctgaattgaaattgaagtttgaggacttaagaaagaggtgaatgaaatgggtcggatccagagtgggtattatctcggatctcggatcttggatcttgttaaagtctactctttcatactttgactaacgctgattattcatttgtcattccattcctcacttaattggaaactagtttgttcgtttcgtcgcagcggcagcggcagcaacaaacactaccgtagattattgtttgttttgttaccgtagtcgttgacgtagtctttgtgtatgtttttaatacgttgacggcgagtgccggttagagcagttgtaacggcaagtctttatgggttttttttgtgtggcagactcttccagaggcccaaaattaaatgaaaaataccaaaatagataaggacgctctttatgaaagggattttttgatatttaagggacccatacgtggctaaatgttattggcctatgaagtttatcgacaaacataatttttgagcagacttaaagaagctgctgtttggtgaagtggtgtttgtctgactttgtcaccttcgtttgacttggctatagaagtctgatttgagcattgaaagattttctggaatcttggaaatgagatctttctaaggatataaatatattcctctgattcattgtggtttgataggaatttgctctcaaagttggtttttcgcacaatgtattattcttggtctgtgttgcgattttggcaaaacgggttaccaaacgagtttggaatgagatgaaatgagagtgtgaagctatattcaggtaagagggcattggattcggtgaccagaaacatagtagagtgaagatgtttcagaaaagttcattcaaaatttttttttgatgaattttgtcgataaaaagtaaattcgagatcaaattttaaaattttggtaaaataaagcttatttttgcaataacaaatagataaacttacaaattgagactaaatattaaaaatttagaaacataagatctgattttgcaataacaattttttttggaaacataattttgttatttaaaaacttaaacattttggaggtccaatacccatgtatcttgggtttgtgccaagggcaggcttggctgacgctgacgttgtcgctgctgtaaatttttgtgttcatttttttgtagattagtaaatatacaaaaaaaataataatacgtaaatcaacaacatataaaacacataagtaagtatacaaatgccttcattcatgtgtaaactatgatatttattaaattcggtttaaatttattagatcataaatttaaataattacaatttaaaataaggataatttgctatttgatgaatatctaacagaaataacatctatggtagttattatcagtcgtcttttaacatatgcttctgtgaataagttcccgtttatcaattattctattaaaaaatcattatttaagagttacaaaatttaaaaaactattttatctcatcaattattattatactctctctttttttcttccaagtatcaaaactcatatctcatataccttgatggacacgcccaagatggctacaaacgcttatttccctataatcaacatgagctcactaattattatctattatattcttttagattttgatgtttgttttccattctagtctttgattacttaatagtgaatctgtttttcaactctatatattgggtttggatgttgccttcacatgctctctattttcctcatctattggtgtttttgttgcttggttgccttaataaagtagctaatgaaaggagtcttaaccattcctaaagctacatttaatcattatgcagatacatgaatcatgataataagaaacaggatcactacaatcctaagacaaaaggaccggcgctatgatgctagcttccaatgctggctcccaatgctggctccaaagtcggcttttaatcctctaagttttcattacaatgttaatctcagctttcattttacctctgatataacttacgttgcacttgctgtaaaaacgttaattttcttttgaatctaatttaacattacattaaaaaaataaaaaatcatgatccggatatttgtcttttgatttcacataatgtacctttaattatatatagtcaatttttacattttacagtacttccatttccaatttataaaagctattttaacgtaaaaacaatcaataaacccaaccaaacattgtacaaattaccaacagctttgttcaagagcttcttggaagcgcttctcgatagtagccggatcgccaaagagccggccgagaacaaccgcggaatgatcctcattgtctaatgccttccaaggccaaagaaaaccgaagacacgtgtcgacttaacagacgacggcgatgacagagactgattcttagctttgtggctaactagaggatgtgagagtatgagcattgcagcggatggtgccattgatcgttgaacagtcaagaactagataagctattgattaatttggagatgtatgcgtcaatatatatacataaaataagaattggtgtgtgacagatagagatgcaaaaaataaagaaagattggtatggaggagagtaattttctgtgggagccgctagattgattaggcaggaaatataaaaagaaatgaaaatgatggcatgtggtttaacaagtctagcttgtgtcaaaactatgtgaggtaagcgttgcacacgcaatacctatgtgcgccaccgtctttgaaatctttttatcagtgagaagaaaaaaaaaagttatttattcacgtattttttttcaaagtttacacaaatagcttatttgattttgtaaagtatcataaaaatgtatttactgtgttggatgtttttattctttttcaatagaacaaaacaattttcaataatattaattagccctctcatctttatttaattttctctattttcaaaaaattgtattatctcatcatctatatagatatataaaacaaaatctttattttttcaaagtaaatgattcaaaaatatatagataagcacaaatgattcaaccaaaaaatagaatgttaatgtagaacactctcacgttcctcatgtgggagtactttgataaatttgggggtggtagtgacggattatattgtagattaaattgaattttatgggtttgacctgcatatttttgtaaattgaggataaatttgtaagaaaacaaattgccatttgaaagggtttgtgttgaagaaatctaatattactagatcatggcagttcgtgacgaaagtaatttcaattttatgttcatcgatcatgtatctcatcactcatactcaggatcggtccaacactatggactgcctaaagcccaaactatttttttttgcagacaaatattgaaaatatagcaaaatgatgcttgggagacgtaaatccaagacatgataaacaaaaaaacaaggaacagccactatactacaaaatatcttattgttttgatgccctcaaaatgttatatatattttggcgcctaaaacctttacttgttcagctttaggtcaggaccggcactgcccagactagtacttccacttcagtatatagtggagaaagactccgacgaaggttaaaagctctctctagtgatgtctcattgttaactttcgaaagataccaaccaacctaaacaggatattgtagtttccataaaccattaataaaagcaatgataacttgtaaagtaactgaacgatttcccgtgaaagaaagacttgtttttcaacaaaccacactagtaacagccacactagtacttccattcagtcaatacgagcatttgattatctttctccaagtggccaaaccgagaaatacgtagaggcaaatattttcagggcacacaactcaaatgcttgtataagaaacccttaccaaatataaagtactttctaaaccagctgatacccttagtttaaaatttccatgcgaccgtaactcggtaatccattttttttaggactttgtaatagcgtaatagcgtatcttaacgtatcaatgtgatacgctccaatatcaatcacatttattgtgaattgattctgatttgtatctctttaggaaagtagatatcgtctcttacctatataacaatgtaaaggctactgtgaataaggacaagaaactttttctcatacatcgatctctatttgttcatggtatcagagccctgacaatttttttttctattgtcttaaacatgtttgctttgaaacgatggccaccccagcaaactctgatgcgaccgaaacgaccacgacccctaacccgatggagacacgacgcaccatctcaccttacgaccttaccgcagccgacaatccaggtgccgtgatctctcatcccttattcaagggatccaactacgatgaatggtcttgcggcatgaaaacagctctctgctctcgcaagaaatttggttttcttgatggctcgattgctaggccagcagaagggtctgcagatcttgacgattggtggacgattcaggccttacttgtgtcctggatcaagatgtccatcgattcatctctccgttcgagtatttcccatcgtgatgttgccaaagatttgtgggacaacttgaagaagagattttctgtgacgaatggtccgcgtattcagcaactgaaggcggagttggcgtgttgcaagcaacgtggtctcgccattgaggcgtactactgaaaactgaaccagatttgggacaacatggctcattatcgtcccgtgcgtgtctgcaaatgtggaaagtgtgactgcgatcttggatttctccaagaacaggaccgtgaaagtgacaaagttcatgagtttctgtctggtcttgactacagttttcgaactgttcgatcttctctggtttcccgtgtgcctatccagtctctggaggaggtttacaatgttgttcgtcaagaggaagatctcaaaactacggtgcatcactatgaagattcctctcaagttgtggctcatgcggttcaaaccaagtcacgtcccatctccgatcgaattgatgctttcgagagagctgtggtttgtaaacattgtaatcgctccggtcatgcctccaacaactgctttgcagtcgtcgggtatcctgaatggtggggtgagagaccacgtagccgtgttgttaatggaagaggcaaaggcgtcacacccggagctgcttctgttggtcgagggcgtcatatcaacgtcaatgctgttcatgtttctcaacaaccacaaacagaacaagcgaattatgttatcactgatgcagaccgtgatggtgtgagtggctttagtgatgtggagtggcgtcgtttgaaggtcttactcaatggtggtgcaagcacgagcacagaaaaactctcgggtaagtctttaacatcctcttggatattagatacgggtgcttctcaccacttaacgggaaattttgatctgctcacaagtgttagagatatggatcctgttttagtcatactagctgatgggagacagaggatttccgtaaaagaaggctatgttgttttggattcccatcttgtgttaaaatcagtttattttgttgaggagtaaacaacggatctgattgttgttggtcagttaatggatgaaaatcgttgtgttgttcaactcgctgatcagtttcttgtggttcaggaccgcgtttcgaggatggtgattggtgcggtaggagagaggctggaacctacactacaagaaaacagtcaatttgcgaggaagggttgcgagggaaggcattcctcgcagtttttgagagggtattgcgagaaaggtgctacgtaccgcacgcgcgtagcaattccgtcgcaaaacttgcgagggaagacttcctcgcaaatttgcgagggaagtacgatggtttcgcaagaaagatattatccgtcgcaaatcccaagcagatacgtcgcaaatctttaccctaaaccctaaaatacataaaagtgttttgcaatctttgattctcatttataaatatgaatctaagtgaccatataatcattcaagttgattatatggtttgaacaaaaaaatattgtattggtttcaatattaacatttcattttgaaaatgttaaacattcatgattcatacttaaagaaaaccataagatcatcattgatgtatttgggggaaaaacacattcgaattatatgatgataaaataggttcaaatgtagataattaacgttctaatgattcaaaaaaatgaatccaaatgattttgagtagtgattgttgtatttttcgaaattgattatacattgcgaggtgtttgctagtacgcgtagcacttccctcgcaatatttacactaaaccctaaaatatttagaatttttagtcatgttcttattttgctgagggtcttactagaaataggagagactgaatcaaatataattattgaatcagatatgatttaattggttaaaacactgcgagggatttgctaggcgctctcgcagttccctcgcaatgtaagcagcattttgattggtttaaaagacggttcctcgcaatttcctagtaaggtttgcgagtgatttgcgaggaaatatattcttatatatactcgataacctagtttgagcggagctcaaacctgccgcatcaaaccctaaacctaatttttttcttcgattctcttcttctccgatctattttcctcgtcgccggcttctcttcttctccgatctattttcttcgccgccgcctctcttcttcttcgatctgattacgtcgccgcctctcttcttcttctccgccgcgtctcttattctccagcagccgccgcaactcttcttctccagcttcagccgcaagtcgatctgtttcttctccaaggtaatgtcttcttctccgatataacttcttctttccattccaacttccaccgtccgatctaacttcttcttctccgtcgcgtctcgtcttctccagcagccgtcgcgactcttcttctctagcagccgtcgcgactcttcttctccagcagcagccgcaactcgatctcttttgcctccaaggtaacgtcttcttctccaatctaactgcttctctccgatctaacttcttcttcatctccgatctgacattgttttccagatctaatctgttctagtttacggatctaaactctgggttttgtttgttttgcaagatgccgtcgtcagagaatacttatgcacgatataggtcacagcagcgagacccgttgcatgtcaattctcctgttagtgctgggaatatttcaggggttcaaggttcacgccatccaccatcgtctccaacgctaaccactcagccttctgtcaatcattctgattctcaagctgagcgtctcaacaatctcacactggagaagcttcttgatagtcctggtcgtgctggcttgacaaggctagacccaaagcgtcctctgggaactctctggtaaggttaaattcattgtcatagaacagcttaggttgtagtgccttagaactttgtagtgccttagagcgtaatggaattaggttgtagtgccttaggttgtagtgccttagagcgtaatggacaaatagaacagcttggttgtacttagcattgtgatgtcttagaagtttaaagatatagaaatccttatgtgtgggctggttggtcttcttgtaggtttgacgatgacgctgcagttgcagcaacagtccgcagcatctttgaaagagattttaaagaacctcatgccaattggtcacaaacatcaaaggctacaatcgatcgatggtatgaaacgtttgcggtaagttttgtgctcttttgatgtttatgcttgttttgtgtatggtttcatttctgatgttagcttctcttttgtagcaagtatataactgggaccgttcaataaacaaaagagtaagggttgagtttgaagcaaagctaaagtctaggatgactgatcaagtgtcatagtggaagggaaattggaaggagaagggtgatgaagccaagccaaaatggattgatcctgatgtgtggaaaggtctagtactgttttggcaagatccaaagtcagaaaaaagagtaacaacaacagaaatgctaggtatcatgatccggatggcaaaggcatctataaacactgttcaggccagacctcatacaaagctcgtgtaagaaaacgggtaagataagtattcttctctccttaccattacttaatctagaattacatactgacatcttgtttatctctttgtgtttcagtgtgagaagactggagaaaaaactcctgatttccttgagctgctagatgagacacacagaaaagcggatggaagcttcatcaatgagaagtcagaggagatctacaagcaagtgacatctaggattgaagaggaagagtctcatatgggttcaggggacaatccggagagcactggatcaggtggactttctgttcatgccaagaacaagatatttactgaagtaaattttatgtgctctttctgttgtctgaaatcttatactttgtgtagtgttgtgtttgaattgcttttgtgtctgaaatcttattgtgttgtctgaaatcttattgtgttgtctgaaatcttattgacaacttattgtgttgtctgaaatcttgacagcttattcattatactttgtgtagtgttgtgtttgaattgctaactattgcaagtgtggttgtgttgtgtacttgataatcactgttagcgttgtctagttgtgtctgaaatcttattgtgttgtctgaaatcttattgacaacttattgtgttgtctgaaatcttgacagcttattcattatactttgtgtagtgttttgtttgaattgctttctattgcaagtgtggttgtgttgtgtacttgatagtcattgttagcgttgtctagttgtgtttgaattcttttgtcttgtgttgaacttgttttctcacttgttttctgttgtgtccttgtgagtttttgtgacctttgcaggttgctccgagaaagaaaggaaggatttatggtgttggatctctgcattttgaagcatcttcagcccatagtggtccaacacttcctagtgatgatccggttatactttctgagaagctggctgccgctgaagcttgcattcaaaatcaggctgggaagatcaacaacttcgatatcctctttgactatcttgctgagaaagatccagctttagctgccattcttcgacgaggttcctcgacacagacaagaccggttagcgcaaatgaaccacctgtagctacagctccggaacagcaagccaatgaggagacagctgctgctgctgccctagctaaccttgcaacaggatcctctttatcatcagtattttgagaacattgtctttctcttttttccttgtaatctttttagaaaatggtttcaaacattggcattgtagtatacattttagataatgataatttcagcttcttcttcttcttgtgtctttatttaagaagcaaaaataatctctaatcaaatcctaattaactaggtaattagagtctaattaaccaggtaattagagtctaattaaccactaatcaagccttattatatcaggaaattagttgcaaaatacttgctaggcagaaagaaaagaatcgcaaatctctcgcaacagttgcgagggaagtactagaactgtagttggatgtgttttgcgagggaattgcgactttttaccatttgcgagaagcgatttgcgaggaacttgatttcctcgcaagtccctcgcgtatggctgtttgcgagggattagcgagtaatttttccctcgcaaaacgactgttttcttgtagtgctactacttttgcaaaacggagttggcagcatcggtgaggacacaagatgacaagtcatatgagctgtggcatcatcgcatgggacatccgtgtgcacaagttgttggctctcttaagaatgttacagtttcaattcgttctgatattttgaataaagcgtgtgatgtctgtctccgcgccaagcaaactagatctccttttccgattagtatcaataaaactacacaagctt

SEQ ID NO: 223 - DNA, 126337 bp, Arabidopsis thaliana
ttgtgcaagtatctaagtagatgtttgaccccattccagtgcttttgagttgggcatgagctaaatcttgctaacaagttcaccgaaaatgatatatcaggtcttgtatgattagcaaaatacattaatgctcatgttgcacttaagtacaatattttaggaacaaaaatttcttcattttcttctcgaaaatggaatggatctttatccacatcaagtgctcttacaattattgggctactcaacggatgtgttttgtctaaagagaatctcttaagcacattttcagtgtatgtcgtttgatgcacaagaattccatttttcaggtgctcaatctgtaatcctacacaaaatcttgtctttccaagatttttcatctcgaattctttcttcaaatactcaactgtctgttaaatttctgcagaagttccaataatgtttaaatcatcaacatacactgcaatgataacaaatcccgatccaaatctctttataaaaatgcatggactaatcggatcattcttataaccttattttaataagtactcactaagacgattataccacatttttcctgattatttcaatccgtaaaaagatcgattcagttttatgcagtattatatcactacttggaggtatagacgtcattgtttaagtttgtcctaagatagaaaaacgcatcataaattgattgcaaatatctatcgctaattcttgtataccaaatgccaatgctacatgcgtacgttggtatatatgtagcgaccaaacgattcgtcactagtttatatttaatacaacgattatatgtttgtcggtatttaaagacaaattataatcactaattagcgagaatttaacaagtgtggtaggtgttggacgtatccatcacatattagaacagctgatgtgatgcaataatgttttaggtgcagtagtgttgcacgacgcttcgctcgagattgcaaggcactggttaatggataaaaatatacaattacaaggtaaacgtcgtggaggagagtttccaccaccactaaaacagaaaaccgtagatacaagagtcttcatgatgggtggactagaatgatttaacatgaaaccaatggatgcttgaggagattgttagaattctgatacaaattatttttgagtgacgaagttgttacgatccattcttggagttttcaattttgtaagcttgagtcgaaccaagatattatcctatgtataagttggattacttttctaattgttgtaccctgtcttcagggccgaccctgagaagagcaacatgaaatatttgtatttttttttttaaaacaatttacaccaaaaattacttgtaaatagactctcaaaaatatttagttctgaagaaggcttccaaattttaaaacagtttacattaatttaaaatatataatttgttgttttggtctccaaattgtcaggaccggctagttgccttcgttgttaataaaggaatatttgacgaagtgttattggaaacagttttgagataagtagtcttttgcggtttgagatcagtttaaggaaggtcgataatggtcggtcatctctggccatatgaatgtgtgtctgatagtatctgatgttactgttttggcctacgtcatagacgtggcgtcatatatacagcaagtgggatagatacatgcatgaaacattaaaagactatttattcttcatgacttttcacttcttaatttttttaaaaaaatagttcagttaggatttttgtaaacactagactcagattccctgcgatatcgcggggagaatattttaaatatgtttatataataatttttttaaaacaaatagtatattataaattttagtaattatttaaaaaaatatatatagataattagatatatatatatatatatatatagacgggaagataacagtcaatatttttacaaataattccaataaaaaaaagatatagtcaaaaaaaaaaccccattaatattaacgaaaaattacgataaaaaaatacgaataaaataatcatctatgttttaacggaaataagcgaagaaaatatacaaacataaaatataactgtcaataagtaaccaaaagtaagtataaaaatatatgaacgaaaaaggtaagtgtcaatattttaatggaaaaacgcgatgaaaagactcaacccaacaaataattgtcaatattataacgaaaagttgcaacaaaaagacataaccaaggaaaaataaccgtccataattttacaaaaattgcaataagaaacaaaaacgacaaaataacagttaatgttaacggaaagttacgatgaaaaaatatgaacgaaaataataactgtcaatattttaacagaaagttgtgataaaatgaaataatcgaaaaaataaccgtaaatattttaacggaatgttgcaataaacagacacaaccaagaaaaaataactttcaatatttttatgaaaatttgcgataaaaaaatactaaaggaaaaataacagtcaatattaataaaaagttatgatgaaaaatcactaacaaaaaaagttgcgataaaaaagacactaacgaaaaaaataatcgtcaatattaatggaaagctacgatgaaaagatacgaataaaaaataaccgtcaatattttaacggaaagttgcgataaaagagacacaaccgaaaaataatcgtcattattataacagaaagttgcaataaagagacacaaccaagaaaaaataacagtcaatatttttaccaagtgacgataaaaaaaacaaacggaaaaataaccgtcgataataacagaaaatgacgataaaaagacacaaataaaaagttgcgataagaagaaactaaagaaaaacataaccgtcaatgtaaatagaaagttacgatgaaaatatactaactaaaaaagtaattgtaaatattttaacgaaatgttgcaataaaaaaacacaaaaaaataaccgtcaatattaaaatgacaaagatataaacaaaaagttgcgataaaaatgtagtaacggaaaaaataaccgtcaatgttagcggaaagttacgatgaaaagacatgaacaacaaatataaccgtcaacattttaacctgatgttgcgataaaaaaaacacaaccagaaatgcaaaagatatttttttggattcatcatgaaataaataatatgtgataaaaaaacaaaaattttataattacctaagaagaaggacgaatatatagagttcaacagttacaaatatttaagtagaaaactattcataaggaaatatacaatgaacagacacaaacgaaaaaaataactgtcaatattataacggaaaattgcaataaagagacacaacaacaaaacaataactttaaatatttttacagaaaattgcaataaaaagacactaatggaaaaaatcatatatcaaaaagttacaataaaaagacatgaatgtcaaaaagtaacccatcaatattttaacagacacaactgcttacgataaaaaatacagttttacgagaagttttgataaaaaaatactaacagaaaaagtaactgtcaatgttaaccaatagttacgataaaaagacacgaatataaaagaataaccgttaatattttaacagacacaactatttacgatgaaagacacgaatgttaaaaggtaaccgtcaatattttaaaggacataactgtttacgattaaaatacagttttatgagaagttgcgataaaaagaaactaacagaaaaataaccgtcaatgttaaccaaaagttacgctaaaaagacacgaatgcaaaaaagtaaccgtcaatattttaacagacacaattgtttatgatgaaaagacacgaatatagaaaataaccgtcaatgaaaagacacaaatataaaaaagtaaccgttaatattttaacagacacaactgtttacgatgaaaagacacgaatataaaaatgtaaccgtcaacaatttaacagacacaactgtttacgatgaaaagacacgaatgtacaaaagtaccagtcaacaatttaacagacacaactgtttatgatgaaaagacacaaatgttaaaaaagtaaccgtcaatattttaatagacacaactgttcggaagtgcaaatgtcatttattcggattgttattattaatagattcacaaaacgtaccatatttctaatttagtttgtataattatgttaggattttttaaaagtgaacctatatataagatatttgatgaccaaaaaaaagatatttatgacccaaaaggacaaaaaaaataaaagagataattcgatatagaagattttaattagatatatgaaaactaataagggtattatcattatctgtactcggaagactcgaaaattaagtcgatcgttattcgactgtttatcttacgctgttcctatggcaaataccatgatacccctgtattatattttcgaaaatttcattaccgctagactagtattgtgtcagacggcaacataatcttttttggtaaatttgttttgaagaaacgtgatcctaataatgaactgagttgaactttactagaaacccgaagcgtcgtcacctttcatctctacttatctgttcttatcttcgtttattgaagtaccctagaaagagtgaaagagtaaaccgtctttcatagcaggaatttcgttgttcaataccgtgctcaatctttcattgtttaggcagtatactcctttatatctgatctaactcggttaccgctgggattcgcttgtacagtatggatttgatttcaatttgctctgatttagggttttcgttggctctgccgttggtgataaaacccttttttttttgcagatgggtgaagttgatttaccgaatcgtttgattgcctttggagaagaacctctcggcgagagggttaatgtctatcacaaaatcgaaaccctatgcggcattataaacacccttgacgatgaagagcggtccttcgtccttaatagttcgcttggggacttttggattttctgaataagccggcgttttctgcgagctttggtatttttttactgagtaggcaattggaagttgccaaaccgcatgaaatttgggtagtttacgctagtactcctgtccgatttttgttgagggagttcaagattgttactggccttccgtgtggaaaatatccaaaggtagaaaataagaagaagaaaaggacggctgggaagcagatccctattacagttccttgtttggtctcgaagaagacgtaactattgaaagagttataacgatgcttaagaagaaggtggtaacagatcggaaaattaggttaagatatgcttgtttggctcttgtggatggttttttgttgcctaccgccgaaatggctgatgatctgtagagatttctgaaatacccttgggtgcgattgtcttttgagatgatgatgacttccattaaagagagggaagttaaacagctcgctaccacttgcgtggcggttcaaggtcttctttacgcattgcaactcattgtcttggaagcagcacctgatatacaggaaggccctcaaatagatgaggtcgttggttctgattccgatgaagatcccgccgttgtcgtaggtcctcgtcaggtcgtggccctcaagctcggcaatgcttaagatgtggatgcaaaatgcgaggtaacgctttgttttcattctagcgctaacagttttgttaacaccattcaactgttgttatcgttgataataccgatgttaattttatgatatatgcttactatcagtatctgataacaagtttagtatgcggcaacttcatatcaggataatgttttacctaccgattattgtaaaggatctgaaccggacttgctcagttgtgtaggagatatttttttactgtccttaacgccataccactgtacttagctgataacaatgtttatcccatctaaggaccctacacaaaattacttgtttggttacacgaaattcctccttatcccatctaaagatcctacacgaaattacttgtttggttacaatggttgattgttggcatgttttagtattattaattgctaatatccatgttaccgtgattggtcctctgcatgttgccctattatgtcctattgtcctgcatcttgagcaacattttgctgatgtcctctggacaaaaataacagccacactagatcgatttcttatcgttatgtgtatccgtttaacagcaatgttaccttcatacacagattcgtggattaccttgaactctcccctagagaatagtcttctcttcagcggcctttcaggtggcctacaaacgtaaggtgggcaagtttgccacctccgacatcattgggggaaggagtcagtgtatccatgtcggggacgggtatgataatacccttgtacgccaatctcagatatggaacggtgtagcggacgcctaccattgtttcgacacgaattgcttcctttatcgctgctgctatagcatgggaacatggaattgttagtagctggaattttgtgcatgtgcatgtcctctcccaaaggttaaccgcaaatgccgagtcttctttgtctcgcacttcataaaatgcatctccgattttaagtacgacataccctgctctttttcaaaaatttcaatgaccatctcattcacatttgaaggtaaatgattcccctcgagttgtgcagcttcttgccggagggcaaaccatgtgaccagtgttgttcgaagagtctctagcagcaaatttaccggataatcccttgccatggttaaaacattgttttgcgactctgctatgttgctcgtcatgaaatcatacatatctcccacaaaatgcgagcgcgtgcaatgttcaaacccaatgccttcgaggtaatcccgggctgcattggcgaccggtaagcccgagctgcattggcgaccaaatcaacccttctgacttgaatattgagactatgttcctctttaaatggacaacgcaggccgcgtgtgaagacatgagataaacctggagattcatgacaatgttttagagttatgatatatatatatatatatactcacgtatcaggtaaagtaagtcttgcgaggtactagaaaaattagctttgtaagtgtaacgttatctagtaacattatcttgttaccggatataacttaccttgcgtatgctagcatatatagatgagtgcctgtctgaaacgaagaccaaatctggatcatctggtatggtgtccgtgagcctctccatgaaccatgtccacgcatagtcattctcgctgttcactatcccaaaagcaatggggaagacttaaaaatttgcatctggagcgctgacagcaattaagcagcctccgtatcggcccccctgatgattcccatcaatcactatcacctttctcatataagaataaccttggactgtagcagctagggcaaaaaataagtacctaaaccgctccacaccttggttatctttttccgtatcaagggccactagcgagttagggtttgtttccagcagaagtttgaaataaggcttgatcaatgcgtagcttcccattgccgagcccatggcattatccatagctatttccggtacgagacatttaggctgaactcatcacggagcatcttcctcaactcgttaggccttgaccccctaccaacccccaggtattttgttctcatcaatttcccaatcacagctgtagatgcttgtttgtgaaagtctccccttgcgtctacactgcaagtgtgctgttgggttgcacattttatctcgaatcgttcactatcctccatttttgttgcgtaaatacgccacgggcatgtatggcttacgcacgcagcgaggagaatgttagggtaagacttcgcgtaaatgaaatgaaactttcgccgtatcgcatgtattgcaagttttgttgcgcagtcttctttattcttgaacaatctgccaatgaagatattgtctccttcgtagtcggcatcctttagagtgtgatgcaaataatgtgcagtttaccattttgttagataacttattgattacaggtagacatctaaatcgccatatatattagcagctacaagattgataactgtaatgtatccataagtattctataagaacacattaaaattagcggctacactaaaatttagtttgcaaactttgaattaggtcctaacatgttttaccttcttctcccggatcgtcgaaatatggtggggcgtcctcgtcatacaacacggttggtactggtgtttctttcaaatagatatctgccatcctccggctaacctgggtatttaacgtcataacttgttcttgagttgcaatgatttccacccccccttacaatgttgttaaccctactcaatcttggtgtatttattggttccatacagagtggtccgtccggatctgagtagtaatgtgccacctcgtgccgaacgggtctgagtatgacgaagaagccattttcaaatgtgttcgttagtgttatgtggcaacacatacattattcgataatctacactttacaagataacatacctatcatggccagacaattgttgctagataattcatcttcgtccatcagctcctcaacttgagaaggttatactattctgtggtgtcttaaatgtcgagtctgttgaagatagcgccactattgagatatcgccacgagctagatctgcgcttccaagggtaagacgtatagactcctctgggtttgaatttgaatgccctccaaccacgttatcttgaacattaatcggggtactattgacttgtcgtcctagcgagccagccagacggatttctctattttgcatctctctcagcatttttgcctgtttgttttccctccacattgcaaactccaagtccttaatgctctcctcgtccaggacatattctttccctttagcggttgcacttggttgcccttgggttagatttctcggtgcgacgcttcctacacccgtctctctcgcattctctcgtataattatgcccccactcctgcctaagtgtgttctggcaccgttcttgtcctgtccgttaatcccagtcacactaataccaggaacgttaccgaataacattcttgttactaccgaatcccaagctgctcttgtttcactgctattccagtacttatcagatatcgtttctaaagtcatacatcctatatctaagacgctttggtatgaattaactgttggggtccccacaatcttccgtatggtttgggccttcagctgaacctcctctagatcagaatgaattgcaataaacaacgtcatatcctcgtcatcgagaatatggattgggtttgcccgctgccaatctggccccatcatccactgcggccactgataggatagttccacttcatcttccggtcttagcgtcagtctttccttcacagcttcaaccactttagcgaacgtgtctctctcacggagctttaccgccaagcataacccatctaactcggctacgtgttcatagcatccggattcatgtcttttccactctcctcgaaccagtctaacgaccatcgccatggtgcttgtcgataatcaaccataaccgcaacgttagcagacaagtatgacagaagttacaaaccctaaggcagggtggactatttattaccctctatcgaagttgaacaaagtaactcgagaattaactgcttatctgagtctctaattactttgattttgttatcttcgcaatagtaaatgtaggttcttttccgtcatgtgtttctacttttgttgttgaagcaacaatgatagtggagtaacaaatagccaaacacgcaacccaaataatatcatggctcatcattacgattctttttctgtaacttacgccggcgggattttttggcaggtttttgtcgccgcattaaatgcgcaatatccatatttcccaaatcttttttcagtcccctacaagtatcctgaacaatagggttaaaataggaatattcgttttgcatgatttatcacacctaaatatctgatttacatatatatattcttaattaactcacgctgcatgtacatatatttaactcacccgacctaacgtattttattgttttacatttatttaattacgtataaattatatgaaaatagtttaataatgacaaattgacagcatccagtatgaataaaaagctattagacttcttatctattagcttagccaccattcaatttgtgttttctttcaaaatgatatgtcatatttgcctaacttaacaaacctcattcaagaagcagctttgattattccatcccctgcaagaagcaagtaactattaccgtggaattattgtatcaatgacttatttaacaagtgaagatggctttgttttattccctcatggattatgctttattttttggaaaaaaaatactcagctacaccaagtagaagggaatacatgggtcacacatgctaagtttagaaatgtacaaccaactacacgaactaaatttattgcatacccacatatatcaactatatgacgatatgtggtcaacatcaacatcacgacatgtggtcaatgccgatcaacgatggtcaacaccggatttcgtgatgttgaccacatgtcgtcatatagttggtatatgtgggcatacaatacatctaatttgtgtaattagttgtacatttttaaacttggtatgtgtgatcatgtatttcgtcatacttggtgtagctgactatcttttttccttattttttccttcctttttttttataaatcataaagaaagacttcttgttttattccctcatggctccatgttacaaacataagcaagaccgtaggaaagaaatacatgcatgaaacactattttcataacatttcacttgtaaatattttcttttaaataattgcatgtatcttttctcataattatttgattttctaatggggtattaaatatgtccacggacaatattaattcatattttagcagtgaggcaaaaagttttgtaatacaatggagactggaaaatgaataaagaaaataagcttccacttttctcaaaaatgctttaaaaatcgaattaattatggattcgccattttttttattgacatttgtggattttttcttcttttaaatagtttgattttgccttttttcataatataaaaatgtaatttaacgtacattttactcattatgtttgagtttattctctttcatttgtttttagagtttagtatttgatataagtacgtatttttccaaaataaaatcataaatacatatatttttaaatgttaaaaatggcaaattcgtcagattttcgtaaaaatagcattttgaaaattttattttttaatagatttgaaaaattcttacttttgcaggaaaacaaaaaataaactacaacattaaagaatgttgaagatatgatcgattttgttaaatcagagataaaaaccacaagtaagaatttttagggtgcttatgatttgttttaactgttttcattataatattaatctccaacaccacatagataatcactttataatacgatatatgcccatatctaaaatttaggttgtaataaatattttggcaattttagttcagactatttacaagattgaagagataattatggttaggcattggggcttataagtcatgttcacaaaatttatgaacttcagttattcaatttgaaagaagggtatccagagttagactgaacaaaatcttcgcttaactaaattcaaaattataaaaatttggtttggttgtagttagatatcccttgccgaattgaaccaaaaatttcgataatcttggtttaaatttgtttgttattttgtttaggctgttatatatttttggtactttcttatgtttctttttaaaaattgttttcatatgaagatgtgagaagaaatttagacctatgggttagggggttcccgactagctaccgtattaaatgttgggtttattttatctcctatctcctatccaaaggtgaaagattaaacccataaaagaggtttaaatgttcagcaagactttgtttatttattatggcaaacaaaacgaaagatagttttcaaatctctatataaacaatgtttacaaaccccaaaatcataacacaaacaaagcttggaaatagccattatttcaactaagaaaaatgaaagtcacaagctactctcgaattctaataatcttggcagcacttgtgggtgctcttgttgttcccttgaaggctcaagacagccagcaagactatgtaaatgctcacaaccaggcacgatcgcagataggcgtaggccccatgcagtgggacgaaggacttgcagcctacgctcggaactacgcaaaccaactaaaaggagactgcagactcgtacattcccgtgggccttacggggagaacttggcaaagagtggcggtgacttgtctggtgttgctgccgtgaacttgtgggttaacgagaaggctaactacaactacgatacaaacacgtgcaacggagtttgcggtcactacactcaggtcgtttggagaaattctgtgagactcggatgtgctaaagtgagatgtaacaatggtggaaccatcatcagttgcaattatgatcctccggggaactatgcgaaccagaagccttactgatgtgtgatcatgttacacatatggcatatacacacacatataaaacacggacctgcacaaaggacgtgaatatatatttcaataagaagcatcatatgcaggatgtgtataaatatttattaaaaaatacaaataagttaaaggcctctaaaaccaaaagaaaactctaggcttgctctaagaaaaaaatatattggcatttcttagagttagagcacgtaatattcttaaaaatccgtttccacatattttggttctacattcccgattattagaattcaccttagtggctgttgagaggacagactctccccagatgtagtggctgcggtcgtgaattgggttaccaaagcttgttgttattctgtttgtgaatcatgaaaacggtcaaagatgattctaaggtagaataggattagaaatcactagacaatgcatcctatattttaatgattatgtcattgaaaaactaattatggtacttattttaatcttcaattaattagatcaacaatttactcgttataaaacatgaacagaaaaatactccattatgttactagaacgaagtctacgtcattgtaagcaactttgaactgtccgtcttgaatgtttggcaatcgatcatgtatgtgacatagtccatattaaaacgttaacatcttacacccatcaatggtgtaatatatatttgcaaaaagaaatccattcctaaccctaagaatgtttcagttaagcctttctatgatccatcagtttgacatctcgttcttggtccatcttccgccaaaaaacgaacttctttgttgttgactaaattcatgatttgaagaagtttttagacaaacttttcaaatatactgatctattgaccagccgtaatatgaggatatatacattaccaaatgatccaaccgatgacaatgacaaacttctacttactaatactgtagatccgtcacttattgtgataattcttgaagtaacccaacgatatatattctagtatgaaagttgtgagcttacgtttaaaaaaaaattaaaaaaaaaagaaggttgtctcatattacaaaggcatcatttaattgatgatattaatgtgggttatcagcatggaccattgggaaaacgatatttttcaacccaaactaattactggcgggtttttccaacccgaactcagatcccagtctatttcaacctgaaccgaaattaaatttaaattgaaaacctaatctttgttacagtagccaatttcaatatagattttaacggtgttaattgatgtttaagggatgctgagtcaacggattaaaggtcgacgacgtggcatttgggcatagtaaagacgacgtcgtttaactcgtattgagttgatttgacaaaacgacgtcgttttaatttgggggaaaattaaaattaggtctttcgtgttcattgtttcgaatcagagaaagagtgaatgtgcgttgccgagaggagaaaacgatgaagatagtgcagtaggaaaacgaggaagaggcttcataatcggagaattctagatccttgagaagttcaaatgaggtaatgagttacttttaaaactatgaatgtcaattttgcatgtttttgggttgaattttcagttttaaagggtattgagtgtgaatatattccttttatacattttctttatatgaaattgtctaaaactctatttgttcaagggtagtgttcgattttaggatagacaccaagtgttcgatgaaatgcctaagagaattttcgtttgttttaatgtggatgttcgatgtctttttcagttttccgatagaggtaagattcactgtgtaccacagtggacattgggtgattaatgaaaacgaagatgttgcttatatgggtggtggggtgttaagttttgagtgtgaacacgaagagttgttcacaaaattgaggaataaattgggtgatgtaatgtattggaagaaggtgtcgtatacttatccttatgaggatagtaaagatcggaggcaattgtttgaaaaggataatagtttcaagatgatgtgtgatgggggtcgatgtgtaagagttttaaatgtgtttttggaggagtcaacagagaatgacgatgaggagattgatggtgagccatgtgaggaagaactgagagtagaaaggaatgtagctccgtgtgctgaagaagatgaggatgaagaagagtttgactaccacaatactcctcctaattctgatgatgaaggtgaagaggagacattggtgagatgtaagcgaggaagtggttaattaaagatgtaccaagtgtttgaaagcttagatgagttccaagaagctttattggactattatttaaagactggatataacattaagttaacaagatgggggaaagacaagaagtcagcagagtgtggagtagaagatgctgaacatccgtgtgattggaggatacattgctcgtacgaagagtaccttgaaagtggcacgtgaagacatttgagcatgaacactcttgcatataagatggaaataacaagattttgaaatcaagagtgattgcaaagttgttttttgatgatataaggactgatcctggcctcaagccgaggacaatagaagagaatatcttgagacctacaatctcattgcctcaatagacaagtgtagaaaaggaaaaaagaaagcattggacatcattcaaaaagagcatgaggagcagttttataggctcaaagactaccacacgtagctgtgacagtgattttatttttttgatgttgaatgtccagtttgagtcttacatatttccagcgatgtgattagtctatttttgtttgataggtcgaaccctggatctagtggagttaaacatagttttagatgatgaaagaacaaaactctttcacaagttttatgtttgttttgcaaacctaagaacccaatggagcacatggtgtcgtcctatatttggacttgatggatgctttctcaaaagcactcttaaaggacagttattggcagctgttggtagatatgcaaacaatggaatgtacccattttgtgctgtggtcgatgtagagaatgaagacaactggacttggttcatacagaagctgaatggtgattgtgtaaatctgcaagatggtcaggtatataccgtcatctcttatagacaaaaggtcagcgagtttacttttctcaagattgtaaaacatttttgctatcttctcatgatttctctgtttcattttcagggtttgttgaatgctatagagaggaaactaccaaaggttgaatataggatgtgtgctagacatatatatgggaatctgaagaagctttccccatgtcaaaacgatatgaaaggtttgttttggagtgtggttgagagttatatattgtaagagtatgaagctaaccttgaaagggtaaaagcttatgatatgcggctgtatgatgcaataatgcagagaactccatagaattgcagtcttgccttctgtgcacccacaacgagttgtaaagatgtgcacaataacatgttagagtcattcaacaatgcaattgatcctacaaaatatttgccgatggttgagatgctagagactatgaggagaagaacaatgcagtgtattgagatgcggatgaagaaagcggagacttacaaaggaagattcacaaagagagctgcagagttcatagctttggagcaggaaaaattgaagttcaccaagtatgtttcaggattagagaatggtagatgtgaggttcttgattgtggcaaatatgtcagcttgcacatgggaatgaagacttgtgcttgtcggaaatgggagatgactgggctatcttgtcgtcatgcattatggatcattaataacaagagactaaaccatgaagattatacatctgaatagtactcgaatgcaaagcagaaacatatttacagtaaatcaatagaacttgtaaaatgtctgtgtttttggaggatctctggagatgtgattaaggcgccacctgctatggttgaggaaatccagaacatgaaaggaaggaaaccgaaaccaaagaaaaaaagggaagacatgaatctccaattaagaaagtttcaaggaggaggagaattatgcattgtggaagatgtggagaagatggccacaatgtaaccaaatgcaataatatggtcctgaagatgcataagtcaaagaaaaatactccaatagaggagtctcagtctctaggtccaactcaactaacaaaatagtagatcaggtttaactcttctctttatgcacatttttggttttgtaataattttggtctatcaaatctctgactttgacttgttttttttttaaagagttgctattttaggtggattttggagcatggaggagatgttatgatgcttttgtgggtttttagaggatgtagaatccggtgatgttgacgatttggtaggtttttggcaatggaactgctacgggtatggacaatatcagaatcatgaagacattttttttttggtggtaagatgacttattagaacatataagaatgcttgttatagatgtttggtttgcttgtctacatgattgaacaagtttaaggttttaatgaaaaccaagtttaaggttacaaattcagacataattcaaatcccattacaatatctcatactttaagatacaaacacaattactacaaacaacataactaactaactcatagttcaaacacaattactacaaacaaacaccattagcttaagacaattactacaatcaaacaccattagcttatctctaaacgtgattccattacaaacaccatcagaacacaaatatgtaaaccacaatcatcactaagacacacctgatcatattctttaagctttgaagctccattttgcgaagatttctttcttcactacagcttcacaaacttgagtttccatttgaagattttcaatttctgattcacaagcattgaaacccttttgtaatgtgattgaatcttcttccacattactcattttcaacttcaaatcctcaatcatacactcatcagtccatttaaatgtgcgataccatcgatcatgtaacaaacccaaactcaaaacccaataattcaaactagattaaatctgaaaattgaaagtatacctcattggatccgttaggacaagagtgaaataaccttccaggggttttagcagtcctcgacgtacccatctttacagccttatcgcatctgcagctcgttgggaaccctcttcttctatcacccattccaaaatcgtttccactctaactctctctcggtattctatctcacgaagaaccctaagttttaatttccccaaaatgttcaacgacgtcgttttctctctagcagacaaccaaaactgtgttaaacaatgtcgttttgtacagctctgatgccatagtgttgctgactcagcacggtttaacggtttcataacgttgtcacaggtcatgttgaaatcggctaacgattatgtagttgaggtttggaatttgaaatagtttgtagttttggttgaaatagactagggatctgagttcgggttggaaaaacccgccagcaaatagtttgggttgaaaaaagccgttttcccgtatcagtcaatatactctctacctagagacacttcatgtacaatatcagtaaatcaccatccgtaactgtagtgatttgatgcttcctcttgtgaagctttgacaaattccgttttgatgaagatgttgccagctgcaagactaatgtaaacgaagactgcatttaaaatgtaatatacaaagaattcaagtcttttctacaatatatttggtaagatatcaagtggctcaatttctacacaaataaataatgcaacaaaactacacagtgaagccccaaacaagagacaatctgcatattctattctattttctccgcgcggcttacctatatgctttctagtagaattctcctacaagcatagaatttaaattcacacatcaaaagtaataagagaccctagcaacaactccaaagaaattttgcagcaagacaaaacaaagttaacaatgacagagtatagaaaggtaaacaaaactcacatctatctcctcctgacccaagagaaccaccctcttgtttcttttctggaagcattttcttctaagagaagcatcctagtaaaccggaattctatcgaaagtcaagatagttattgcaaacaaacatccaactgctgcagtacttgtaagttaagaaaaggagactgcagcagatgggttcgttcaaattcacctttttcccccaaagttttaagtggtcatctatcaactgcaaaaatgattttagccacaaagatgatgaacgacaacggatatatacggatgaaatggagatgatgacatgatgttgatgtgaataatgtgcatgaactaattgatgagtttctcaatgacatctatattgtctggaaaaaaattaagtcgtgagaaaaagttatgatatgtaaacttgagtaaaagtgaatgccaaaataaatatgaaattaaataacattagcatcatgtgaaattattacaagctccatatttgaagctatgtaataatcattgaaatagcttctcaacatctgaatgaatctttgttcccccatgtaaatctatgaagaaggtgggttttgaagctctatgggaaaaaagttgatcatggcaaactgaacatttgtacttgtgtaattagaattctgaaaacaaatgataactgatagaatgaattaaaataaataaacttatagcataagttcattagaagagttagaatacctgaatcaatggtcataagctctttttgaatcagttccaaatccatcacaagttatcattaaacatttaagctaacattttcaaagcatcttcaaattgatccacaacaaatcacattaaaaaagactaaatagtctaattcaggttttgcatatacataactaccatgtatatggattaaatccttgaactaaaaaagaaaattgaaaataatcttatagggcctctagagtttgaatataagataaaaaaaatataaaagattttctcttattaactttagaaaataactcaaaactaaagctccctaatttatctctctcaaaactcttaaaggtataccacactatggcaactctttatatagagattcataagactaatactaatcacattaggaatatgtttagataactcctaaacatataacctttagataattcgtaaagattcacacattatctgtcttttaattaataacttataactcaagttattttcaagcttaaaccaacatgcccaatgtcatgtgatttagagatatttaataacatgaattttaaaatattattctaattaccaacctcattccctccatgatattattttgaacgtaaacagcacatattcgaaaatatgagctagaccttgcatattaatttggaggatcagcaaagctaccacatctaacagaaatttcgtgacatcgatgtgaaatatattttttattggtattaggaaagttaacaattgtatatattttcttattgttataaaggtaaatttactcgtatcataaatgtaaaaaaacttgttagacaaattatattttttatataaataagcatattggactgattaataaaactgagagaaattattctactacttagtgtttcctccaaacttgacaagattagtagtatgattcattgttttttgaggctttgatatccaatatactattgtaattaattgttgtgaaattgaagtagtatatttgtgttagtttaactagaatggtgtgaagcattgtcaaagaaaaatcttatttttttatatttttaatctgtatagttttatttttttgtgatctaaccatcgttaagatataaaattaagggcaattgacagaaataccaccaaaaaataattttttaattgctttcattcttggtccccctttttgccttaattcttggtcccaaatcaactaaaggaccaagaaaataacttataatcttctcaaacagactctcgcctaacccattgaaatcgattcgtcaccttctttatagatctgttcaggtaaggtgaggatttcactctctgaatccatctgcgaaacatgtacaaaataaatcaaattagaactgaaatttagatctaaactattatcagatccactatgaaatcgagaatcatattaccgtagattcctttgccggatctggtgatttcttcgtcggatcttcgtcggatttggcgatctccaaattgcatgaaactttttttgtcagatctttgtcggatctggcgattgttcgtcgtcgtcatcggatctggcgatagatctgaaatacaattcgtcgtcggagataaagttcagcgaagaggaacagtttgtcgaacagaagagaaatgaagtgaaatcctaatctttcattaaggacaagattgtcattttccgcactagaaggagcagtttaaaaaatggtcatgaagaaagggtaatgttgcaaaaggtgattagaaaaatggtacttttgcaaatcttccttgttattaatagggccaatgttttaatagggactaaagatcttaaggttaatccttaaaatgtttttaataacagggatttttaagtagattttcaaatcactagttcaataacattatatttcattagacttttaaaaatctataattgaacaacataggattcgttatttgaatacaaatcacttaaaatgtttgactgaatacactccctttagttttgatttcagaatttcaagctttttcaaattcgttgcccacaatcaaagtaagaatgctaggtaaataaaggaagaagagaatttggtcaaaaaaatcttattaaaataaaagtttaatttttattataaataatttcatttgaatttcatcacaagttatttttagagtaaaattagttgtgatggaaattatgtaagtttatggtggtctctaaaaatcaatatataaaatcaagatcaatgttggtttattcattagaattacaacaatttacgataccctcaagataacaaatgtgaaacatcatttgcgaggaagaatttgttttgaactgtagcataatttagaaagacttgttaactaaaaagactttgagaccattattgcatggtaatatgtatactgtttcttgcagcggttaggaaataatcaaagtcttcagaaatataagatttcattaatcaaaacttttttcacgtttgttaacttatagaaggctaagacgacgtgcatcctatataatcgacatccaaataattcttgcttcttaaattcgtttttggtatttggatgtaaatttgtttacttattagtttgcaaaatataaagtcaattatgagaaagggacatattttaatagcatttgtaacttttgcaattttgcctaaaatattttaaatttgccatttttaatatctaaaaatataattttatacattaatttttggttctttttaggttatactatttcttattaagtatgtattttatgaaattattttcccaaatatttaggtttttaagtggcaaaaatgtctcaaatctccaatatttgatggaaaatggtaaatcaaaaaactaattagccaaaaatagaatattctgtaataatttcaaaataaatattaatatatataattttttttggacaatggtttgtttttattccactaacgtagaagtcaaatacagagatagagggaaaaattatcaaagtttaaagcacaacaataacgagcatactcaaagttacaataaagaaaaataaaaagatagatagggctaatcgataaagggttcttgagaggtttgagccaaaagcaaagaaactttatggtatttgtgagatcaaagtttatcgacgattcttccaagaacgattcaaaggaagaacaaattgccactgtcaagagaagaaatggcgttgatgaaggggtcaaagacatgattctcgctggcatgaggagagctacatgaagtagagctttgacaaaggttcgggtaatggtgatggtgctttagtgcttggatttatttgttcgaattgttgcggaatggaagttgagcttaggtaaaacatagcaacaagaagtggtagtggaggtgtatgacttgaagacgttaagcgagcttgatgacaggtggtccttagaagatatgctaagggcatgtgtttgtatttagcaaaaataaacatatctatactatattatacccatcgatatatattattatgaacagagagtttgccaatgttttattaattgttaaaacttgaaataaaattggtatggtttgaatgcagatgtacgaaaagcaaacgatgctagtgcattacaccaaattgtattgacaacctaaattactacaacgatatgatagtgctttaaaaattgatacctaaaaacctattatcatttgtgttgtcattttcgtaataaaaccagctttttctatttctacaaggatgacaatgagagatgcaatgaaggcataatcaacgttcttatcaacagtgacggagaaatggtcctttccgaagaaaaagcctcgcatcgtttgctttccgcacatctgccattcaaaccataccacttttatttttcaagttttaacaattaataacacattggcaaactcccagttcataataatatatatcgatgtgtataatatatacacatgtttattccagatgtatcaaaaaatttttatcttctttaatttttaaatatttaatatactgtaaaacttgtagtaaaataatgtatcactaaatgcattttaaaaaaaaactttattcgatatttagaaaatatatgatataaacatttacatgtaaaatactgtcttctaaaacaaaaataaggaaagagagtttgtttacgtgggcaataatggtgtcagaatcgccggcgtagacaacacaagagtcgtcgagccaggcccctttgactttgaaatcacatatcttctcctctacgttgttagccaaaaacacctcaagtttaggggctagctgaatcatcgacgatcttttcaccgtgtatagtagagcaccctcctccgtactccctcctctaaacacttgccacctgtcatgcatggtcatcatctgcaatcaccaaatcttaatattaacaaatctagctctattagtaattgtatatatcaagttatgtgctctgtttttaattaccttccctctcaaagttaagaccttagctccagaacaatccagcaagatcctcttgccgtgaagactaaacaaaggatccttcaccttgaacaataacttaccgtccgcactcgttatcacgaagttaccgtccgttatcttcatcaccttacggacgatcgccaaacctacagggtttggtgagcagtacttcgaacccactatcacacagggctgctgcatactttgttttcccctccaaaaatggatacactctctctcttttgttttgctttgaaatgttttttctttggtgtggttcttagtatttataaaataaacatctggctccaatatgttgacttttaaaagagaaaagcctacgaggataaatttcttagagcatctccagtggttggtcatctctggccatatgaatgtgtgtctgatagtatagtatctaatgttactgttttgacctacgtcatagacgtggcgtcatatataaagcaggtgggagagatagtagatacatgcattaaacataaaaagactatatgttcttcatgacttacttgttaattttttaaaaatagttgattaaatttgatctgaattctgtaacatttacaacagcataccgtctaatttattttgtattattacattaggttaaaaagtttaaataaattataggatatttgatgaacaaaaaaactaaaaaatattccaaagtatgaaaaataagattttagaaatagaaaaactaacaaaagaaacaattgaataaaaacaaaaaagtttcatttcttgtttttcacttcatttaaattaattacgtataaaaataacatcaaaagtacttcaacaatgacaaaatcttaacaccaataagaaacaattccagggaatactttgaaaatattgatgtatggacaaaattggcaaataatcatagttccatttcgtccaatcgaatatgcagtatagataagatttgagagagcctaaggcagccatattcaaatagcagacgttgtataattccatattgacgagatcatagtcgtgcaagaaatcatgaacgtaaaaaccttattgggatttccctaatgcagctttggcttgctaatacggtaatacctaatctctgacatgcaaaatatatccttgttctttattcttttttggcaaggtttatccccttcgctggttaagcaattttttggtaacttacaaattccttcattcattaatgataatttacatgacttaaaaaacgagtgttttatatatatagtacttgtatttttctgcatactcaaatagaaacaaaatttacatttataggcaagaacgagcagtagcggacccataaataaattttaccggggtcaaaaaaaatttataaacagtattttataactaactttcttataatatttatacaaactcacaaaaataaaatcaatttcataaggaaataaaaatagtatattaattgctgttattttggaaaaagtaaagaaatatataagacaaaaaaaacatttatttaaaactaaattgaggagaaaagagtaaaagtgtcattatagagatttgaactcatgttttgggggtgtcaacaccttggaatttaccaattgttctgctaattctaaacaaaattctatgcaaaaaataaaatttgactattcaacttgggtcaagtgacccccttcttctttactaggtccgcccttgagaacgaagtctttttgcccacacaagcttggtctagtggtagtgatcagactaaaaaaagttgtaatgagctatccaaagtttgatctaccctaaaaactactccacaaatgtgtgagtgttagaggttttcacatggcttcccctcgtcctgggattagtcagttctcatggtccattgacccaagaaccagctagaaaaagaaatcttcgtgctctggttcagagatcataaaatctgttgaaccaaatcatccgaattataaaaaataaaaaattgaaaaaaaagaacgagtttaaagttttaaacaatatataggatgttgaatatagatgatgtatatggttttccaaatttgaaacaaatgagctcttagacttttataatgatgtgtcatattttcgtaatttaatttaaccaacctcattcaataagcagctgttttgattattccataatccttgcatgaagccagtaaagataaccatggaattatatataagtcttaagaattgttttagtaaacaagtcaagatagctttgttttattatattgcatcatggataatggtcaggtcatctctggccatagatatgaatgtgtgtctgatagtatccgatgttactggttcggcctacgttttaaacatgacgtcatatgtaaagcaagtgggagagatacatgcaaaatcattaaaagactatataacattcttcatgactatatattttttaataattgactgtgtaatcttgattttgtaaaaatttccaaaaaatagcatctaattattttagtataattacatctaagtaattttttaaaactaataaatatgtcatatttgcctaatttaacctatatcaataaggaagcagctttgattattccataacacctccaagtagcaagaaagataaacatgaaattattggttggtcccaaagacttttttagttaacaagtcaagatatctttgttttcttccttcatggatttaccgtagattattaaagaaggctgttgctatcattttttttgttccactcttcatgttgctatcttgtagataaatatgtctgatattttttcatgttacaagttttcttacaaacgtgacggcatatatatgttcacaaatcaaacataaacaagacggtagaaaatacatacacgcatgaaacactattttcattacattttaaactctctctttttccttcctaaaatcgcctgtataacacataatggagagtgtaaaatgagtaacacataatggagagtgtaaaatgagtaaagaaagtaagcccccacttttaagaacctatttaatatttaattaaagttttgagtgctaggtgtagaaattttcaaatgaaatactatttgggttttcaaaaagttgtttgcaagtcactaatatgtttagaattctatgtcatattcaaatatttaaggctcaacgctaaagtctactccctattatcttattctgcaaatgtataacaaatcacaccatttgttattaaatcttcttcctgtaccatttatttggtttgaaaccttgacttgccttacttattagtaaaggaattttattttttttatatgcaaaggaatgaatatttgactaagtgttgttggaaagaattttgagcgttagggatcaatttcgcggcatgggctattgagccggattgagagaatggaaaatctcgatcttttgcggttttggctgtttgggatcactttaatgatggtcgataatcgttgtttttggataaatgaatgtgcgtctggtagtatccgatgttactgttttggcctacgtcatagacgtggcgtcatatataaagcaagtgggagagatatgtgcatgaaacgtaaaaatactatatattcttcatcactcgttaattttttaaaaataattgattaaatgtcatcttaattctgtaacatttacaaaagcgtaccgtctaatttattttgtataactacattaggttaaaaaaaattaaataaaataaattataggatatttgacaaacaaaaaaaactaaaaaatattccaaagtttgaaatataagattttagaaatataaaaactaacaaaaggaacaattgaatcaaaaacaaaaagttttatttcttgtttttcacttcacttaaatttaattacgtataaaactaacatcaaaagtacttcaacaatgacaaaatcacaacaccaataagaagcaattgcagggaatactttgaatattgatgtatggacaaaattggcaaataatcatagttccattttttcttttcttcgtcaatcatagttcaattcgtccaatcgaatatgcagtagagataagatttgagagagtctaaggcaaccatattcaaagatcaggcgttgtataattccatattaacgagatcatagttgggatttctctaattcagctttggcttgctaattcctaatctctaacatgcaaaacatatccttgttctttattcttttttggcaaggtttaatttatcctcttggctggtaaagcaattttttctaacttacaaattcattcattccttaatgataatttacatgactaaaaataataatttgttaagccattttgatatatatatatagtacttgtatttttctgcatactcaactataaccaaaatttacatttatatgcaagaacgagtttttttgcccacacgggagtggtctagtggtagtgatcagactaagggagattataatgagctacccatgtttgatccaccctaaaaactacttcacaaatgtgtgagtgtcaaaagcttttacatgactccccatgatcccaggattagtcatattttatgggtcgttattcgataaccaactagggagaaaagtccctgtaacttgcttcggaggtcatggtgtccgttgaaccggatcggatctccggagttacgaaaaagaaatgaaaaaaaagaacgagtttaaagtttcaaacaaagatcttcggatgtaacttgcttcggatcttcggatgttgaatatagatgttgtatatggttttccaaatttagaaacgaaggagctcttagacttttataatgatatgtcatatttgcgtaatttaatttaaccaacctcgttcaataagcagttttgattattccataatcattgcatgaatccagtaaagataatgatggaattataagtcttaagaattgttctagttaacaagtcaagatgactttgttttattatattgcatcatggataatggtcatctctggccataggtatgaatgtgtgtctgatagtatccgatgttactggttctgcctacgtattaaacatgacgtcatatgtaaagcaagtgggagagatacatgcaagaataattaaaagactatatatattcttcatgactatatttttttaataattgcctgtgtagtcttaattttgtaaacatttccaaaaaatagcatctaattattttagtataataacttctaattagtttttaaaactaataaatatgtcatatttgtctaatttaaccaatatcaataagaagcagctttgatattccataacacctccaagaagcaagtaacgataaccatggaaatattggttggtcccaaagacttttttagttaacaagttaagatatctttgttttcttccttcatggatttaccgtaaattattaaagaaggcttcatgttgctatctttttttcccactcttcatgttgctatcttgtagataaatatgtctgatatttttccatgttactagttttcttacaaacgtgacggcataaacatatacaagacggtaggaaatacatacatgcatgaaacactatttcattacattttaaactctctttttttcttcttataatcgaatgtatctcttgtcacaaaaacacaaataatacgatagatttaattatgtggtttcctaatggggttttgaatatgtccagaggcaatattaatagttatacatattttagtagtgaaggtagaaagttttataacacagaatggagattgtaagtgtaaaatgagtaaagaaagtacgccggtaagcccccacttttaacaatctattaggatatgatccgcggtatactgcaggttaaatattttatttatttttctttatcataaaatagaatttgttggttgttgttgtttgtgatgattaataattatcgataaggttgtgtatgctttttattgagtcataattatgatattagtaagtctaatatgtgttattttatcttctaagatttgacttgtgatagaccataccacgggataatattttattttttattcataatttgttttaaaaaaaaattatatagtttaaacttttggtattttcaaatttaacccgtggaacatatgtaatttagtaactttgtattaaaattacatatttaaatgtatcaaagaagaataacatttagaggtgtcaaagaagattaacacttatactataatgttgattttatgtattttttgtaactaaaaatttaaaattgaaattgtatttgttatgttattattgtttgttttgtttagtattgtatagttgtaatttgatagttaattctaggagtacatccgtggtatccaaatttgttccatctaaactcatagcaccatataaactcgtctcatccaaacccgtcctaccatgtaaactcgtctcctctaaacccatcccgctatataaatctgtcccgtgataactaaaaatcaaattgtttttatttaatatacttcgagtcaatttacaatttcaatctaataacaattttaatctaataagaatcaatatcggatcgttttgaagattttatatcaaattctttgaacaaaaaataacacaatttcttgttaaatattttgtatcttttaaattaatatatttcctatttgtattttttatattcaatatatttggttttgatatattttagaaaacctgttcaaataattattaaaatttgaatcccgaagatatttatatgattttttataatttaaagctaaatatatattgtttagatttgttgttgagattttttagtgtctattttttgttgcctttatttgtttgcaaggtctatcataataaaggtgaagttgcaaaaagatctgtaaagtataatatcgtttacatattgattatagaatttgtagattatttttaaaaacattttgtaaattatatgtttaattgtaatagtttaaaaatttcagaaaacaatattcatatcgatattaaatttattttgaagtttcaaattttataaatatttgaaatttataagaaaatgacaaaattatgtttaatttcatgggacggggttatattgtgggacgagtttgggtggataataacatgggatggtatattacggaaaaaaacttaaaatgaaaaatcataatatctatatatacatttttgcagccattttatgaaataaatcctatagttgagacttatttacaatggctgccactgaattttaatgtttgtttttgataattaaaaaaaaaatcttcgaattaaatatttgatatttaacaatcttcccaaaatctctccatattaactacacgattatttactaaaagaatacttccaaaatatttaatatcatttaattactacaaaattatcatttttgatattgcttttctccataactataacaattcgattataatcatcaaagcgcagagatataatctgatagcatttaattactacaaaattacaaaatatttagacaatgattcataaacatatcataaataagatcaacattaataaaataaatgggtttttttttacaggacgggtttggcaggacgttacttaataacatttataaactataaaataaaattattttatagatagatacaatttataaacttttatatatactaactttaaaaaataaattattcccgcggtataccgcgggttaaaatctagtaattatacaatcttaaacactaaacaaaattaacaatattaacaaaacaaatacacttaaaacttcaatttttttaaaacacatctcaattctttataataagtttaaacattaaaaatattttaactttatacgacgggtgaaatttttgattgttatatctagaatttctcccgtagtatatcgtcccgtattaatatattttatatatatttataatgtttaaattttttataaaattcaatttataattttcaaaacttcataagttttaaaattataaatattaaaaaaaaaatttaaagctaaactttataaaaagtttgcaaaattataatatttaacttttgataaaaagtttaaatatttataatttttgaaactttgtaaagtttctattctttaaaataaagaacccgagtaaaccggataactattttaattttggacgcctgataaatcaaggttcctgcttcttcgtaactgaaatcattttggtcctttttatagtatggctctgaaccaatgtctaatttttttaagcaatgtggaacattatacacatattatttcttcatcgattgaataatatatgttcgttttaaaaaatttgaattacatcatatactgaaaaaaatataatattttattaactatttatattttatataaattcaaaataaattaaatataagatcatataaatttcaaagaagaatcatatatttatttttaaattaggtaaaaatgttttaagaaattagttaaggtaaataacaaatatggttagtttagagatattatatatattaaatttggtaattaaattaatttcggttttaattatttttttggtagaaaatggtaataaaaaccaattatgaaagatcctattgaagattttcgggtcaaaatcaaataaaaaatctgacccaattgggtttcttaaaatgtacttcaaaaatgttaagtagatttaatatttaattaaatttttgaatgttatttgtagaacttatcaaattagatgcttttttggaagaaattcttttttgtgctatatctggagaaattccaacaaatagcacaatttcatgattttcggacaaaaactagtacttcaaattttttttgacaaaaataacattcaaataaatattttatttttattattaaaattaacaattaagaaaattcaaaaaatacacaaaattcatcaccaaaattcctgaaaatattttcccgccaaaatatttgcccccaaaaaagaaatccgtcaaaaaatttccacaaaaacaaattacacccaaattttcccccaaaaataagaaatataggaaagatgttacaacatttaggaaggatactaagcaatttaagaagggtttcacgaaattcagaacttttattttttgtgttatttttcttgaatttcatgaaatcctttctcaatttgtagaatttttcctgaattttgtagaatctttcctaaatttcgtggaatcctttcctgaaatttaggaaggattctacgaaattcaaaaaaagtttcactaaattcagaaagcgttcaacgaaagattttttggcgggaaaatttgacggattgtttttttggcgcgaaacttttgacgaaaatttatttggcgagaaaatttggcggaaatgtttttaacagataaattttgacaaaaaaaattggcggaaaatatttacttttatttacttattttaattaaattagttatttatatttaatatttaattaaagttttgagtgctatttgtgaaacttttaaaatgaggtgttatttttggaagaaaaaacttttttggtcctatttgtgtcaatctcccaaagatttgttatttaatattaatatgactaacccaccatgttgctgaatatgttgcggtggccaaccatgttggtgcattcccatggcttgatatggtggtggctgcctcggacaaccaaaaccttgttggtgatgaggaaactgaggaggtggtggttgcgactgcataccttgaggcggacggaactgcataggtggtcgaaccgctaagccgtattgttgttgtggctgagatggccaagatggtggctgagtttgatacacttgtggttgtggtggtggacgtggacccgggattggtacaggttgtagaccgttaactttaggagcattatgcgtagaagggccagttgcgaatagcttatggggtctgcttctttgggaatttgcagccaaaagcctctctgtaattcacaaaagtaatttgttattgttccaatgatggaaagatactgaatccacaagttaagacaactacaagagtaagagcctaaccttcaggagtaccgtggcgctctcctttggtgtctttcttgtatgcataagtgactgttatttgacgattactcagatattgtccagtcattgcctgcatgcaacggtccaagaaataccaccattggattatgtgagtagagacattttttatcaaaatgtttaagtcacaaaataaccatatatagaattacctcaatagcagcatcagatgcttcaaaagagtcatagctaatgaaaccaaaacctcgtgggtttccagtatcgggatctcgcattatctgaaaaaatgaaaatcagattcttttcaaacgaatggtatctatgaacagatcaagaatatcacgaaattaaagaacgaattttaccttaggatgatcagaaattacaccaaacgcgctaaaagtatcatgcaacatcttttcatccacatcttgtaaaaaaaagaagcaaaccctagtcagctattgttgaaagtactaatttctgagtatagtaccatcaagatacttacaggatcaaggtttccaagaaacaggttagcaccaacatccaagctcttcttatcttgagatgcctaatacaatttccatcaagaaaccaaatctgttagaatcaaaactcacaaaataatcaaatttataagatacgatttaatacctttttaacacgtataggctccccatagagcttaatcatgttaaaaaccttaattgcctacacacacaaaaaaaaaactgaaatttgttaatcattgtacccaaaagaagtctataaaaaaaactcctcacataaaggaaaatagtaacactacttacatagtcagcatcttcctcattatggaattgaacgaatccaaatttttgttgaataaagacgctaactgatacaaattcaaaaaacagaggagataaataagctaatgtcagaaatatgaaccaaaccaaaccctaaaccattcgaaactaaacgagatacattgatattaacttaccaactcatccggcttgtacaaacaattcccaaagcaaatcttcagaaatctaaaaatacaaagaagagaatggatcagtttcaccataaatcattccaaaccataaaattacttttctttacgtactcagaaagatgcacaataaaataaagaagagagacatggaagttggaagagagatggtggcgtcttggttcctctcagtggcgtgttggccgagaagattagctcatacaccaggagttattcgagtcgtcatcttcttctctttgtttccttactctgtctccggcaaaaaaaaaaaagaaaaaagcctcccgattgagaaatctaagggtttcagtttcgtgtccgtcacgtctgccgattatcttacttctaacaggtggtgaagaatgacggtttatttagagtggtgcgcgccgccactaatgggccgatatgcccattagacatattttcaccaaaccctatagtttcatttttttttttttttttatgaaaccaaagttatatcttcaatatatactaggtaatgtcccacacaacgcgtggattttaaaatatatataaaaatatgtaatttacatattttttatctaactatatgcaacactctataactatatatatatatatatattatacaaacatttttaatttaaaataattcatttatttatgctgaaaaaaaaatagttgtttggattaatttccaaaagatagttttccacacattataacatagtgtttgtagattgcgatgaatgcaagacttaccaaactattttctctacaaccaatgtcttactcatgaaaattagcatatttttataaattggcataatgtattgttggataggaattattatttctatacaattttaaatgaaaacatttgaattcttttttataaatctttgtaaattttgattttagagaaatttacatttgcattagaattgagtcaatgaatttgagaaacaattattgaccttattgttacatgttaaaaatcctaaataattaataacatacataatatatgtactatttcccactccaagagattgatctcatactggtaatttgggggtgtattattagatatgcataattttttttttggggcatagatataataaaataaataaatatgaaataaaaatattttttgtctttgtttcttatatgattttagataaaatattttatatttttttattttatattttttgtctttgatttcacctagatatcacaaactaacaaatatagtagagaccagtaacaaatcaatttaagagatgttcataagattgaggaggtatttgtatattccaaagagaaaagagtagattgaggaggtatttgtatattccaaagagaaaagagtagaaaatggtaagaaaaacaaacggactgcaaacctggtagataatgaaagaaaaatcaggtttcaactaccgtaccttatccattgcagtcattgctccatagtcgagtagagaaaaatagaaaatgaaacataaatttggcttcttgtggtggtgaactctttagttccatttgcaattttatttttctatataatatatcatttggattaaatatgtaaccaagattcgggaaggtggaatgactcacttttgggatttgcataaaaccataatgatgaaaaacggagatatatatatgtatataaaaaaacgtataggcattgattgattattttgttgtccccattattagtttcggtctaaatgtactcaacttaatgtaggatttaatgtctttctaatttgtaaccattaaaattttcaaaccaaaaaatattagtatggttttaggttttttacaatagtcaagtggtcttactaaccttaatcactattcattaattacattgatgaatttttatttctttaaaatgtatagtagattttgtttttcgttttatatatgatttttttagcaaagaaggtcaatccactagaaagtgaaagctttatttgatgtgaattttttattttaatgaaaagaaagccaaaatgattaaaaatcaacaaactgctatacatattgactttcttcgtgcatttcgcatctcaatttacaacaaactgctatacatatgcaaaactaaattcattattgaatttttaagaaaaatcagttacctaaatatattttgaacgataaatcaaaactactattattgacttcacaattacaattattatgcaacttttaagaaaaatcagttacacaaacacatgaatgaattgcataatataaaaggagttagagaaaaataataatactaatatagaaagaaaataattgatatgaaatattgccgtttctttgagtacatgattatcatatttaatacaaatttcagttttgtaattgggtatacacttctgcttataaaatgcaagacgctgcataacattttaaaaaaaaacatactataattttgtaaatctagaagttaaattaattaaaatacagatattattggaaggggaaaataataaaaatacagattttaaggatacagatttgatcatctattttattagtttttgcaattctaaaaattaaaattattaaaatacatatattattagaaggggaaaataataaaaatacagatttgatttaatcatctattatattacagtttacaaagttaaaaggttaaatgtaataaactacagatattgttagaagggaaaagggcatttctcaaacatcaatatctttatatataaattatatataataaattttatggaaaaaatactaattctaaaatcttagtgtaaacgataaattatatgaaaaaaaaaaattctaagattttttatagcactatatatatttttgtatttaaaatttttgtgtatttaattggttaaatgttgagatattagtgtatatattaaatgtcaaactaataaagttttgtagagaataaatatttaagtattgtatatgccacatgtagtaaaaagtaagttaaacttattaaaatacatatattattggaagggggaaataataaaaatacagatttgatttaatcatctattagattacattttacaaagttaaaaggttaaatgtaataaactacagatattgttagaagggaaaatggcatttctcaaacatcaatatctttatatataaattatatataataaattttatggaaaaaaactaattctaaaatcttagtgtaaatgataaattatatgaaaaaacaaattctaagatattttatagcattatatatatttttgtatttaaacttttgtgtatttaattggttaaatgttgagatattagtgtatatattaaatgtcatactaataaagttttgtagagaataaatatttaagtattgtatatgccatatgtcgtaaaaaaagaatgccaaatatcatgataatagagcttcttacaaaaaaatcttatcttattatatatctttatatataaattatatataataaattttatggaaaaaaactaattctaaaatcttagtgtaaatgataaattatatgaaaaaacaaattctaagatattttatagcattatatatatttttgtatttaaacttttgtgtatttaattggttaaatgttgagatattagtgtatatattaaatgtcatattaataaagttttgtagagaataaatatttaagtaatgtatatgccacatatcataaaaaaaaatgtcaaatgtcatgataatagagcttcttacaaaaaaaccttgtcttattatataagattcacatgtatttgaatatatgcacagaagaaaacttacaatatggattcaaaaagaaagaaccaagaacttagcacatcagaaaccgcagatccctctctctcaaagacgaataaaaagcaaaagattgatatgcaagaagcgatgaagaaccaaaacgaggtttctctgttacttgtggggaaagtaatctctgccgtagccaaaaactcaaactgtgtcttctctccggcatccatcaacgccgttctcaccgtgaccgctgccaacaccgacaacaaaacattaagatctttcatcctctcttttcttaagtcttcttctaccgaagagaccaacgccatcttccacgaactcgcttccgtcgtcttcaaagacggaagtgaaacaggcgggcccaaaattgcggcggttaatggagtgtggatggagcaatcgctttcgtgtaaccccgactgggaagatctgtttctgaacttcttcaaggctagtttcgctaaagttgatttccgacacaaggttagtttctgatttctctacttttcaatttcaaatataatatgctttgattagataattaggttcagaatgagaagatttttgtcaatttttatgctaaataaatatatagcttttcgatttcaaatttgcttgattagattaggtcaagagttatgtacttattgcactttttattctgtgatatttggttgttttctattatgtggtttagggtttatggattttgtgttgttgttttgaaggctgaagaagtgcgtctggacgtaaatacgtgggcttcacgtcacaccaatgatctcatcaaagaaattcttcctcgtggatctgttacaagcctaactaattggatatatggaaacgccttgtacttcaagggagcttgggaaaaggcattcgataagtccatgacaagagataaaccatttcaccttctcaatggcaaatcagtctctgtgcctttcatgagaagctatgagaaacaattcatagaggcttatgatggtttcaaagtcctacgccttccttatcgacaaggacgtgatgataccaaccgcgagttttcgatgtatctctatctccctgacaagaaaggtgaactggataatcttttggagagaataacatctaatcctggattcttggatagtcatattccggaataccgcgttgatgttggtgatttcagaattccaaaatttaagatcgaattcgggtttgaagcttcaagtgtttttaatgactttgagcttaatgtgtcattacaccagaaagctttgattgagatcgatgaagaaggtactgaagctgcggctgctactactgttgtagtagtaaccggcagctgtttgtgggagccgaagaagaagatagattttgtggcagatcatccatttctctttttgattagagaagacaaaaccggaactcttttgttcgctggtcaaatcttcgatccttctgaactttcttctgcgttggaccgggcttaaccggataagggtttggtattttagatttagttctttttataattttggactatattttgatcaaacaaagtttgttgggtttaggggtttaatttgattctggttggttaaagtttttggaaaatgtttaatggatagaatcgagatcaaacaaattttgttgggtttaggggtttaactagattggcgattgctactgatgtcgttattgatggaatgatttaaataaacaatttaaataaataatttaaatttctcaaatatttttacatacttttttaaaaaatgggataagtgatttaatatctgttataattttgaaacttggcatacgtcaaaactcaaaattaattggaaaagctaagtaactatagttgtatcacaaaacactttgtaccaaaaataattatatcataaaaaactttaaaaatgaaaataaatatttgacaaatgttaagatattatggtttggaaagatgatttgttatttctcaattctataaaaaatgcattgtgttttattagtagtagctcaatctcagtgagtgtgtatctctctaattagttacaggtcagaatgaaacattgatgtagaaccagcttataaatagcgattctccagtcatcgccgatagcgataaggtcctccttttcttgagaacttctacgacctcaacgtcatcttcatccatatcgtttctttagtttgtgagagttgaaatgaaagcgttttaatttgtgaacatatctcacttctgtttaatctcttgcttacaaatcatgaatcttttattttaatttagtcgctatttactttcgtttaacttttgaacaacacaaaacaaatccgtttcattttttatatctactttattctcaaagatttgtttggagatatcgggatcaatttaaaatatttcctttttacatagaatgacagctcttaggtctttttgttaaacgttttaaatgccgccatgatcgctttcgggttaagtttggtgaagccatgcatgtgtggtgtttgggttcgtgattgtttgtgttttgtgtttgtgattgtttgtcttttgggtttgagattgccattgccactgaccctctctcttaaaaagaggagtcttaagagaagtcggagataacccgaacctaaaattattcaatatcatcactaagatattgcaagtgaaaaacggaaaccatgtgggtggcggatctaaaaataggactcttgaccagccgtaatatgaggatgtatatattaccaaatgatccaaccgatgacaatgacaaaaagttctacttattaaagttaataattagttaggatatgtgtcccaccaactaacactgtagatctgccacttattgtgacaattcttgaagtaacccaacgatgtattctattatgaaggttgtgggcttacgtttaaaaaaataattaaaaaaataaagattgtctcataatacgaaggtatcatttaattgatgatattaatgtgggttatgagcatgaatcattgatgagttctttcagatttaccctttttttttttagagttgaagtgattatctatcaactgcaaaaacgatgtaaccacaaagattatgaactacaacatgtatatacagatccaatggagatgatgacatgatgttgatgtgcataatgagcatgaactaatcgatgagttgctcaatgtcatctaaattgtctgaaaaaatattaagcagtgagaaaaagttatgataagtaaacttgaataaaaatgaatgcgaaaataaatttgaaattaaataacattaaatgatacaaagatatcatttaattgatgatattaatgtgggttatgagcatgaaccattgatgggttttttcagattcatcctttttgtttccagagttgaagtggttatctatcaactgcaaaatgatgtagccacaaagatgatgaactacaacatgtatatacagatccaatggagatgatgacatgatgttgatgtgcataatgagcatgaactaattgatgagttgcccaatgtcatctaaattgtctgaaaaaatattaagcagtgagaaaaaattatgataagtatacttgaataaaagtgaatgcgaaaataaatttgaaattaaataacattaaatgatacaaaggtatcatttaagtgatgatattaatgtgggttatgagcatgaaccattgatggattctttcagattcacctttttttttccagagttgaagtgattatctatcaactgcaaaagtgatgtagccataaagatgataaactacaatatgtatatacagatccaatggagatgatgacatgatgttgatgtgcataatgagcatgaactaattgatgaattgcccaatgtcatctaaatgtctgaaaaaatattaagcagtgagaaaaagttatgataagtaaacttgaataaaagtgaatgcgaaaataaatttgaaattaaatgacattaacatcatgaaaaattattacgaactccatgtttgaagctatgtaataatcattgaaatagcttctcgaaacctaaatggagagattgaaagtcacatccggaaaatgaatccttgttcccccatgtaaatctatgaaggtgagttttgaagttatatggcaaaaaagttgatcatggcggacgaacctttgtacttgtgtaattctgaaaacaaatgataactgatagaatgaatcaaaataaatgaacttaggctataagttcattgtaagagttaaaatacatgaatcaatggttataagctccttttgaatcagatcaaagtccatgacaagatatcactaaacatttcagctaacattttcaaagcattttcaaattgagccacgacaaatcacattaaaaaaagactaaatagtctaattcaggttctgcatatacataactaccatatctatggattaaatccttgaactaaaaatgaaaattgaaaataatcttataggctctctagagtttgaatataagatcaaggaaatataaaagcacttctcttattaactttagaaaataactcaaaaccaaagatccccaatctctctcttaaaattcttaaaggtataccacacctaagactaatcctaagactaatcctaatcacattaggaatatgtttagataactcctaaacatataacctttagagaactcctaatgattcccacattatctctcttttaattaataacttatcactcaagttatcttcaagtttaaaccaacatcctcccccttaagcttgaaatcttcctttggcacatcttgaactccaatgagatccctcatttctccgaacttgactcttccaagcgcattcgttaggatatcagccttttgttcaattctgggaacatgttctacctcaacttgaccattctctacacattctcgtatgaaatggtacctccgatgaatgtgtttgcttctcccatggaacaacggatttttagttagtgcgattgcggatttatcatcaactcgtatcatcaccttctcacatgttgttcccatgacttcagcaaacaggtgttggagccaaatggcttgcttagccgcttcagtggctgcctgaactcaacttcacatgaagaaagcgccacaatttgttgcttctaagaacaccaagtgatcggacactcattgtaatatgacttccctaagatcgacactcttgaggttgagtaggagataggctttgcatctaagcgatcgtgagatcactcaaaccaaaggatgttgagcgaatgtcgcacaaaggttgcggatagcctttgatttaccggtggagcgatgggtcacacaaaggttgcgaaaagttctttgatttacctttgatctagcttaaaagagtttgagaataaaaagattgatgagtttacaaagaggaaatacaagagtttaaatagagaagaagaaaaggggaatagttagtcttggaacaaactccaagataactcggaaaaggagaaatcataaatgaaagtttgaacacaaaatagactcttggccttccaaatttttgctcctcttattgggcttgggccggattgataatgggggttttgaaagtgttatttaggcctcgttaaaaacctactaaggaaaacccaatgggacaaaactttagcaggcaaaaagagcacccaaagcaacacttagcccattaccaatcgtcttggaaagatatcgcaaccatcgtggttattgtccaagtgtttgggtagtccgaaatagcttggttgagaagtttggtcttcgagcgagtcatttgtcttcttggttcagctaaagcttcctccaaagcttcctccgctacacgctgctcctcggctacaagtagttcctcgactacaagctagtccgctggttctagttccgggtggtgctcgggaatagttatatcacattatgataaaaacaaaacatgaccgcctatactcataccatcatccacatccacgttatggctgctatcactataacctaccaaacccggttgagctccttggttgaagtaaagaacaagataaggcgttcctcgaagaattatatcaaaagccaaggcagttattgcaatcaaacatccaattgctgtagtacctgtaagtttagaaaaggagactgcagcagatgggttcgttcaaattcaacttttttcccagaattttttagtggttatctatcaactgcaaaaatgatgtagccacaaagatgatgaacgacaacgggtatatacggatcaaatggagatgatgacatgatgttatggtgaataatgtgcatgagctaattgatgagtttcccaatgtcatctatattgtctggaaaaaaaattaagccgtgagaaaaagttaggatatgtaaactcgagtaaaagtgaatacaaaaataaatatgaaattaaataacattagcatcatgcgaaattattacaagctccatgtttaaggctatgtaataatcattgaaatagcttctcgatacctgaatgaatccttgtttccccatgtaaatctatgaagaaggtgggttttgaagctctatggcaaaaaagttgatcatggcaaactaaacatttgtacttgtgtaattcgaattctgaaaacaaatgataactaatagaatgaattaaaataaatgaacttatagcataagttcattggaagagttaaaatacctgaatcaatggttataagctccttttgaatcagttcaaaattcatgacaagttactactaaacatttcagctaacattttcaaagcatcttcaaattgatccacgacaaattacattaaaaagactaaatagtctaattcaggttttgtatatacataactaccatgtatatggattaaatccttgaactaaagaagaaaattgaaaataatcttatagggcctctagagtttaaatataagatctaggaaatataaaagatcttctcttattaactttagaaaataactcaaaactaaagctccttaatttatctctcccaaaactcttaaagatataccacaccttggcaactcctaaacatatagagattcataagactaatactaatcacattaggaatatgtttagataactcctaaacagagaacctttagataactcgtaaagattcacacattatctctcttttaattaataacttataaatcaagttatcttcaaacttaaaccaacatgtccaatgtcatgtgatttagagatatttaataacataacttttaaaatagtattctaattaccaacctcatttcctccaggatattattttgaacctaaacagcacatactagaaaacatgagctagaccttgcatattaatttggaggatcagcaaagataccatatctaacagagttgcatgagatcgatgtgaaatatatatttttattggtattaggaaagttaacaattgtatatattttcttattcttaaaaaggtaaatttactcgtatcataaatgtaaaaaaacttgttagacaaattatattttttatataaataagcatagtggactgattaataaaactgaaagaaattattctactacttagtgtttctcaaaacttggcaagactagtagtatgatttattgtgttttgaggctttgatatccaatatactattgtaattaattgttgtgaaattgaagtagtatatttgtgttagtttaactagaacggtgtgaagcattgtcaaagaataatcttatttcttttatagttttaatcaatatagttttatttttttgtgatttggtcatcgttaagatataaaattaaattaactcataatataatcttattgtcttaatcgttttcgcagctttaacatttaagctaaaaaattattttgtaacttttaattagacgaagcacaagtacagtcctacaataagccattaactataacctaattcctactaacgcgggataaccacaacctagtggaatcgaactccggtagggtttgccaaggtggaccgttaatcactagactaaatacactttccttaataacattctatctcaaaaagaatagtataacattcttattgttgtatatttgttgacatatcatgttagtctattattatttaatgacattttattaaacctaaacaaaattaagactttttgttgtgaatctcagtttctctctttcactcaaactcgtttatggtttcattgtcttagagtaaagcaaaaatcatttttcttttaatcttctacattgttaatatcttggataatcttttagctcttacaacacacatacttataccacatacaatacacacttgcacttaattattagtgcattagaccatacccctagacctagaaatcacatcagctactctactacacttgggactctaactccatgttttgctccttttagacacttaacatcaaccttgagtctaagagacaacataattacctagttgggtcctaataatccgtttggcccattattacaaaacacaacttaacaaaacaaaccaactctttttagttgattttgttctttcctcttcatgtgtcgttgaccttcttgtcacgacatcttcttcttccttttgctccttcttcactcttgaagcttcttctctattcttctcttcttctcatgaagctttccttgttgcaggatttaatcttaggattcacaattccaacacttttgtataacaaatacaatcatattaccaatatatattgaatagaattccgatccatagttaaaaccaaaattttaatctatgagtttatcattatgttattttactatgtctacttgtctagatataaaatatgatttatatttcttctataacattatttcgatttgatctagtaattgtttttttattttgtatgaatttgatcgagtaatttgtattcatatttctgaaatctttatacatcatgaaaaaaattcaagtattttttagtgtatacttgatgagatgattcaattttttagaagaaatatcaaacagatacgaaaagtgtttgaccaaaaaaaataaaatgaaaagtgcatgtaatattaaaaacacttttgaatactgtaggccaaaaaataactaaacaaaaaaaaatcgcagaagataacatcaaaatttacaagagtacaaaaagaaataaaatgactatgacgctagacccaagagtaaccattctaaagacgggtgtgattcttcaggttacaaagctttgatcgtatgaagagttgcaacgaataaatcattccaagtgtcggtaaggcccgggaggcaccaatgcatgcagtcatcgtgattctttccaccagctgctgccggatgagcgtcggctctgtactcgctcattcgagttatgtccaaaacgtggaaggcgcttctactcttgagggagttatagaggtgttgattcacgagacgaacctctacatttgttccgttgttccccactgagaaaaattcctcaacctaccattaaaatatgaggctgattataagcgtctcctaacaatttactagactaaagcttaagttccaaaatctctcagctcctctacccaatatctagccagtcccattatcttatttgatccctggttcgaacttcgtcgtatccatactggccagaccaaactaatgatttcatgtagcttttcatgagtgacttggcatgagtatgacattccacatgctttataacgcagattaactatttaatcaacgactaaactgatagaaactgacttacttttccaggtaacaaaggttgcagtcgttgacaagtaccaccttggtcccagtcacctccttcaaagtgcctaggtgattgtgtccggaagaatatgatccctccaggtcgctttgttttctccacaaaatttacctgttacaatggcggaacgtcgtataaggatcagaatatttcactaccattactttatcatatcgcacagtttggtgtttgctcaaaaactgattcttcaatacaaaacgctgtaaagtcatgcaatacttgcccaaaaatgtcatagcccatgttcattttgaaaacagattatctagtagtcaatggcagtatcaaatatctcaagttgcgttatagtaacacaggaaaacagagaaatccagaccgcataccatattgtttagaacccggtctaggccagtagcaggaggtataggtggaagtattggccgaccgccttcaaagaaaagcataggagattttacagggtcaaattttgatggcgcccaccaccttacaaagagaaagacaacaaaaggttagcaacataacaagtccacacaacaaatttctgtttaactgaaagatgacaaaccaaggtatcatttaactgatatgtaacaagactatcattccctcaggaaattgaatgcaatgctcaacattaagattcaagcttttaaaatcttgaatcgccagtatgtgaagagagatatactgcatatattttggcaagttgaaggattttcattacgtgaagcgtgacagattcatatatttatatctgcattcacttagagtagtagatcaactggaacagaaagtagctcaaacttgagaatttcccagtttccactagacattactatctaaatacaggaagcatgaaccagaagtagacgaatttagtgactatggtcatgtggcatcgattcaatgttgggctaaattagatgatgaagtacttaacaattcaaagtagtttcatctacatcagccaagaaaatgaaaagtgtactttaccaatgcccagtgttcaaaatgagaatgtcatggaaactcgaagccttcgcccacgagctgtctggaatatcaacatcaactctatagccctctttaaatccaagagattctaactcaccacccttagcattggctgaccatctaaaccgtcagcaagagaaaacgtcttaaaaccatataaaaccatgctattcctacactatgcataaccacacagttgagaaaatgacaaataagcatgctaacaagaaacttactgatggagaatactatttaaagatcaaacgaggagcaagatataaaagccagagaagcaactacaaatacgaatctctgatacaagaacaccaaagagaactcagcttacctaccataacgagccaatagatttgttcgatgatacgcgatagtcaaattatactgcgaaaacgtgaatccgcgatctgcaccggcaggtcgccacttcttcaattcacccgtcacactctttaacatacagaataaagatacaaacatgttcctattcaatgaatcacccacaaatcctgcactgttcaacaaaactcttaagatgtacaaaactaacacctatcaacaaaatcacactccatgaatatcacatctaattctaaacaacaagaactagtaattgcttcaaggaggcaatgattttgagagctaaaggcgtaccgatgttggtattgcgatgagactgaagaaatttgagtggatcaaacgaaggaagatcacagtgtttaggtttccatcgccaattagatatctcgaaaccattggttttgttgttacgaatacaattccatcctttgaagatttctttacaactactggtgtacctggtggatctggggttggggtcgtagatccaggagccttcggagaagtcgcaagtggcggagagaggtgagagggaaccgtcgggttttggagggaagacggtggcggagcggtgagttttgggagaggagagggaagcgcgtttggatagagagaggaggaggaaaatggagatgaaacagagaagggagagtagagggaagagtgagggtttgttgtgtgaagttgtagccatggctgtgtctctctcagaagctctcagccatggcggagattttggattttggctacttgagttatttgattaactgatttaattttattatatatttccggaaaatgtcaaaaagaagtcctcaatttttaaaaatgttttgaataaaaaaaacactagctttccaatagaccagtgttttcatgctcgatccagatcgttcggtctgaccggttaacccgtgatccatttttagtttgagtttagtattaatatccgacaaatttaaaactaatgtttttaaatccgatccggacggtgaatcagactaccgatctaacacgtggcgtgaagctcctaatgtgtgggtaaagcaatattacccatctgccaatattagtcatggagaaatatttgtagcaagatgtttcagactcttcaattccaccaattaggctaacgtttcggatccaaaactccaaacttgggagcatatgttgtacccttttgaagagaaatacaaaactctgatctcgaagaggatagtgattaaaggacaaaagtatgtggttgtgcaaaatcgcgtggcttacaaggcaaaagaagatagatggaaagctataggaatgctgcattatttggaaacatgatggaacttactttcttgctatggtatacaaaatgtgttatatcgttgtattgatttaccaaaaatccaatgcttcaactctaaaacaagatactgggaatctttgaagggttaggaaggtctgccagtgtttgacgatgatggttgtgttagattggtagattatagtggaaagatgactcttttgtgggataagtgcgttccttcatgtagaaacaaaatgatttagtgtgttgtgattgcgcttgaaagacgaagtactcaagagatttggggaaagattgagtgggctgatgatgttcttagtacagtccttcttttttatgattttgtttgtgcgctcaggcccgattattgggctgtgcaattggaactttgaatagggtccaatataattttgacatttttcttcagtatttaggctaatttgtattgaaacaaattagaaaaaacccaaaaaatttaaattctgtttatatatattttttttcaaactattgagaaatatgtccaataattaactgaatcgggcctctatgctcttactattactactactttgatgaattgacttgtgagaaggcttaatgtggtgaatctctagtgattgtgggttatttggttttgttgtatgattcagtgtgttttgacattaatacaataggcatcatttcacttataacactctgatggttagcttattttgtgctctgctaagaggcctatgaaagtctgttctgcctacgattgaagagtgtgtttagtgtccaagtgatttgctttttattccttagttgcagaaaataggttcttgaatgtgtcttacaaagttacaatctcattatcacagatgcaaatggtttcgcttttcatttgtgtttaagaaaaaaaaccggtacggagtgaatcatgttgaacctgcaagtccggccgtattggattagtccaattaattgacatgcgtgtaccaaccaacaaagaaattgccacagaaacattaagggcttgactcgtttaaacgcagcggttgtgggagtttgcggaaatgggcaattgcggtttcaagcgttatttagcgttttgaccgattggtttagcggttgaaaacatgtgcgtttgcagaagatttacgactggttgatcagcgggtacgatagcggttaaaccaaaatttaccaaaaaaaattaatatatgatttaaaaaaaaaatttaaacaccaaaaactagaattatgaaaaagtataaatttttaaacataattaatgatttaaaactataaataattattcaaataaattttacgttgaaaacaaaaataattattaatattgaaaatttaaagttagataattattttttttagaattaatgtgaatatatataagacttgataatatatataatttaatttgattatttttcttttttagtttctttccttttttaaattaaccgtaaccgcccacaaccgcaaacgcttgcgggaaagagcttttgaaatccagcgatttcgaacggttcgaaacgatatggaacagtttctatgattagtaccaaccgttaacaaccacaactgaccgctaacaaccacaaccgaccgctaacaactactagacagttgttagcggataaaccaatcaagcccttaaaattctcagttttataatttctaaacatcatataggtctcgtacctttttggtaacaattattcccataaaatcacatcataacctttccacattataccattaatactcgaacccaaatatcaaaactctaactaccaaaaagtcgaataatcattgctaataataatcaaactgataaatcaactaaatgacgaaaacacccttcaccgaaaacacgtttgcaataacatcccgtggacattacagtctttcgccacgtaaaccatctcctccagcttcatcaagcaaaatttgttttaatgtcttcttcttcatcaccttttcgtctctccactcacactaaaaatcactctccattttgattttcgtatctctcgtgtcacactcacacaaaacacaatcttcctcaaaaaaaattttgtgcaatctgatttgattttcactgtctttctaagtttcgaaacggtggattttgtccgtacgtggttttgattctcgtagatgtcgaagctctgacgtaagattagagtttcgatttctaggtttcttataactatggcggtggaatatgaatgctgcgggaccagcttcttcatacacatcgctgtgatagtgttactagtcttgttcgctggactaatgtctggtcttactttgggtcttatgtctatgagtctcgttgatcttgaggttcttgctaaatccggtactcccagagatcgtatccatgctggtacttatgattctcaagagattttgattgttgtttttgctttatttttggaatcttaaaggaatcagaatctttagcatgtgttagtttgggtttagtgcttctctttgatggttcacaagtgggttttggctttgatgcagcaaagattttaccagttgtgaaaaatcagcatcttttgctttgtactttactgatatgtaatgcagctgctatggaggtatatagtattaggacttgaacttatttggttcttgaatgttatttttatcttagactcttagtaataataatgacttttgtatttcaggcgcttcctatatttcttgatgctcttgtgacggcttggggtgccattttgatttcagtgacgctaattcttctctttggtgaggtgagatttgatttttttacttctctgtgtatttgatgccaataagtcaaagttcatgtgtctgtaatgtaatagtgtgtgatgaagacaattgatggttgatttcgttctgcagatcatacctcagtcagtctgttctcgtcatggtttagctattggtgcaacagtggctccatttgttcgtgttctagtttggatctgcttaccagttgcatggccgattagtaaggtgattatatgcacacttgatagcgcttattagttgtgcgggagggtccgagagcgagtgcctgcacatagattctttgtcctgatacaatctttgctgctgtatatatttccagctgctagactttctacttggtcatggtcgtgtagctcttttccgaagagctgagctgaaaacacttgtggatttgcatggaaatgaggcatgtcttcgaattctctgatatctcaaattttgagttttgtacaataatctccaatgtctttttatgttttgttgttagccgaataacgtagcatgccaattctttcaggctggtaaaggtggagaattgacacatgatgaaacaacaatcattgctggagctcttgaactatctgagaaaatggctaaagatgcaatgacaccaatttctgacacttttgtgattgatatcaatgccaaactagacaggtcttggtttgttcaaccctcttcgcacattccttaatcctctaaatcatacaaaacttagtttctttttccttcgccagggatttgatgaatttgattcttgataaaggtcatagcagagtcccagtatactatgagcaacgtaccaacataattggacttgttttggtaagtttctatctcatgatgggtaaaacaaaactcttctgtattttcattattgtcctcctgtatctgcattcaacggctcccaaatttatctctaggtgaagaacttattgactatcaatccagatgaagaaatacaagtaaaaaatgtgactatacgaagaatcccaaggtaactttaccatttagattttgattaccaaatataaacgattgaagacttgttgaatatgcttttgattgcttgtttgctccagagttccagaaacgttaccgttatatgatatattaaacgagttccagaaaggacatagccacatggctgttgttgtgagacagtgtgacaaaatccacccgttacagagtaatgatgctgcaaacggtaactagtttttcgtcgtgggagtaacaatggggatggagatttcttacagagactaataatttcctttccactttgaatagagactgtaaatgaagtcagagtggatgtggattatgagagatccccacaggaaacgaagttaaagagaaggagatcattacagaaatggaagagctttccaaaccgagcaaattcgttagggtcgaggagcaagaggtggtccaaagataatgatgctgatattctgcaacttaacgaacatccacttccaaagctagatgaggaggaagatgctgttggtatcattacaatggaagatgtcattgaagaacttttacaggtacttaaacaaatattacctcttcaattctcttaacgtttgcttattattttatttcaattcagttgtcatttgttttgtgaatgtgactgtaggaagagatattcgatgagacggatcatcattttgaagacttgtgacaggccacaacttcgagtgcttaatattagttgtttgaaccatgtacatggtgctatatacctcagaagatccaatttccactggacaagttttgttgcgaaagagtcatgtataaaagtaagatcatatgtcatgtaataacactgcttcgtgtatagttatttccctatctacaaattgttctgacaacatatgtttatactgtacaacacaattctccaaacatctgcgactagaagaaaatgctcatatgttgaaagtgcaatgtcatagtttataagaaccaaaagcagacatgggaaataaaggaaaagttagtaagtttcaaatcccagggagaaaccagcgagcatccatgagcttcatgttggagagacgagggaagcgtttgaggatctttgtttcgaggttgaacacgcacatgtgcaactaatgcttgtgtgaaaaggaaaaaaaaaagaaaaaaaggaacaatatagtagcattgagtgtaaagtagatatggaaaactagaaattatttcacaagttgaatacgttttttttcttttttttgtgaagaatttggaaattgagaaatgctattgttttggaaggaagtcattggttcgtaacctaaatatgataagttaatccattgcatatgcataagcttgggaggaggtaaactaaataagaagcaattatcatgagagcaaaatagttacctaacacaccccaagcaactttatatgtttgcattaacagacacagaaactatctgaaattgatctctctttaaatccacctcaccgtgacctgcttggttatcatttgatgttcatagtaattaaatttataagttgtagtcgaggtaaactcactgtaacagtctagtttttatattcaatctgaaggtttagtgtcattcgatctcaagatatatgcttaaagtgtgataagtatctgaagcaatcagagggtttgatccaagctgcctccaatgatacacgtgagaagcacacacgtgattagtaataagtcacaactagaagggtaaaagggtcttttatccttggctctgtatcttcttcttctctactcttcttcgagtctgtaacagaataaaaagagagcgtcacagcgagacgacgcaagtcgacgagagacgtgagatagagagagaaagcttgagagtgattgtaatccggtgagcgattgtaacagtcacttgtatgagctcgagtttgagctatgatctagtggattccagagtcaatctccggcgagacgtagggttccacaccggaacctgaactcgtaaaatctcggtgttctttgtttgcgttctttctatttctttcaaatccataatctaagtcgcgagttctaatcggaaattttagattaggtttcacacaatcatatgtgatataggccaaattagcgtatagactactctctcaaataagagatcgtttgcaccacttaggatcgaattctacaaagctttcaaaaatcacataatagacttatggctatcgaattaagttaaacgaaaagattgtaaattaaaagacaaagaaagcaaataaattaatttcagattcaaaaattaaaacgtcgggtctagagaagttctcaggaaaatagatgaataatagatatatcagttaattaggattattatcgaaccgttctaaaacttaaatcactagcctataatcaaccaactcccatatgtattgattaaatatgcttaataaataggaatcccaactctcgtatgaaaatccttaaacactaagcatgcattataatcaagtttgataagttcacctaagcatctaaaccagacgtatccgtatttagatgtttaagcccatctatgatagtgcgggtaataagcggcctctcgaatcttacctattaatctatgatcaagttctagttagttactctagaattagcattaagaacgattaagatgaagaactttaaagataatcataacatgttatcgatctactaattcatctaaatccttaatgagaaaccctaaacccaacaagagaactactcaaacatggagattgaagcaaataacatgattgaataagaaatcttaaagaaattgaaaagagtttagagtttagaaagatcttctctaaagggagtttcacagggttttgctcacaagaacaaagtaaaaaaaggagattagcctctcaagcttatgtctaaacaatgactttaaaaatcgataagggaaagtttagagacgaatctgcaaagactcgaaatgaattgccgtcagatattggtgtctaatgacaccaggggtggtgtcgatcgacacctacaccaatttttgtctccagattatttttgcagcataacttctcggttttgctccagaatgctcaataatctccaaatgcatcccaaacgtgtaaaaacctgaaaaaaaactaaaaaagattctaaaaataacaaaaagactctaaaagctataccaagatcatatctaaaatcagtaaaaatcgagatatatcaatatgcataagtttaaattttgcatcttgctctaataagaatattaagttttaatttcatgggttccaaataggttatggacctgctgctatattacaagcggtcgacgtgacttttgcaaaagtagttgtcacattttaggttcttttatcaatatttgaggttctcttgttttttattcctaaatttataactattttagaataattcaactagtacttcatatgaataaaatccaacagaatatatatttgaattactttcataaaattttgataaatgttaagttgtggatacttatcttaccaggccacaaatattgtaccgtttcgagaatgactattttgcatcttaaaataaaatagaagaaaaaaactgaaaaagacaacaaaaaggaaaaagagaatgatattgtaccatgcttggagtatttttttttttttttttctcataacgcataagtgttgctttttgtttaaaacttcttttgtaaaagatacaaccgtggaacttccacttacatgttttaacaaacacattaaacttttacaacattggattatctaaacaatagaatcatccatgttacctaactagagaaacaacaagttcagcttataagtggaggcccaacttaaagaaaactcaatccaggaaactgaattctttggaaagtaagatatttacagaatccaatgcaaggttgagacacgtggacatgtgaagcagatgtcgtcgccagtcatcatcgccgatttggaactccaaaaccacttgaaactgtcagatctccaaggtacaaagaagtctgacggttttaattagagaatcccaccaatcttcatcattgaatatgcaaaggaaagatatttccaaagaaattgactcccaaactctcgaggaacatcatcgtagagattaagccgatggagctttcagcaacatgctagaaaaaaacactcgtttccatagatcagttagataaatagccacaattgccttaaactcaacccaaagcaccaaaaagaccttgatccgcaactccaatttgttcgtaaataatgaaatcgataagcttgagaaacaaatcaagccctttaaacaaaggaggttcaaggaattaagattccatatctaagaattgaaacgcaatagagcccaatcagaccaaattttacgaaataggagaaagaaaattgtttaaacaaaagcaaaattcggaactactagatacaatggacggcgagttaaaacagcaaaactggccaacgccgcttatagaagccaatgatgctagacataggaccagccatcacgactgcggaagccggagataatggacaaaaagccaactaaatcgggataacaaaactagaagaactctggtcggcaaaagaaaacgcttctctcatctttgaaaatttttagagaatttttagagaaaagagaaagggaaaacttttttatagtttggagtcttgaactacatataattgtcataaaataaaaatgaccatccctattacataagacaaagaaaataaaagggaaaaaaagaatgacatgtccacgaaaaattttcatttttctagttgtccaagaaaaaaagcacaaactatcgaagtacattataagataaagcttaccaaatcaaacttatggaagagtcctgatacggttcaaattaccctaagaactactctctcaaataaaagatcaattgcaatatttaaggatcgaattccacaaagttcttttgttcacataatgaattcaatgtcaagattaagttagcaggatatgattgaaataataagaaaacaaagtaagaagacagcaggttgattgtatgtaaacgattaaataaagaggtaggaacaagatattctcaggaaactattggttagtagatctaatgaaaggtaggttgttatcgaaccattcttaaactcaaactctaattatggaataactggtggtgttccgcgaaactccctatgtctataactaagaatagccagagaagccgagagatttttaacctaaacatgcattctaaacgagttcgattgttcaccttagtagataggccgattcttattacacacctataaaccaggctcatcaaataatagatccaactacagatacctatggtgggcatatctattgtctggattcaagatctagttaattactctagatctagcattaagattaatcaaagatgaagaattctacagataagctaacaggggagcgatctactaaaccatatgaatccctaatgagaaaccctattcctaacaagcagactactcagacatattgaatgaagcaaacaacatatttgatatagaaagcataaacacaacaataaagataagagttagaaaggatctcttcactgtattgaaaactgaatgaatctctgaagaacaatggatgaatagcttatgtctctgaaaatagggtttgcaaagaacttgatcaaagaaaacttaggtctaaaaacaatataaaaaccctataaaatgttcagggactaataatgcaaatagggaagtcttctggggcaaatttcctcttctgtaaacttgaaagcgtcatggactttgctgggccgaaactggtgtcgatcgacaccaggagtgtgtcgatcaacactcctctgaaactggaactcaaaatcgtctttaacttcctttttcttatcttttgctccaaaatgtctccttatctccattatcgtcccactgcatagaatacctgaaaagacactaaaaagactcgagaaataacataaagactcaaaatcctatacctaaaacatagatgaaatcagtgaaaatagggatatatcaagtcccactttaaaaacacctctctctctctcttctctctctcttctctctctcttctctctctaaacttttcagagagagagagattttgatcgagatttagccgtccggtacgctttaccggcttatgaatccggatgtgatccggttttgtcgatccatctcgctgtcctatctcgccatcaggtgtatccggcggttctcatggctattctgttgccgttgtgtttgtttcaccgaattgatttgcgaaacaatttgatatcagttttttcttcttttctaactagaaagtttcatggtctattctcgatctgtcccaccaccatccacaatcaggtaagtgttttggtgtttcgattgggcgactgttttagtctcatccacatgaatcaaaattcagatctgggcgaattatgggttgcttggctccttccaaccgttatagttgaaacggtccggcgtttttgacggtttcaatcacctcatttgaggtccgtcttgccattccaagaagtcaaggtatcaatttccaaagtctattcttattagcaagtgatgacaagagatcagaagcttcacctcgtcgttgattgtttgtcgacgacttctttcatgcttttgttttcggaaaagatccagtgatgagaagagaaagaatttgaagattaaattgaatcctttatctttttcggtttaatagctgtctgttttcataatccggagatgtttccggttgttcactcgctggaaattgtgtcagcttctgtttgcatatttcgctgaaggggttgtgggtaccggtttactaggttatccggttcacccggtttgtaagattggtttatgaataaatatccctttgagaaaaaatcaaataataatcaaacttatggatatatagaaaacagataaataatagaagactaaattttaattatatagttgtattgttggagatggatcctaatcggaaatatcaacatgcatgtaccaataaaaataaggcacgtccaatgttgaactaatcgtctcagccaagtagaataaatttgatgggatcttatggtaagactttttcgaagtgggagtataaaatcttataagtgtgtcacgtcaaaattatataaaagtgttggttgtagtatgtaaatgttttttcgttgagattttaaaaagttttgatgtaatgtgtaatttcattatactcccaacaaaatattttgtacatgaaaatttgttatttgtttaacaacaaagaaagaaaaattgtttttgaaagcagcaaacatacatacagggttggaccacgaacctaatataatcatgcatgtatgtttactgcttaaaaaagtatttgaaaacataagcagcaaatatactttttcattttaagaaagaatttgaaagctataaaatctattattttaatagaaaatatatttttacgttttaaaaaaaactgaaaatatataaagtctaattatacaatatatagtgaactttgataagtaattaattaacataaatatcttattttctaaccgtctaatgggacaaaatattgtgtttatcaattatgaatgtttttttttttttgtatatattgaacctaaaccaaattatcaaatatcaaagcacttctaatttcttcgtattaaactttccaaactaatattaatttattacacttccatgacaacaactaggttttaaacatattattttagactgttattattttcagccactgatattaatttagctcattttctatttggaagtgacgtgtccatatgttgacattgtcaactttgtactttaagttctcataatataatgtgttaagactttttggtgtgtttgagtttttgtttggttgagaaatgagaagtagaacagaatcaagaatggagactcgtaacaagtttatgctactcgcttgtgccactttctccattatgtctcttgttaagtctcaaaatcaacaaggtatttttactgttttacactttttcattttgtttccttcatgtttttgatatatgaattatctcaaacaaaagaaatcttgttccgattgttacttattgtttgaccaggattcatcagtttggattgcggattaccgtctaaagaatcttatatcgaaccatcgagtaatttaacattcatatcagatgtcaatttcatccgaggaggaaaaactggtaatatccaaaataactcacgtacaaactttatctttaagccattcaaggttttgagatactttccggatggaattagaaactgctacagtttgagtgtgaagcaaggcacaaagtatctaatcaggactcttttctattatggaaactatgacggtcttaatacttctccgcgatttgacctctttctcggtccaaatatttggacaagcgtagatgtgctaatagcggatgtaggtgatggagttgtcgaggagatcgttcacgtcacaaggtctaacatcttggacatatgtctcgtcaaaacagggacaagtacaccaatgatatcagccatagaactaagacctttgcgatatgatacttatactgctcgaaccggttccttaaagagtatggcgcacttctacttcaccaattcagacgaggcaatacggtatgtcaacaacataacagaatactttatatttagtaccatgtgttttttttttttgctcattgacataaacttgatacttgagtgtcgcagttatcccgaagatgtctatgatcgtgtttggatgccatattcacaaccggaatggactcaaataaacacaacccggaatgtaagtggcttttcggatggctacaatccgccacaaggtgtaattcagaccgcctccatacccactaatggcagcgagccattgacctttacatggaatttggaatcctctgatgacgaaacttatgcttaccttttctttgctgagatccaacaattaaaggtcaatgaaactagggaattcaaaattttggcgaatggtgttgattacattgattatactccatggaagtttgaagcaagaaccttatccaaccctgcaccactaaaatgcgagggaggggtatgtcgtgtgcagctgtcaaaaacaccgaagtcgactctaccaccactaatgaatgctatagagatttttagcgtcatacaatttccacaatcggacacaaatacggatgaaggtatgtagccgtgtagttttatgcacatatataaaacgtaataagttggcacttgggagacaaccatattaaatgctttagtctacggcttaagaggatgtacgtgcttaggctcagaacctcttagttattcaaaagaataaagtagtaataaaatacggcatattttatgcttgattcttttgtttgccagtcattgctatcaagaaaattcaatcaacttatcaattgagtagaatcagctggcagggcgatccatgtgtacctaaacagttttcatggatgggtgtaagctgcaacgttatagatatctccacaccaccaagaatcatctcattgtaagaaaatttatattgtacatattgttatcaaattatatgacaaatgtatctttgatatgtcatgcaaatagagatttgtctttgagtggattaactggagttatatcgcctagcatacagaacctaactatgcttcgagaattgtacgtatctacataatttgaattaaaaggaaaacaattgcttttgattggttaacatttatctcttgaaacattatagggatttatcaaataacaacttgactggagaagtgcctgaatttctagccactatcaaaccgttgttggtcatgtaagttacctaaatattattgtgttgtcttcattaattagtttctaatgatttctccacatccacagacacttaagaggaaacaatcttagaggttctgttcctcaagcccttcaagatagagaaaagaatgatggtttaaaactattgtaagagtctgtttttcgatgatctagttttgattattatcgacacatttttatatagttaatatttcgtcaataacgttttcattttttagtgttgatccaaatataacgcggcgcgggaaacaccaaccaaaatcctggctggtggcgattgttgcatctatatcttgtgtggccgttactataatcgtgttggttctcatcttcattttcagaaggaggaagtcatcaacacgcaaaggtaagttaataaatatatgatcctaaatatataaatataaagaccctaggcgaaacttagaggtcgtcgattcgagtgacgcttgggacaaaacttattacatgttgtggtttcgggcctgagggattatcggcccagaacctcctagtattcaaaaaaaaaagaaaaagtatgaaacctaatggatagttaaatttattttctgcagttatacgtccatcattggaaatgaaaaatagaagatttaagtattcagaggtcaaagaaatgactaacaactttgaagttgttctcggtaaaggaggctttggtgttgtttatcatggttttctcaataatgaacaagtagccgtcaaagttctctctcaatcatcaactcaaggctacaaggaattcaaaacagaagtacttaattacactacaatcttccatttatgtctttcgacaatcatgagctcatgaattataccatattgttgaatatattgttaggtcgaactacttctaagagttcaccatgtgaatttagtaagccttgtcggatactgtgatgaaggaattgacttggctctcatctacgagttcatggaaaatggaaacttaaaggagcatctttcgggtaaaccattagagtatgatacaaagatttttgagttacatgccaaatgctttaaaattttctaacgatttatatccatattgtgtattttggcaggaaaacgtggtggctctgtcttgaattggtcgagtagacttaaaatagctattgagtctgcactaggtttgtagaaatttatttaatgcctagcattgttactttttctcaagttgatttattcttctttcttcgagacttcatttttatgattaacatatgaagatttttctatgtactaggaattgagtacttgcatattggatgtcagccgccaatggtacatagagatgtaaaaagtaccaatatactgttaggtctacggtttgaagccaaacttgccgatttcggactttcaagatcttttctagtgggaagtcaagctcatgtatcaacaaatgttgctggaactcttggatatcttgatcccgagtaagttctagttcacatcacattatagtattcaggatatgtttccttgtatgtttagtaaacaaaaaccaaaatatttcaattacttttcttgcagatattatctaaagaattggttaacagagaagagtgatgtttatagctttggaattgtgttacttgaaagtatcactggtcaacctgtgattgaacaatcgcgtgataagtcttacatagtagaatgggccaagtctatgcttgcaaatggtgatattgaaagtattatggatccgaatctccatcaagattacgactcaagttcatcttggaaagctcttgaattagcgatgttgtgcattaacccttcttccacacagagaccaaacatgactcgggttgctcatgagcttaatgaatgtttggaaatatataaccttactaaaataaggagccaagatcaaaattcaagcaagtccttgggacataccgtaactttcatcagtgatatcccttcagctcgttaatcttttcatctatatatttgtgtttgaaagatacgtataggttgtattaaaaacttatcatgctacgcagtttactcctatttgaattgcattatttacattcatacgtacatgttgtattaaaagcttctcttgctatgcaatttactcttatgtccgttcatgtaaatgtttagacgtaaatatttatgggcaattgacaaaaataacagcaaaaaaggtttttcttctaaaattagcacaatatttctaaaatttcacaaatgacactataaacttcaattaaacttaattaaaatataagatagaaaataaaaatgagagcaaacactaatctaatttaaattgaatcaattttttttttaaatagtggaaatatatactataaattagaaatagagaacctaaatataatagggagatttgcaaattctacccattttctagtaacattttgcaacactatccttctctgttgtccattttaaaaaatatcccttctctttaacaaaatgaccaaattacccttatctaatacgatgtaattagaaattaaaaattttccttggaaatttttttcccgccaaaaataaataaatttccctactaaaatttttttctcccataaaaatttttcttcccgccaaaatttctttcccgcaacaaatgttttcccagctaaaaaaatacattgaaaaatccttgtaaatttttttaagaaccctttataaactttaaaaaaccttgtaaattttttaagagctttataaagttgttaaatactcttgtaaatcattttaaaacctctttgaatctttataaagtctttaaatacatatgtaaattctttaaaacccctttaaaaacctttgtaaataagtttaaaagctttgagaagcaagaagaagcttgtaaatccttgtaaaatggtttaaaagatttacaaggattttaaaaacctttgtaaatcattttaatatcttcttaaaacttttataaagtctttaaatcatttttgaactcttaaacaaaacttataaataatttaaaccatttgtaactctttttgaatcattttgaaactcttgtgaacacttacaaaaggttttaaaaaattttacaagagtttttaaagggtttaaaaacccttgtaaatctgttaaaaacccttgtaaatcctttaaaacccttgtaaaccattaaaaaatcttttaacaaccgttgtaaatcctttaataatttttgaaccatttaaaattttttttgaatctcttacaaaaggttttaaaaagatttacaagagtttttaaatggttttcaaatctttgtaaatttttttaaaaatcttttaaaaatccttgtaaattctttaaaacccttgtcaaatatttaaaaatcttttaaaacacttgtaaatcctttaataatttttgaactacctgccttatttcaatgttttaggttcttaatggtgtgcttactcttgtgaaccccttacaaaaggttttaatttacaagagtttttcaagggttttaaaacccttttgaatcctttaaaacccatgtaaaccatttaaaaacctttataaaacccttgtaaaccctttaataatttgtgaaccattttaaaactcttttgaacctttacaaatggtttaaaaaatatatacaagagtttttaaagggttttaaaacctttgtaaattctgtaaaaatcttttaaaaacccttgtaaatcttttaaaatccttgtaaatactttaaaaatcttttaaaatctcttgtaaatctattcctgcaaaaaaagttttttaaggaaaaattttttttgaaaaaaaaaaattggcaagaaactttttttcgaaatttttttggcgtgaaaattttttggcgggaaaattatttttcggaaattgttaacctaaaatatttttcaaataggggtaaaatggtcataaaaaatgaaagaagagtataaatgaaaaggacaaaatttcctttaatccttttatttaatttaaagcttctcctgcatgattaaacatttatacttcttagaaacgtatgaacctattaacccaagagacaaattttctaatctctcttaggattccaaatcatcaaaagaaagttatcttatcaaaatcaaatcgtagtcggcagccatttcatccaaccgaggggaaggtaagcaaagagtgaatcacgagagattattcgttttcattagttcctacacttgattgcataggaatatcgctatgctaattcttctctacgcctggtcattctttctttgtgtcgcagagtgcaaaccataaaagtatcaaagtttaagacgagctcactcatcaggccagagcaatcaatacatgagcaacatagaattacgaattgtaaagactcaaagaaagagggtttggtagtagcagtccggttttgtttgttagagttagaaagctcaaaccttgaatctatggctatagaggtttcagttgtagcagtcgtttgagttagttatgacttagaaagctgaaaccttttttgaagtgctttatatcttaagacgttagattttattcatagacgctataatgaattgtttgattgcttacataaagtgttgtaaacttcttcctttaatgttaattcttggctttatgactttgcttgcttggtgaaatagttgcattagcactgttgataaagaagaaaaacaaaatgaaggaattggggaatttctttaatcgacatcatgcttggtcctctcctctgggaagtttggaattcttcttatgaagttggactttatgaagttggacttaagtgataccattagaaggagtagtagtaatcattacatgatcctcatctcaatcacataatacatgtgaataaatttatatttcttctctaggaagactatcattagtgttttgatcaataaataacgagctttaagatgatagcctcaatacctgaactcaaatgggaaactttagcctaaggactaaatgagcacatcagcctttattcaagcgtatgatctcttttgcttgtatctgtggttttatgaaaagtagacaaagtttgtggcctttctttattgcttggaaacagggtaggtttgaaataattatcagattataattttcaacttatatataatctgtgaacgactcggtcatgacgagtaaaatatatggagtttggttcgataccatgcatagtgatacccaagtcaagaagcataacctcttcattacctagagaatctacctcaacaagcaagttgtcgtgtttatttgggtctggattaggatccttcttgaagatgcggaagctcttctcgctttcaatatttttctcgtaaagattgtttagaaccatcaaaacctctcctgatgttgtaaccacaaggttaaaaatacttcgaaaaccccatggtccattatgcacgttgaatagataatttcgagtaacatccttgaaaccttggtctttagacaaatcgatgatttgaatgtaatcaccaacaccgatgtaaagaaagcaaccatggagtacaatatcagatacgctttgaaacacatcggtgatgacatattctagttgaatgtgactgtaatgatcatcagctttcttgtaaaaggctaaaaagttgcaagagtcttccaagaaccaaactgcaacaaactctttcattttctcgtctacccacaaaatacctcttaactcttcagctcttggtaatctaaaaactagaatctgatcattagatgcttgccatttcaattccttatcccctttttgctcgaaagtaaagttatctgacaggagagactctagaggcggaagatcgatcctattctcgctaaacacatctattatatagagattggatttagaatccattacaagaaaccaattacccgagtttgcaaggaatatagtcccagagaagtctctcaccgatttgtaaatcctatcttcgtctggattgtacagcacgcaaccatgaactccttcatctggaaacagaattagccatggagattttgtttttgggggagccgtttgtttcgaaatcgaattccaagtagcacgatggaaatctgcaaagctcaatcggttgaaaatatttctcagcaaatcatgagggagttccgacaaggtgagaggattaggagtttccatagggttctgtctgacgttaatgtttgcgtaatttatttggtctttaataatagggttttgacgttagtataaatagggtttggatgcttgtgtgaaaagtaagaattaatatataacagattgaatgtaattatggaaaattagaaagttaataaatatttcaaaaccaagtgaataaaatttttttttatcaaaaaaataaaataattatttttgtcctttttgtgagatctatatatgctaatatagtgttaatcaatataatctaaaggctaatgttcttgtatttgagatcttcattaataaaagagttttatatctagtgatattaatttttatatttttttatgaaccgtgtaatattagtttttttatttgtaatatatactattaagagagaacgagggacaaaaatattccaaaccatttaagccattttctaaaaacacttcacagaaaaaaagcaaacaaaaaaatttcaggataaaaacgtcgttatatgcgctttacgcagtcgatccgggccgcctaacaaactgaccgtttaaacacacgcggatccctttcttttaccctaatatttatagattttcactcggcctctgtctctatctctctcgccttttttatttttcccaacagaaatcaattcaatttttgttgttgttcttattcttttccattgttgtttttcttttctaggatgattttttttttgtttcattcatgggtttcagttcagttttcagagattcttctcgtgattgccccttttattttgttttgaaagtcacaacaatggtcacgttttgatcgcaaacttaatttgatttccatgataaaaattggaactttcttatgttgtgatcatttacaacaatttgtgcgtgatgggttgttctaaatgtagaattttgtttgatcatcgttgggttttgaaagaagagcaatgagcaattatgcagccgggctcggtaaacctggctcaggtaatgacagattctttcttttgtgtggtgaagaattctatagatttagagaaatttctagacttttttatgttttcatggcgtcacaatggttctgattatgttgtgactcaatccacattgtgtgtttaacaggtaaaaggagaatcagagatcttttaaatcaacctgataaccgagtctgcgctgattgtggcgcttctgttcctaaatgggcgtaagtcatcgcttctaagcctctttttttcttatcttattgtagttttgctgataaacaacatgtcatttagtatagctaatcttatgataatacaatgtctttggttctgtatgttctctgttcatttaggggttaatctacaacgtcaaaactctgatagagttgttgaaaatctcacatttctttaccataactgaaagttacttattcgcattatgtgattagagcttcatctacatgttcttgtgtctttagttatattagcatactccagagcagaagtctatttatgcttggtgtagttcttacatgtaagcacgcattatgcgattagagcttcatctacatgttcttgtgtctttagttatgtatctttgtgtttgttcttatattgaataatcagttagtagcttgttttcagatcagcaaatatcagagtattcatttgcttaaaagttgcggtgtgcacagaagcctcggcactcatattttaaaggtgacatatcttctttgctttattacattttggtttcattgtgtactcattgtttggtttctccaggttttgtctgtgacacttgatgaatggtcagatgaggaagtcgattccatgattgaaactggaggaaatgcgtctgctaattcaatttatgaagcttttgtacctgacacatgctctaagcctggacctgatgttaatcatgaccagcgtatgagattcattaggtaagatttgaaaccatctgtgttgaaatttgaatctatgccttctcttcccttgaactcgcaaagcccgaccgccttctctatagaaaaatcattcatcaaagcaaagtcatcttctaagaatgtcctggacttgcgggtcatgatgagcttcttaggtgttttttgctctttaactatttctccagtctcttctgcagcttcaataggtaccttcagttggtatcatatttggtataaacctttgttacattctattttagatgattgcttatttcatttatctgttttgtgtaggatggtgtgatacttggggctgatacacgggcaactgaagggcctattgttgctgataagaactgtgggaagattcactacatggcaccaaacatttactgttgattttgtttacactgagaaatggtttcttttttcttgatagtacaattggattctgaatgttgtgtagagtttttggaattgctcattggtgtatgctttttttatgcagggtttatctttggtggatgattagtgaaacgttttgaggagagaataattttacacgttttagttaaaaatggcagcttcaagcggctctggtttggaaggttagaaacatgatctcaatccttttgttgatatggattctttgtgtatactgatttaggaagttatatcgagtttccatttctttatttccgtttcttagagtgttttgctttaacgtttaaggccctctacgtttgcatgtcgctggcgactgaaaccagcgacatcgaccaaaagttgttcgtttgcatgtcgctggatcaacgaccaaaagtagcgacagtcgccaggatttattctgttttttgctcttgactttatcagctgaggaggggtaaataagtatagacatggaggaagacatggatctaacagaagatgatttcagaaatgtgtctggccagttttcagggcaagcatcgatagtggaggttggggatgctgtgtatgtgagagtcgaaaccgtgaaagtagatgttagttgtatcattattcttctttttattgttggaggttgctaatgcttgtgttacttaaacacctctgcttcgagtatagtttctacaatcatttgctccaagacttgaatgcttgtgattatgttctctttctttcttttccataattccatgtgtcagctaaaatctggtactcgatgtgtgtccttctaagggttttgttaccatggctaaatcgtgattctgcagtttttatccttggttatctgaccgtaatagctatttactttggatcttattagtaggcctgggatttgtgtccggcccaatacatgcataacttattattagaatctgaaatctgagaaaatctaatagagatcctctaggttccaagtttttttagtttactagatacggaccgcggtacaccgcgggttgagtatttgcgtttgatcgtaatatgatggttttattgtaatataattgacagttaaatcattatagttaatttgtatttttctactatatatttatatttattgacatgagtgattatatttgtatgtttcggtttggttttgtaaagttccgcaaacatgtataatattctatttatatacatcgtgtgtttgtactaattttatgattacatgattataagtgtgaattgtttttaaataacaatattattttattacatgtaaattcatatgattcaattgatttgaaatttaatttttggattgtaactgtaattatcattaaaattacatggctgctctattgttatatgaagtatatgatgtatttaaatttctacaataatttaatttctatactaaatatttattatataatacttagattgtttgacaaaaataatacctagattaatataatttaggttgtttgatataatttataatgtaaatatagtactgtatattgctaatatttatggatactaacaataagaattgccttaagtgtgattaaacctttgtaaatattgataagtggttaaacaattgcttacgtgtgattagttaaataatttaatgacacataataaagaagtctttattttgttttcctgcattgttcttcatccaaataacagaacattcaatcgagttctgagtttcctttcattcgattatcaaaaactgaatgaatttaatcgaatccttcccgaaatcatatcacatctcaccgataggtgtcttcttctactcacactgtctcgactatgatccaaccaattcaattcaactataaaactcctgcaatttgcattatcacaaaattcgtaaacccagaagatactgaggtactcgattcattatgtctttgtgttatacaatctctgacatatgatttatagatcaattaaactgtatatgaaatcaattatggtaatcgataattcgattttagttttgaaatggctttctcaaacagaattaaatgttcatttgtgctattctatatctagctgcgaaagttgattatactgacagagacagatcatttagtgtatttgaaacaataacgtgtggattcgaaaacgaagaacatgaattgttaaggtaggcaaatcagtaaagatatgtaaatagattggtagtgtttgatccactatcttatatgtttattaacacaatatttcaattactgctactacaggttctcattcaacgcaaaatgcaatcatagctgtattatagtttcatggaactggaatatcactttttcgactaaaacacaggttcgtaccaaaacttctaaatggagaactgaacatataagtctgctttggtgtgaacatcaaagttgaacatatgagaacatgattaaaagtgtagagaaataaaaacaatttgaaatagaggttcagttgtagtaattttaaatcagtatttaacaggaacatgttgaattgttgcttctttgtttgcttcagcagaataatgtaaataattctgtgacattatagatcaaatactactttttagttactgtgtgggggtttaacagccataaatgaaagtatatgaagtgaataaatgttgatgaagaatacctttctcaaatgcttggaacatagactggcagcaatgtaatcagtctatgttttggaaaacttccttgaaaacaacgttggttgtttgcttctaaagtttaccatctttgtctagtattagaattttcaaaccttttttagaggtaaccctagacaaagcaacataaagctgaccatgggagaacactggtttgggcaagtaaagtcctacatgttctagagattgaccttcactcttatttatagtcataacgaatgcaacagagagtggaaactgtcttctacgcatcttgaatggaagtttagtgtttgtaggtgtaagattcactgtaggaatcaaaattatgtgaccaattctgtctcctgtaataactttagcttcaacaatctgagtacatagctgcgtaatctgaagcctagtgccattgcatagaccacctttaggatccaaatttcgtagtaataaaacaggagcaccgacctttaaacgcaaagaatggttaggcaaacctggtaacttgatactgtttaagaaatctggagtgataacaggattggaaagtgaatcagaatctgtaggatctatggaatcagcagatagataaattctttcctcagctgaaaaaaacaaattgaatgtatgtcagttgtatattcaataaaaaatagattgcatataaagattataaactttaaactgaagagtaaaagtgcactaaccatgcaactggtctagcaaatactcattgattgtgtttacgtcctcattctttgatgctaatatagctctgccttgaaagaatttgggatcagtgatttcgtgtaggattttaggatctccataaatttcattggtgatcgattctattggcttgtctgcgttggtaatcaacaaatcttctggaatatctattatagccacaccgtcgttagactcatttatcctaccatcaccaacagccaataaccaatcagaaaactcttgaatttctttagcttcagtttcactcaaattgtttgctagtagtctcgtgttcttagtcaactttaacaccttgcaattatcccaaagatacgaagcattaagcgatgacattactatttctgctctccctgcaccattaattactggaaacacctgtctgaaatcaccaccaaaaacaacaacctttccaccaaaaaccgtgttgtctgtgttttttataatgtcggagaaagatttatctaaagcttcaaaacaaaacctgctcatcattggtgcttcatcccatataactaaagacgcttttttaaccaaatttgccaaatcagactttggttttatcttacatacagagaactcatcaggattcaatggaataccaaaccttgaatgtgcagtccgaccaccttctaacaacaaagaggcaatgccactggaggcgacgttaagaacaatctgatctctatatctaatagtagcagacagagttttccaaataaaagtcttccctgtacctccaaaaccgtacacaaaaaagactccacctaaattattaaaaactgcctctgtaatctcattgtatacgcctctttgctcaggagttagcatctgtttccattcttcatgcttctcttttaggttggattcacggttatatcttaactcctcaacaatgagtctatttgaattatcaataccatctatagtaggcttaggaaactcatcaatatcttctaaggttgctccatttgacagcataattttctcgatttcctatagtgtgtaattcttaatttcagcttcagtgagtgttaggtctgcgaagatttagatgaaaacattaaaacaaataacgtgaaaacatcaaaactctataagtaacgaaacatggaaggtaaaaaatataaaaacctggatttttgaactcatctcttttctttttcaaaatatcctctgctaaaatatgccaagtttgtgaccagacgtgtgctggtctagacaaagaatccgagagaagaagcattgcgaaaaattcctgagataatctccaaaacaacactgacttgcttccaccagaccatcaataaaaacctgatcatcgtcaagaataccacgtgcaaaacatgcttctttgaaagtcttgtagacaacaccgtcataggtttttgatttcagcataactcgttggatctctcacaatgtttaagagtactctgagaaaataatcatcttccattttcctagaaacatagtgaatgcgacctattgaaaaacccctagttctctttttaaacgccttgttttctccatcccatgtgaaatatgcaggaatttcagcatacaaacactctctagctcgcttaccattttttccaacagcatttcttctattcaaagtgagccaagccataaaatgagagtctgcatttgctactcgttctagaacgtcttcaatgtttgactttggatcaaaataagctggttgttttccttctacatgaaaagataatttcttgacaggcgttgttctatgttaaattggatatttaaaaattctacaaacagcttcagatgcggaaacctatatgcaaacaattcattatgtattagaatgaattttttattcaatgtgaaaccaaaccaaataattaagaaaaaacagagaaataaactaacctgcaatcgaaccaatctttgatctcgttcttcttcttctcagctgaacgttgttcttgctgtggcgtttcagagtcaccagctgtagcctgctgagttggctcaactatgaagataactttgtctggtcctttgttgatatacttgaataagtatttaatggagtcattctggttacaccattcgacattgatatgagcattataacgaagagaaaacttcttattataaggcataacatacctattgtcacatttaataccacccttctcaacatagtcatcaatttttcttcttctataaataggataaccatcactaccaaccttggttatatcttgatgttttttgggataaagtttagaacattctccatcaaccatacatggagacttgacatttgctgaaccacatggaccgtgaatcatggagtttttgataacttcgtatagctctggttctttttctttgtcaggaatctcagcagaaataagtttatcaatgtcgtctgatgttggtaatttactcttagcatgcatgaataagagaatgtgtgcatgaggcaagcctcttttctgaaactcaacagtatacatcgctgcaagcacaaacaaaacagaataagtgctttcaaattagatgattttgataaatagtaatgtagtatactaaaccatacttacatgcaacagtcttcccaagcatcttcttcacagttaaatcattcattagagaatccagtttgattttaaaaatccgggctataatgtcaagtctgtctttaggatttaaacctcttttatcgcagtatcttgttatatgtggccactttgggttacaggtaaaggtgatgaaaagatctggaaaaccataaagtttacagatagccattgcatcatagtagctttgaaccatatatctaggaccaccattgaatgaagctggaatcagtagttggttaccttcttcttccatagtggttgctccagctgcagctgcttcttttacagatgtgtagttttcacaacgaagtttcgactgattaaacttgatatagtttaatctgttagattcaatagtggtataagcatcacagagaaactgctggaacaacctctttgaacgtaataaagtttggcactcaacttccctctcttgaatacggaatgcaaaccattgtctcatgctgatacacttcttattcttcttcttactttttgatttaaaacacttctcaattccaggtctgaagccatcttcaccataacaaaatattagtggatattgcagagccaaataggaaatgtgaatctggttaatcctctttaggtgcccatttgattttttttctataacaatgtccctatcaggcatgccatgtcgaaaatctccagggatcaaggctgcaacctctgatgtggtatgcatactatatgtcctgccatcaacaccttgacgatctgcgataatacgcatgtgaaatggctcttcatcatttgtttgaatcctctctctggctgtcctaaattttctaacataagggttgcaacggttaagcatctttataatgacttcaataagattcttatccaaatttggttttcctgatgctggcttagcaatttttcccttgctacattagatgaaaaacaacagtaaactatttttaaaaccatatcagtgcataacctaaacagacatgtaaagcatgaaagatatgagctatgttacccgatgacaatagctctgttttcaacttcgttctcagtatcaacaatgtatagttgggaatacttagcgtaatctccaggagtaggttttaaactaccaatcaaatggtaatttccaccttgcaatctaaacatggctggccctctacctttaggcatagatttatctactttaccaccaagagaggtcactgcgaaaaccatattaaaagttctagcattgtctctgtaatgtttagagagtggatggtttcctgagaggaggttcttgagaagatctggggactccttcagaaatggaagtttgacacttccttctccacaacaaagagtgaaaccagattctttttttgtctctttttttctaatccgctcatcataccacatcatagcaccacaatacttacacttgaatgtaggatcaccgtgatcaagataacctaaaacaactataatttgggtttgcattacaatatctgagataaatgtatgacaatgaagaatttagataacaaacaatacctggcttattctgttgtctaatttgtttcattctcatttgtttggttacagccaatcttggacgacctctttttttaggagcagattctgggacatttgctgtttgagtagattctgttggaatcataaatatatccatttgtgagctgaatgtatcaagttctatgtcattttcacttaactgtgacacaatgtcttctacttcatgagtagatacattagccattgattcagattctatttggattgtggttatgtctgcactttcatcgtcagtgctactaagagagtaattttgatccacatcagtatcactttcatatactgcaccatcaaacatcatattggccatgttttcatcatcactgctagtatctgaattgattgtagcttctgctcctatgatcacatcgaaaatttataaattaacacaacttatataaaatgatactttaagagaaatgtttgtaaacctatatattcttactcggattggtagcagatgttgatgctttctcaaattctgcttgtaaatttcgtatatgagaatactctgttgacatcactggtgtctgtgtttggttgcttatacatgaatatggattactcagttcttgtccttataatacataaaataagatttagattaatgattcggatatttaaaagataaaaattacataatagacagagtagtttggagaactaaaagatatatatagaataactaacctgtgttcactgtatatgcagtagctggtgtcatcgatgcatctaaattttgaggtgatgcctaaagatttggtttggtgagatcactaaatggaatagtagaagctgtcttaggctgatgcaaattttttctgccaatcgaggtaagtcctgatctttcaaatgaacctgcgagtagttcaaacacattctaagtaactgtgacaaccatttgctaatcttgtaaagcagatagaatctgaaagttggatattgtatagtaatgacagtaccatgtgaatactgtatagaagttgctgaatcaaattagtgatatctctgaaaactgtattgaaaactgatctaatagacacataaccattagaattagatccattacgctgagtaagttggctttgtgaagctgttatttgacctatacgtggtctcttctctgagggtggaggtgaaattagatcaaacagagcatggctgtttttttttcccatttcaatactctagactgtcatgagtattgagtgatttaagataactggtataagattttatagaattgttgaaagtaaatgtaatagagtccatacttgattagagaggatctgtttgttagttaaggaaatatttggtaggtgagtaaatatatcaacttgctctgttctcgcattttctacataaagtatatttactttgctacacaatatactagacgattacaaattatgtaaccaatttggagtaccaaatcgaagttggtaatatattttttcctttctcaactgtcatatattttggatttaatgattctccaagaaccaatattctgctaatgttctgaatctgttacaggtataattatttttgtaaattagtgacaatatcatatatgttaaaacgaaattaaaatttaagaattgaatactttaaagaacacaatatcataaaagttataagataggaatagatatgtttcaatccaaaaacataacataatgttaaaaagtactaaaaacataacaactagttcggagtaaaccgaagaaaccgaactgattaacccgaaaatttcgggtttcggcgtaaaccgaagagagaagtctaaactgatcggttgaattaatttgttgcaacggtactcggttcgggtcggttcggtaatcggaccgatcggtttattactctaaacctaagtccattaataggagccatatataagtgtaaacctaactaagttaccctaatttgtttatcttcttcgcttcggctccgcctcttattctcgagaaagctcatcttgcttctcacatctaaacaaatatctcatctcttctattctactttatcacttcatctccgtacgctcttctttcttcgttgcttcttcttttgatttataaattggatccaaaacatcataggctctcgtcatccttacatacaagcattgttactttgtgatataaagaacgaagaattgtacgaaggcaacgagcaagatgagtagcaaggcgaatgaggtttaaaagagtagcaaggcgaatgaagttgaaaggaggaagatgaatagcacggccaatgacgatgaaaggatgaataggatcatcagagatggccgtcgtcgttacgtcacctggagccgcagccgcaacccttcggcagctcatatcttttggtcaaaaccctaatattttctagggttgggctattagtttttgttttgggcttttttgaattgtattttgggctttttattaatttgtagtgggtaatttgtttggattaggatttttggtagtgtaattttttttttaaatatctaaaccgaattaaaaaccgtagaaaccgaataaatttttgtttggttttaagttcggaacacaatttctagaaccgacccgaatgaaccgacttccgaaccgacccgaaccgaattttaatttgggtctattcggtaaaaaaaattaaaaccgaatttctcccaaaaccgaacaaaccgacccaaatagcttcaagcttcagtaactggttccattgtcacttcttgatcatcagcatctttgaaactccgcctggtacagagacaatagattataaaactaagtaactattcttaattgtaaactacagaaatttaaaaccaattgctagacttacagataacttgcaagatcaaagtaagggaagcttgggtctatatgtagacgggaacatccaaactcactcgttaaaacgttttcaccttacacacagaaaaaacacaggtttcatttgtcaaaacagaacataatttaaatttaaacacaggtttcatgggtcacaactcaatacaattatctagcagatttagaatactaaccatcaattgaagcaattctccagaagcgcacaacacatacaactggttcatagttgtatgttggtctagtgatacgcctagaccacttggtaacaaactcttcacagcatgaaccaacagcaacacacttgagtttttgttccctgtaccattggtagactgtggtaaataatcacacgcaataatctaaatgtaaagtctgcaagctagatcaactaatcctaaatctataacttataaacttaccaattatctataagctcgaaagaaacatatttggcctcatagtcggtctcacccttattgcagacataaggaaacctcttgatagaagaaacacttgcaaccacaccaatagcatctatgaaaacaaaaaatcaaaagctagttattgtctgcagcagagtactcaaatataaactcatgaaatgatctaaagaattatgatcgttataaacataccagtaacatcaggaacattgtctgtagcagagtcctcaagttcattggagaaaagatagtctgtgaaatcagatttcactaactctgacattctgaacactacagtatcccatctgaacatgatatggagacggttcaacacatacgtttctactctgtgtgtagagggaatcacacgaaactgagagatgttaaaccagaaaccctcctggagaactcgcctgaatttgtccctcaaattcaatctaggtatggttgcaacgattctgtgatgctgttaagttgacaaaagaaaaagactaagtagaacccgcaagatattttgatgacatgcaatagaccaagccacaaaaaaaaacgatctaaaagagcagatgaatttgaaagactaacctttgcatcaaccaaaatcatggttgtaacatcaccattcacgtttggaggatgatcccaaatacagagaactatcacgcatataacccaattctgattgttcatcaagttcaaattttcgagtttgtgaatataagccacggatgtctctctaaggatttaatgtttatgcttattctgttgttttatcttttagggttgagatcgaaaaggaacagttactcaatatatatataagttgaaaagatacaatgaatggcagatgttttttaaaataagaaaatacgaatcgttccgcgggttctcgatgatgacgtcaatatgacatattgagaaaatctaataagatatcatagacatagatgtataatgattacgaataagacaatttcctaatatctagacagttatagatgttaatcatagtgaatctatatagaagattgtcaaaagattgacataatattgacataatattgacttgatcttttgtatagtttcattttatcatatattatgaaatctatattatatctaaaagattggaatagcaaattgttaatgaaactttaacttattgatacaggtatacactaaagtcattcattaaaagtcttaagccagttgaatacatatatacaacatgaaatggtaagtttctttggaccctctaacagtaacattataactgagatttcatgttttcatatagatggctacaaaattagtaatgatcgaacatataagcttaataaaataattttaagattaactccaaaattaaagatgaaacataatccaaaacatgaaatcctataaattcgaaaacaaaaacacgaacataatccattaaagaaaaacaaaattcaaaacatagcttcagtgaccaaacatagttcaagaagcatcacttattaaaagaaatagataagtagatcacttgttcttctccactttgacccttacagtagccatgttcctagccatctctttcttgatttcttgtttcaccacgacagtagctgggacaagtgcttggtcattctctgtttcaacaggaacctttgatgttttgacttcagttggaacagtaacttcttttgaatcagccacctgcggattcaaggcaactccatgttcagcattctcagataaagacttttccaagtctaatggtacaacacacaccttctttgaacttgaagaaccttcagagccactcgtttctctagcgtaaacacgctttgaagatggagtcgtagagtctggcgatccattaccattctccagcataagtggaacctgcaatatatagagttagaaattgccaaaactcttatgaactttatgattgtaatgaagaatgtaatttgagatgttgtgtgaaataccttatcaccagacacaatggatgcatggttcacatgttcagtagaatcctctagtaattgttcctctagtagtccatccttcagaagcacctttgaaaccttatagatttcttttccatccgagatgttgtctttctcaacccacaccagaaacagaaatgtcttactaatcagattctttacagaatcaggaagatcttctggatcctcaatctggaagagtgtaaatagctatttgagttctctatatatttatatgtcagtatacataaagtagacacgggacaaatttaagaaacacacctcatcaacagatccattaagaacagaggttgcatactcgccaatgatctcagagcaaattgaatcaaacaaaagcaatttggcttcaccagtgctatccataacctttgcatagatcatgtacattgcatataataaaattttacgaacttaatctccaaactatacacacagttccaataaaatatttcaaagtaatatgctatgtaaatttaatcttcaaagaaatgtatttacctagagaccacattggttacaaaagacttgcatgtttcacaccagaatctaggcttcttacccttgttgtttactccattaacaccagcatgaatatgattcactttcttattacatgtcttgcagttgatgtaataccaagcccaatccgtatcaattgcatagattgtgcacaaaactctgactttaccaacctatataaaatatcagaacacattagatactgatgatacttagatttctaaactttgagataagttagctgaatataacctcagtcgagctaagcagatcttcaatggtattccttgtgtactcactgtagtcaatccttttaactgcaaccatctcaaaacgtgggactcttgcacggaacacacaaatagcaccatcatttggaagtttgcatttggataagtagatgatcaatagcacataaggaagtcaactaaaagtagattgtgttgagagtagatgcatttacgtttgactgaaatggtgagcttcagggaagtccggattgacatgtacttgcgatgcatcaaatgagttggataaactcttcacacctgcagtctcataacatttaagtgaccatagatcatgcagtatggaaagaagaggaataggtacaaagaaactgaatataccctactcttaattttggcaaaacgaatgagaaaaatcacattctttccctcagattcctgacatgctctgtaaacctgctgagcgtatgttccccacaaagtaacttgcattctctcatccctatgagaacaaatgaatagaaacaaacactttctttgataagcaataaactaataagatcgcaataaactaataagatatagacattacatttgatctctgatctcaaagtcaatctttgttgtaggcttattgttagcctcgagttcctctaactcaccaacagtaatgatttggccaatagcatctgcagtgaaacatgactgtgttcataatctaatgatagcaagtgaatggaataaagcaaaaatataatatagaatcagaaaactcaccaaccaacatgtgagggttaagctcaccactctggatttttgaaaatggcgccaaagtcaagaagttagagtcagagacagaagcacaacccatgactttagttctaacatggaacgccatcttgtatagatggttggttgggcgaaactggccagacgcataggtaagaccaaaaatctcaatgaagacccattcgccaacaagaagcttgtgaacaaacttagaaaccaactccttcttcacgatagcatgcatttttttccccttatgacaaagacaacagaaatatatattagcacttgtgtatatgtaaacgtacatattatatgataacagtaatattcatcagagatgaccaactcaatggtttcaccggtgttgcttgtgtactgcttccaagagtgaagaatcttgacctggactctccatgcgtttttgtaaggcctcacgtctttaaggtatgcgaatgtagcagccatttctcaaaatgtataattgctttgatctctcgtttggggtgtgagtgatgatgaaatggaatgatatgagaagcgtatttaaagtagccgagtgaatctttaaacatttatttgcaaatatttagagcgtagattctttagaaacagaatgattctgaatggtttagaataggaatatgcttgagtatcataagtgcaaaataattatcgaaatgccgtatttagattttgatttgattctgaatcaaactgtcgagatatggtagatgcatttgcccttatttttacgcttgtacattcaaaacagaatgatttggatggtttagaagatggaatattgcgtgatttagcttatgtcttgactggcaagcgaatgttaaaagattttgtagttaaggtgatatatgtaaatcaggaaacagaattgctatgaatgaggagtggagagaatagatgattcgatcggataaaatatttggaaggtaataatccataacaatttggataatattatagttggcaaaaattaattttcgaggtgatatattggaatttcgaattgatgatgatttttagaatgtgtaaaaatatattgactataccaaatgtaagattatatgatatattgagggttcctttaaggtttatggaattaatgcatgattaataatcgtttaacttatagaaatgtgatatcgaaatatgaatatttggtaagattgtagtaaatatttcgagattttagaatgaagtaagtaaagatatggttagttatttggttgttcggatttttaggaaatattatttcgtgtaatattgaattagtagaatttcaagggattaatgtgtgcaatttatgagggtagtacttacaatttatatgtttaggcaagtaattagtacaatatgtgaatagttgagcaaaaatttggttattgtcctaaagaaaatatcttgtctgattgattttgtagagactgaacatacaatatcaaaattgaaaaatgatttttcgatacaaatcgttcccaaaaatgtatatgtagatgtaaaagatctatgcatgtattgggccgtataagcccatatcttatatttcatatatagaaagaactgaacattttcagtgtacatagaccaaagcaaggcggtatcaactactatcaccctatcctcactactatcaccctatcaggataatccagactttcctatcacaccaatataaattcctctttctgtatcttcttactaaatctttcaccatattctcgatgaagtactttgagagcattttcgcttattaagttgtttttttataaatcataataataaaaaaaaactaatttcgcacacaaattcacttgcgtacttgattaacaaaattaccttctatatattataatgtttgagcaaattgttagggctagaaataaattttatttagagtaatcattttttttttgttaaaagactaatcatttatagtttacctaaatctactttacgccggcttatggttcatttctacgtggatttaagcatacatctttgaaattcaagtacaagcttctgagttttatttttttgttggtctaaatattaagataagttgtctttattttcggtctttatttttaaaataaacactttaagtgtctctcacatatgttgttagtttttttgaaaaggttacaaaaccatcttttacttacaaaactatgttttttattttattttgtgattttgttttgtacatatagatttttaaattgcaactttataacacacataaaaaaataaattcagtttcatattataattattcttaataaaattacctaattttcatctctttggaaaattaactatatgtaatcaaaaaaatatctctaacacttgacaaacatatattataatatataatattatccaacatttatgatggagttgctacgtcggtataggtcagggagtgaatcctctaaaacccgaaattatctaaatcactcccatttagcccgtcaaaacggttttatactttatgtccattagaaaactcggttagcggatattatgtaaataatgtaattcaaataggagtaaattgcgtagcatcagaagtttttaatacaaactatacgtatctttcaaacacaaatacatagatgaaaatatcaacgagctgaagggatatcactgatgaatgttacggtatgtcccgaggacttacttgaattttgatcttggctccttcttttagtaaggttatatatttccaaacactcatttagctcatgagcaacccgagtcatgtttggtctcagtgtggaagaagggttaatgcacaacatcgctaattcaagagctttccaagatgaacttgtgtcgtaatcttgatggagatttcgatccataatactttcaatatcaccatttgcaagcatagacttggcccattctactatgtaagacttatcacgcgattgttcaatcacaggttggccagtgatgatttcaagtaacacaatcccaaagctataaacatcactcttctctgttaaccaattcttttgataatatctgcaagaaaagtagtcgaagatgtttgatttttgtttactaaacaagcaagaaaacatatcttgatactacaatgtgatatgaactagaacttactcgggatcaagatatccaagagttccagcaacatttgttgatacatgagtttgacttcccactaggaaagatcttgaaagtccgaaatcggcaagtttggcttcaaaccgtagacctaacagtatattggtactttttacatctctgtgaaccattggcggcttacatccaatatgcaagtactcaattcctagtacacagaaaaatcttcatatgttaactatttatgaagatagtttaaaggaagaaggaaaaagaatatatataaactttagaaaaagtaatataacaaggaattaatgaaatttcgacaaacctagtgcagactcaatagctattttcagtctaccaggccaattcaagacagggccaccacgttttcctgccaaaattcacaacatggatagaaatcaatacaaatttttaaagcctttggcatgtaactgaaaaaactttgcatcatactctaactttttacccgagagatgttcctttaagtttccattttccatgaactcgtagatgagagccaagtcatttcctttatcacagtatccaacaaggcttactaaattcacgtggtgaactcttagaagtagttcgacctaacaatatatcaacaatatggtataattcatgagctcacgattgtccaaaaattaagtggaagattttagtgtaaataagtacttctgttttgaattccttgtagccttgagttgatgattgagagagaactttgacggctacttgttcattattgagaaaaccatgataaacaacaccaaagcctcctttaccgagaacaacttcaaagttattagtcatttctttaacctctgaatacttaaatcttctatttttcatttccaatgatggacgtataactgcagaaaataaatttgaatatccattaggtttcatacttttttttttttttgaatactaggaggttctgggccgataatccctcagccccgaaaccacagcatgtatattagttttgtcccaagcgtcactcgaatcgacgacctctaagtttcgcctagggtctttacatttatatatttaggatcatatatttattaacttacctttgcgtgttgatgacttcctccttctgaaaatgaagatgagaaccaacacgattatagtaacggccacacaagatatagatgcaacaatcgccaccagccaggattttggttggtgtttcccgcgcctcgttatatttggatcaacactaataaatgaaaacgttattgacgaaatattaactatataaaacattgtcgataataatcaaaattaggtcatcgaaaaacagactcttacaatagttttaaaccatcattattttctctatcttgaagggcttgaggaacagaacccctaagattatttcctcttaagtgtctgtggatgtggagaaatcattagaaactaattaatgaagaccacaaaataatatatagacaacttacatgaccaacaacggtttgatcgtggctagaaattcaggcacttctccagtcaagttgttatttgataaatccctataaattttcaagaaataaatgttaaccaatcaaaagcaattgttttccttttaattcaaattatgtagatacgtacaattctcgaagcatagttagattctgtaggctaggcggtataactccagtcaagttgttatttgataaatccctataaattttcaagagtaaatgttaaccaatcaaaagcaattccttttaattcaaattatgtagatacgtacaattctcgaagcatagttagattctgtatgctaggcgttataactccagttaatccactcgaagacaaatctctgtttgcatgaccggagacatataaagatacatttgtcatgaaatttgataacaatgtgcatataatataaattttcttacaatgagatgattcttggtggtgtggagatgtctataacgttgcagcttacacccatccatgaaaactgtataggtacacatggatcgccctgccagctgattctactcactttataagtagattgaatgttcttgatagcaatgactggcaagtggcaaacaaaagaatcaattataaaatatgccttattttattactactttattcttttgaataattaaaaggttctgagcgtaagcctgtacatcctctcaagcgagagactaaagtatttaatatggttgtctcacaattgcaaacttaatatgttttatatctgcataaaactacaggactacataccttcatccgtatttgtgtccgattgtggaaattgtatgacgctaaaaatctctatagcattcatttggggtggtagagtcgacttcggtgtttttgaaagctgcacacgacatacccctcccccgcattttagtgctgcaggggtgattaaggtttccgcttcaaacttccttggaatataatcaatgtaataaacaccattgaccaggattttgaattgcctagtttcattggcctttaattgttgaatctcagcgaagtaaaggtaagcataagtttcgtcatcagaggattccgacatccaggtaaaggtcaatggctcactgacattagtgggtatggaggctgtcttaattacatcttgtggtgggttgtagccatcagaaaagccacttacattccgggttgtgtttatttgagtccattccggttgtgaatgtggaatccaaacacgatcatagacatcttcgggataactgcgacactcaagtgtcattgaaataatgatatatgagccgactttgatctagtaactgaacccgtgattgaagtacaaaagaaagagatatttaagcaaatccttccttttaacccaagtctctttctagagaattagattaattgttagaggttgtgttttcattagcataaagaccttttatataggcaacgacatcttaaatataaaaaggaaaataccaaaactatagttctaaatgaaaaccccaaaaatatagttctaatgcataaaggaaaacaccaaaacgcaataagcatataatatcaactttatatcaataacgaaaaaaaaaaaaaaaaggttctacataccgtacttccttgcctgaattggtgaagtagaagtgcaaaattttctttaaggaacctgttcgagcagtataagtatcatatcgcaaaggtcttaattctatggctgatatcattggtgtagtcgtccctgttttgacgagacatatgtccaagatattacaccttgtgacgtgaatgatctcctcgataactccatcacctccatccactttttgcacatctacgcttgtccaaatatttggaccgagaaagaggtcaaatcttggagaagtattaagaccgtcatagtttccataaaagaaaagagttctgattagatactttgtgccttgctttacactcaaactgtagcagtttctaattccttctggaaagtatctcaaaaccttgtatggcctcgaagtaaagtctatgtctgagttatttttgatattaccagtttttcctcctctgacgaaattaacatctgatatgtatgttaaattggtcaatggttcgatataaggagattcgttggaaggtaatccgcaatacagactgatgaatcctggtaaaatagtaggtaacaatcggaacaagatttcatttgtttgagataatttcatatatcaagaatattaaagaaaaaggaaaaagtgtgagacagtaaaaataccttgttgattttgagacttaacaagagatataatggagaaagtggcacaagcgagtagcataagcttgctacgagtctccattttttatgctggactctcagttctcaaccaaacaaaaacataacgacaccaaaaagtcttaatacattatattagcaacccctgttatgagaactaaaagtaaaatgttggcaatgtcaacaaatggaaacgtcacatcctaatagaaaatgagctaaattaataacagtctaaaatggaatgagtattttctaggaagctatcaacaaatatatatatatatataccagtctaccactccaaatcaacatagaaattttaaaactatattcctataaagttggaccagaaattttcaaagcacatgatgaattaataaggtgatcaaatatagtttttagattccggtttgttataatataattttaaaattatgattaataatgttaatttttttctattaagaatactaatgtaagtttttataattaaataattaaactactaaagatgcttttttaaacatatttaaaaaaaaaaaaaaaaactaaaaagcttatatttaaaataatatatagtgcgagtgtaataaattaaatttagttttgaaagtttaatataaagaaattagaagtgctttgatatttgataatatgcgagccattaggagatttaattttgtttaggttcaatatatacaaataaattcataatcgataaacaaaatattttgtccaattacacggtttagaaaataagatagtttatgttaatgaattacttatcaaatttcaatatatatttataataataatttacagcttttcagttttattttaagaaaatgtaaaactatattttctactaaaaactagattttataacttttcaaattctttcttaaaatgaaaagtatatttgctgcttttatttttaaataattttttaagcagtaaacatacatgcatgattttattagtttcgtgctccaaccctgtatgtatgtttgctgctttaaaaacaattttattattttttttgttattaaaaaaaacaattttttatgtccaaaatattttgttgagagtaagatgaaatttcacattaaatcaaaaaatttctaaaatctcaacgaaaaaacatttacatattacaaccaacatttttatataatttagacgtgacactaataagattttatacttccacttcgaaaaagtcttaagaccaccaaatttattcgacttggctcagacgatttgtccaacactggatttaaatttagtcttctattacagtatttatctgttttctatatatccacaagtttgatttaataaactttatcttgagttgtatttaaaaatagggaatatgacatgtttacacacttttaaagaattttattttttttgaggcacttttcagagatgaggcactttttcttctattcaaaaaaaaaaatagacttttttaacccataactgaacgatcaaaaacatttattatcttaattattttaaaataatttataatgaaacgctccatttttagttatggccgcttactccggataagaacgtgtgattgagaaactattcttagtttatcgtctctcttccatgttcttttgtttttcatcattttcattccctctttcaaaatcatcaattaggtagttccctctctttcgattagaaatagtagatacaaacaaagcccacatcatcaatccacttttacagcaaaagaaacggagaagaaatagtaatggtgtaccacttttacaagagatgttgttgtcgtcggcatcactagactaaacggcgaccacttttatagtccctgcgactcttttcacgagaatgatgatgttagtctccacatacattacatgcaagtaagttaaaaaatttcagttgccgatggctgacgcagtgattacaaaaaaaacagggccattccttttcaaaagccatagaatttgacagcaaaaaaattagagacaagttcaagtaaactgagataaaaatgtaaagaagaacgtgtctagaaatcgctgtccagagaggtttgttcatttaactttgttaagacgatcttctcgattggattttaaaattttaaaatacaagtccaagtttgattttatatacaaaacatctcaaaatataatataaatgatcataaattcaagggaagaacgtgtccagaaatcgttgtccacataggtatgttcatttaactctgttaagatgatcttctcgattgaattttgagataaaaaggtaaagaataacgtgtccagaaatcgttgtccacagaggtctgttcatttaactctgttaagatgatcttctcaattggattttaaagttttaaaatacaagtccaagtttgattttgtatacaaaacatctcaaaatataacataaatgatcaaaaattcaagggaaaaacgtgtccagaagccgttgtccacagaagtctgttcatttaactctgttaagatgatcttcttaattggattttgaaaatttaaaatacaagtccaagtttgattttatatacaaaacatctcaaaatatagcataaatgattaaaaattcaagggaaaaacgtgtccagaagtcgttgtccacataggtatattcatttaactctcttaagatgatcttctcgattggattttgagataaaaaaggtaaagaagaacgtgtccagaaatcgttgtctacaaaggtctgttcatttaactcagttaagatgatcttctcgattttgcaccaaattttttaacatttatatcttaaacacaaacgttgaaatcaatctaacatttgtgaatgaaaattagtctcagatctaagctaatacctccatcaatttcactagcaacaaggttcttccataagtgaatcaaccatcaaaaaacttaaaaaccttttatgatgaacacataagataaccagactttcggaaaagatacaacccaaatataatcatgaatcaaatttacagaacatgaactaagcaacgagttccattaattagtgattcgaccattgctatcaaacgattcgaagtccactacaaggctttagtctccaattcaagagaataatctcgaatatgaaattggagaagcaagacaaagaaatcaaagagcaagtaatcagattaattttgcaacaaacatcaaaaacataaaacgaaaatcaaaccgcaaatccaattcaagcattcaacgagtcatgtaactaaatcagccagatagggcagattctcaaattgatggtctgaaaaaattctccttcaaatcagatcaaagcagacgcggaaaatttaaaaagctgaatctcaatctctctttctcataaaagcggatgatttgttgaagagggaagaaagaaaaaggaagaaatatattttttggcttgatttttgtttatttttggagaaagtaagagaaagagagagaaaggataggagaaagagagatagaacgatatctggttaaagggtaaatgggtcaaattattcattcaaagtgccttctctttagaaagtgtctaatcacggaaatgttttttaaaaagtgccttagagtgtaatattctcttaaaaataaggcatttgtcttagaatgatgttcggatttaggtactttcgcatatgcctttcggatttaggcactctccctatgtaacaagacgcttctagccttagaccattgacgtcattcttcttctccttttgcaacttctttctctactcgcgaaacaaaattgacccacaaagccacaagacatagagattgatcccacactcttagatcaccggccgattctcgtcgccgataagagaagatcgaggaagagaatacaacgatgttttccacaaaattgatttggaagcgcttgatgttctcatcatcccccgttgctgccaatttattttcatctccattatctccttcttcatgtccttctatttcctcttcttcttatcactccagattgatcattcgccggatccgaaactcgattgaatctggtgacatttttttttttttttgaaagaatgtaaaatttatattcaaacaaaaaacgttattacaaaagatgcatctgttttctcagaaattttagagtgaaaatagctagaggtgtagagaaggtctgaaaaaaaaattgaagctgagggaagtagatcatgggtggagacgcgttgagagccataacctaaggcagttgtcgtagctatggtcaccaacgtcgtttatagagctgattctatttcgcacggttttgtcgatgagtttgatgagtctagtggtggtggaatgtgcttctccgtgacgtcgtgcatttctttctcgccagacgtgatagagagatgcttggaagacgtagcgaaacagaaagagagagtcctttgacattgtggagctgcagagtagagctaataggcggtcccagtcagttgagtactcatgagataggagacgccttgttagattatcccaaattgcagtggtgtaatggcaagagaagaataagtgatttcttgattcttcgacgttgccgcagagaacgtaattgacttgttgtccggaattccactttttgatccgatcacccatggattatctatcatggatcgcaagccacagcaggaaagagtatttgggtgtgttgtatgagaaccaaacacccttataccattgcctatgcgtgtgaatatcccggatgttgtgccaagtgacttttgttatgaaactttgtctgaaattatcacctgaggatcgccacagaaaaatgtatggtgcctctgatctctctcgttgaagaatactctgaatctctgcctctatcttgttgtagattgcagtacgatgctgtttggtcctgtgagaagccaaaacagtcgcgacagtagctgctaacggtatccccatgtctattgttctacgagcatttgtaacatcaaccagttgccgtagctgtgaccaattatcataccagaacgaagtagagctgccactttttatctcaaccttacacatagatttagccacatctctgtaattaagcaacttcttccacatccaagaccccagactagaacgatcatttgcggaccagaatgagcctttccgaataatgtaagtccaaacccaattaacccacaaagaagactgccgagaaacgagtctccaaatcagcttcaaacaactaactttatttgcttccaagagagatttgatacccaatcctccttcttgtttcagtttacatagcgaagtccatgttatttttgctttcttggggttaagctccggtccagaccacaagaaagcagaacatagcttctcaatctcttttatacatcctgctggcagcctatatgcagacatccaaaaatttgataaacttacaatcacggaattgataagagctagacgtcccgcataggagagggagcgagctgtccaagagcttatctttgatctcactttgtcaagaagaggcgaatagtccgcagtagtcatctgtttcgttagaagaggaaatcccaaataacgaaccggtaactgaccactagcgaacggaaaagcggagagaatattatttctatttagctccgaaacttcagcaagataaagggtcgatttctccaaacttatgtgcagccctgatttacccgcaaaatccttgaaaatattgataactccttcaactgatctctgctgcccatcaatgaacaccattaagtcatccgcaaaacataagtgcgttaggctgagtttcttgcatttagggtgatagccaatgtttcggtgaactgcagctacatcaatcatatgagacagaacattcatgcatataacaaacaagtatggagagagagcacaaccttgtctcaggcctctcttactaccaaagaaacccgcctgctcgctgttaacttggacagagaaagtggctgtcgagatacagagttttatccaatggcgaaatttttccgggaatttaagagcttctaaagtgttcaacaggaattgccattgtacagaatcaaatgctttcgatatatcgattttcatcgcacaacgaggagagattgaatctttgtggtagtccttgactaactccgtagccaaaagaacattttccatcaagagcctttctctaacaaatgcagattgattttggaggataaaggttggcagcatgactttaagacgattagctataattttagagattaccttgtaaatcacgttacaacatgaaatgggacggtaatctcgcatcaaggtagcttcatcttttttcggtatgagcgctaggattgttgcattgagccctttaggaaggaaatcttagatgaaaaaagatttgattgcagcgatgaagtcttgaccagtgattgaccaagtcgctttaaagaactcacttgtgtaaccgtcgggacccggagacttgttacttggcatcgcaaacaagactttttgaatttcttcggatgttacctctctagtcaacatatcctgatctgttgcagagcatctaaaggacatcaagttttgcaactcttcaactgtcattccctgaaaatcacttggttgatgattgagaaactcctgaaaaaaacgctcagcctcacctttaatttcctcacttgtttgcagcacaacaccattcggtccctgtatctccctgattgagttctgcattcttctaacttgcgctgctttatgaaagtaggagttatttctgtcaccaactttcatccagtgaagtttcgatttttgtttcatatagccttcttccagatctgctaaatgctaccaagctgtataagcatgcagctcctctgcgatcatttgctgtgacgggttagcaagtgtgttggtttgctttgcacaaagtaactcgtgagcctctcgagtacgttttggcaaatctcctagcttctctttccccagtgctctcaagctcggtttctgaggtatactcgtcaagacatttacaaatttaaacggccttcgaccccctatcgctgcagcctctagcattatccttcctcttgtatgatcggaacaaccaccagcctcaaaaacactatatgagtgcgggaaagtaatacaccacgagtcattaacaagaactttatcaagttttttgcatatcaacccgttctctcgcttattacaccaggtaaagcgaggaccatgatatccaagatctgtgagagagctatatcttacaacctcctggaaatctctcatcccgagaggagtgaaaggtgaggtatcatagtttgaatgctctgaaccatcgagaatctcgttaaaatcaccgcaaagcatccacggtttattgcgaaacagtggtgaatcatggtgattcctaatgtcttcccacaaaattttcctctcctccacaaagtttgaagcatagataaaagaacagaaaaactcttcctcctttccctccaataaaactgagcaggtaatcatttgactacttttgaatacaggagttatgcgaacatttgcactccacactacccaaatgcggcctagacgatgagattcataattagtcagaattgaccaatccttaaaaatagacgaaattatgtttggcgatcttccctcattaactcgcgtttctagaagacaaccaaactgcatagaactttgagataaccacttgcggacaatggaatgttttgaagatttatttagaccacggacattccagaagaaacccgacatatgattatctcctttaggtgacccggcgacctgaaacactctggtttccctttgtgttttgattgacggatcctttaacaaccttatgcattgttttggacgctcgaggaaaagaaggacgagtctcctgagtattgactagctctgaagttaccaagagttcagttgattgcttagaaacaatctcaccttcctcttgattctctaattcatctgtatcgtcttccatagctagaactgtatatctagatggagaaacgtgattttggttctcatgtacgtgctgaagtttcggacgttgatgtccctttgtaggtgagacagaatgccacgtaccgtcatcctgttctttttcaatcacagctatgacgttctcgttttccttaagttctgtagtctcagcttcactgtttttctcagttccattagtctcgacttccctctgattaaccagcagatttgaaaccaacaaaggatccttctgcaaatcctgctgactgggaataacctctgttaccacctctgtttccggctcaactggtttagaatgtcgtcgtagcgaacgtgatgtcaatcaaacctcttgcaaatgtccccatttgcagcaagatgagcatctgggtgggagccaagggaatttgtattcaaccattgcatcaacaccattagtagaacttaaatcgaaattgttttggcagctcctttgataaatctgcctccacaaatatttttgcttcttcaaaactgttgcagagcattgtatccgggtgcaaacgctttggttcccccattggacttgcaagaaagcttaaccccttccaagtgaacattgtttgtggaacatttttgatggtaatccacatgggcattgatgtgatttctggttgagtgtcttcaatcactggagaccacttggatactatcattggcatatcagctatgttccacatacctcgacgaagaaccctagatctgacagcactatctcggatacgaaacttaattgtttttggatcaaccacatgagcatcgatcttcactgttttgtcaccaagcggccaaatcttgttcacgataacatgaactttggcaacgtgaggtgcggtttgtgggaatctgcctatgagcaaatcgtcccaaagtggagctgaatcttcgaaaatttcatcaggaatctgaactatcggatctccgtcaaccatggtgacagagaaatcatgcttcgtgagagaaggcttgttttgaacaattgaagagtatgatggcttcggagcagcagatggggaatctcgggggcttgacagagtgacctcctccaccaccgacggtgacatgacgggggagaacggcggcggatccgccagaaccagcgtcttgggacacacggcagcacaaccctaaatcgctttcagagtcgccctagccacgtcagcaaaagtgtattcaagtttaatctggtgacattgagaccgccatcgacatcctttgctcccacactcctttcgttctagatgatcaccgtattctattttgtctccaaaatcaggtgaatctctttaagcttctattcaaaattgtagtcaatttgctaaagtattggacatttgaaaattttctgggttttgctagaattggtggctaaaagggaaattatgttgtttttattgattgtgactagttcttaggcctgtgaaatgttgcaagtactaatttcatgtgtgtgttacttacatattttgcttagatttgagatgtgtgatttaagccttctttatgatatgtgtcttcttttctaatttttgttcgtttgtttttttctaagtttatggctctaatttggagattgaagttgtagaagatgaggatgatgagtaatgagtttaatacataattcacagagttttgggcttatcaaacctcagagagatgaggtttgttcctttactttctatagctagtgttagttttaatgtagagcactgtttaaatcgttagggcgtcgtacttctttgtttcatcataagaatctcacatactaagctgaaatctccttttgttttctctatgaaagtgaatacaatgtttgatgtatcatgcgagtgtgctaagctctcaatccataaccatttgaaggttaacataaaatcagcacaactattatcattaactgcaatttacatttgttgttttattgtatttttctaaagatttcattgcattgtaattcacaagtgttttattagtgattatgtatgtctgcttcctttgtgatagtgaatacatgacctgatttgttccttgcagaatcagaacttgtcgtgtcaagaggtggagcaagtctaggaggataagaggattgatgataaactctttatagatgatacactttacattaatctagttgggttcactagtccttgactagggtttagtgttatcatctcgtaagctagtttaaacattgtgtttgggttccttatctacaatctactaaggttttgaacacgaaaccattcataaaaactttttcccttgggtttagtcatgtgctttggcttttagggtttagttttgacacaaaagcctcgttgtatgcattttctcttgggtttagtcatctgtcttggctttagggtttagtttttgacacaaaagtccatgcgttacatacttctattttgggtatacgtttctgaattcatgaggtttcatcaacttattttccctgcatacctattttgggattgatgataaactctttatagatgataaactgtacattaatctagttgggttcactagtccttgactagggtttagtgttatcatctcgtaagctagtttaaacattgtatttgggttcctcatctacaatctactagggtttagtttttcaacgaatggttcattttatattaatcgttttgggttccttatttcagtttaacttactccttacgcttgattatatattactatgttactccttacgcttgattatatattactgtgttactccttatgcttgattatatatgaagttgtgtaggtgatgacaaatgttgaactctcttaactgttttgaaggtacgacaatgcattaatctcaccattactgggaggtgttttacttcgttcctgcttctttctcttataatctcctttgtttaagctacttttaaaaatacgttcaggtaacacagggagacatacatgaacatatcaagaagaatgaagagcttctcactttattctcgactaatcattatgtattttattgatgtcttttgatcgacaaacaaatgttataaatcggtgaaactcacgcccattgaagtaagggtaatctcggcataaatcggtgaaaatatggcaactgtacattagtactgcacataatgcctaaatccgaagatcccttcccaaatatgcccattttgacaaatctcccctttatcttataatttacttcgatagtttgtgctgtttttcttggacagatagaaaaatgaaaattgtcagtggacatgtcattctttttttcctgttattgtctgtctatgtaatctgttcgtttttattttataagataattatatgtagttcaaaactctttaagccatacaaaaaaagttttcctctcctttgagagtcaattgtcttgggaagatcttttccaattgcatattcaatgatgaagattagtgggattctcaaattaaaaatcatcggattcctttgtaggtggtttttgagttccctcaaatttcttaccaactcggtgatgactagcgacgacatctgcttcacatgtctacgtgtctcaaccttgtgttggattctttaaactatcttacttcctaaaaggattaagttttttggatagagttttctttaagttggacctccacttataagctgaacttgttatttatctggttaggcaacttggatggttttattgtttagataatccaatgatgtaagaagtttaatgtgtttgttaaaacatgtaagtgaaagttttcacagttgtatcttttacaacacaaaattttaaataaagaacaacacttatgagaaagagagaaaaaagactacaagcaatatcattctttttttcctttttattgtctttttcagttttttttttcttctactttgttttactattcaaaataagttaattattggtggaacgatacaatatttgtggcctggtaagataagtatccacaacttaacatttatcaaaagtttatgaaagtaattgaaacatatgttctattggattttgttcatatgaagtattagttgaatattctaaaatagttataattttaggcattaaaacaagagaacctcaaatattaataaaagaaccctaaaatatgacaaatatttttgtaaaagtcaggtggagtgcaaatgaaaaaaaccctcaactttggccagatccatttttaaaccctaaactatgtttttagtaaaacaaaccctgaactaaaacctgttaataaacttaaccccacagtaattaaatattaatgggatattaatttccaaaaaaaacaacaacgagacatttgtatttagcgcaaaaaccacatgatgttctttaaaactgttttgaatttattacaaaaaaacgtttagtgttctagatgattttgaattgcttaattagtttggattttagaagttgaaagaaagacacaacaacttaaaataatccaaagagtcatgcttaaataaatccaaccaacataactatcgaaactgttgcaacacaacaatatttgtcacaaaaaaaaacaatcgtttcagagggacaagatattctgaagtaaagacttgtcaagcattaactttgaagagaagattgtattggctgagtgatagggttctcttcagccattgttttctgttttttccttggtcgtccttgaggtttcttggatggttttggcactgctttacgcttgcatgaacgtttgttgtgtccgatttgttgacagttgctgcaagtctaaatatgcaaagattaaattaaataatttgaaaaggaagatcttgtgaaacataattcattgttctctattttaccatttgaagtttttcacgtgtagaaggaactttttgaggtggacgatcttcagttggatcacggattctgtcattgttctttggtcttcccggcatgattctgtctggaggaggcataacaacaacatcaatgtgggttttccacaattccatcccattaacaggaaaaaacaaagagctgtaacatagcttccacttctcaattgaataccaatctgacacaacagtttccggtagcttcgtttctttatattcctcccacatagcagacataatatggcagcacggaatgccactcacatcatatgctctacaagtacaagaaacagcatcctgaaacagcaagtctataggttcatcttcattcttgggttcctcttcttcttcctcttctccaacaagaacatcatcaagataaggatcatcaaccctaacaacatatagattcatactttccaactcataagtattgtttatcatctctgcaacatcataatcaccacacaattcttttcgattatggtcttcagatcctgaaggaaaatatgaaaacttactcatattttctgcaaaaccctcattccgaacaatacttattagcattgatatacttggattttcaaagtccactctacaccgccttatatcaccaccattgtatgaaccatcagatgcccaatacccaccaacgtgtaatcgaaaaaaagtcgtcctgcatacaaaggaaaaacatcgtattgttagtgaagtggagaataacttccaaaagtattttaaattcctcgttagtggtaatatgcaaaagaaagtggcacatgtatggaactcgaacaaggggaaaaaatattgtaaatcctttgtttgacttcgttttttggtttgttatcttttttttttttttttgtctctttcagtaagctttccacatcatacaaaaaaataagagttactccaagcttttgaaaattctatatgtgtcgaagtcaatgtagaaatacaaacaaaaaaattttttttttgacttacctcaacatcttagaaaaatcaaacgagatgaagtagacctctgctctccgaattcctcactccattacggtgacttgatgagttcgtcttcaaatttaacactaaaactgtttctctatcgccttataagcctactttcacttctcgttcaacatcgttggatttatgacagattagggttttacgatttggagttttttctgaacacgagtttagtgtggtctatggcaagcaaacttcatgtggttttggcgttaaatacaaacgtctcgttgtttaattactgtggggttaagtttattaactggttttaattcagagtttgttttactaaaaacatagttcagggtttaaaaatggatctggccaaagttgaggtttttttttattaaattcctattctaaaatagttataattttaggcattaaaacaagagaacctcaaatattaataaaagaaccctaaaatatgacaaatatttttgtaaaagtcaggtggagtgcttgtaatgtagcagatggttcataacctgtttggaacccatgaaatgaaaacttaatattgttattaaagcaagatgtaaaacttaaactattgcgtatcgatatatctcaattttaccaattttaggtatgatcttggtatagtttttagaatctttttgttatttctagagtattttctagttcttttcaggattttacacgtttaagatacctttgaagattatggagcattctggagcaaaatcgagaccttatgctgcaaaagaaattcagagaccaaaattggtgttggtgtcgatcgacactatccctggagtcggtcaacaccaatatctaaaggaaattcaattttgactctctttgaagttttgaagatttgtagattcgtctcatacattttccttattttcaaagaagcctctacacgtttttagaaacttatatatagatttttaaggccattgtttagacctaagcttgagagggcaatctcgcttttttactttgttcttgggagcaaaaccctatgaaattctttttctagaagatctttctaaactataaactcttctaaatttcttataagatttattattcaatcatgttatttgcttcaatcttcatgtgtgagtagttctcttgttgggtttagggtttctcattagggatttagaagaattagtagatcgataaccttttaggatatctttagagttcttcatcttaattgtttctaatgttagttctagggtaactaactagaatttgatcataggttaataagtaaaatccgagaggccgtttattactggactatcatagatgggcttaagtatctagatacatataaatctgttttagatacttaggttaacttatcaaacctgattattatgcatgtttagtatttaggaatttacagatgagagttgagattcctgtttattaagcatagttaatcaatatagacaagagttggttgattataggttagtgatttgagttctagaacggttcgctaataatcctagagaacctacccgatccaagaaactttgtactcgattgctttatatctacggaaaggtttcctggttctctttgtgatcttgactcttgtttcaacttgatgccccattctgttgttaacatttgggatgacagatttcaggccaatcaatataaaactcatctcttagcggatcgatccaagggaatttctgaaggtatcttagaagatgttccagtgaaaattggagaatgcttgattcctacagacttcatggttttggaatttgaagaagaacctccagatcctcttatactgggtagatctttcttatctattgctagtgctcatatttatgtgaaaaggtcgaatcactttaaatgtatgtgatgtggttatgacttttgacatgggcaagctgaggaagccacccaccattgatggttagacattctctatagagacccataaacactgttgttgagactgggaaggtattggatccaagcgagcattcacatgaagagagttgcaagacagttgtcgagaaacaagctgcagcatgagtgtcgatcgacaccatctcctaagttgatggacaccaaggacaagcagagacaaggttgtccaaaagagctaattttcgagttggaatcactcctacaagtctaggattagttgtcacaataactactgcacctctactatttcatccacctcttgaccagccaaggtactcatgttctccacctaaacctcttgatttcatcaataagactttcaaaattttcaatagctgttttacggtttatcaagccacgagtttcttgtcgagcgcttgttcgttcttttgatgattgtgctggaaaaaggaatatcccacccatacctaagccctaccctggtgatgttcctcatttgcttggaagacctcacgagttgactgcttatacgccaccatggatgatgagacgtttttctaggaagcatttactgctcccatctgatccacctaatacctgaaacccgacataattgatgcgtgttttatttcgcctcaggcttttacctgaaagaccacacgactactgcaagtgcacaatatatcggagtagtattttaggatcgaatccacaaggagagaagtagttctgagaaatccttaagaagagagtgaagctagaaccaaaataaagagagggggttgttgtatgatatgagtaaccaaataaagacaagttactaaactaaacggtaagcaataagagagaagcgttaggtcatcgagggtttctccggatgtcatggttgaataaataaggtatagatctcaatctaggtgaaaacatggctaggtttgtttacttccaatttcccagacatacgaaactctatcaagaccagctaaccctaacggttagtaggtgaaagccggctatcatcactaatatcttgcgtactcagttgccctatcggctagtaggtgccaacatggtttcaaaatacaagattaaagcattaagttcaaattcgattctagtccataagtccctatcactcggcgggtgtgcaacggttatagttctttattcagttgagttaggtcaagcattcaaacgagattttgccaaagaatgaaatacctaaggtcaagtactaggtggcgttctggatatacaagcattaagattaaactcaactagaaggaatagtgtaaacggtcaaacaaagccatagaaaccaccaacctagatcttcgatctattggtccccatgaattcccctttgaaaaccccctcaaacccaactagagatctactcgctcatggcaaagaagctaatcaaaagttgggttgagtaaaccataactaaaagatgaataaaactagaaaacgggttagggattacttctttgaatgtagaatacaagaggcaaagctccaccttaaagagtcttacacgaaaacgagaaagagaaagagagagatggtgttcttcaagcttaaagaggtgtggcggcaagtgggcagctcttggcgacagctagggtttgatggtgatgaaggcacgcctagggttagggcttagaacaagtatttatacttgagggccaagaattaggtttaggggtaagaacgtcattccgccggataagtaagtgatcgggccgagtagtgggcttcaaggcaagagactaatgacggcagtgcaaagaggaaaggacttgggcgtgacctaatggtcggtggtgagctactaggagctgcccgtgttcaagtctcatcggccggatgtgttttggacttattatttccaaacagccagttcttgacatgtctttactctttgggtcatatcttctaaacggcttcatggattgctatgatttgacttcgacgtgaatcttgactcttctagctgtccaatgacaccgagatatcctcatgccgggatagggaagaccttggccggatgctaaacttccgaagcactagaatgatcgtcttttgatacttttagcatcaaaactcttaaaaccttcttggcatctagaatgtgtgtttctcctcttattggctctagaatggcaccaaatgctctttgaaacataagaaaacaatagctaaaacgggctaaaaagtcgtgttatcaactcccccagacttagactttgcttgtcctcaagcaaacaaaagaacaaatctggtggagagttctaaaaatcgcgggaactctcctgttatcattgaccgtgtctcgaatatatcctacagaccacattaaacaaaagttgcgttagaacggtcgctcaatagtcctacgcctttctcgtccttgtccatccgctttgatcctacagaactctgaattcacgtcagtcaactcattacattctttaaatgtgttggcgtggactttcttattagaaggtgtcattcaggatagacggtgtggatgtcggattcacactcaagtatttatttgtttagtgagaaggattattcttgaggtcaaatatactaaaaaataagtaaatgattatagagaaaactatgagtattgtaaaagaaaatgtatagctaatttgcaccaaaatatgagtgtgtccttacatgacctttgactctcaatatatatccaaagaatacatttaattcttatttaatcacaatcattctatcttaaacatatccgtttctagtcttcgaattaattattttaacgtttgaatttgaatccactccgggccttcttgacttcacctttcggcccatttggcctcttcaatccgagtagtcttgacctcgacgccgcattcacttcgcaggtcaacaccccatccatattttcacctcgagaacgcttatgagccctctctcttatgggcctcttttatccacgtagcaatctttggccggatccgagcccgtggtgcgggatccgacaccaacaattagccccccaagtctttcgaagtgttactccagtttggaaggctttaatgctataagggcaaagattgcgccaaatgattcttttgatttcccgcccaaattacgcgattgcattgatctcggaattttccataattactgatgcgacacctgtcgcaattatgaccgtatattgtttatttactattaacgcggggaaactcttccacttcccccacgactcccaagacggttccgttatcatcactggctcgcgtgtaggtaaatttactttactctttccttgtcattttatttttgacgcttctctctcaaagcaaagttctcttctttccctgaaccttcaatctttctactctctacacaatgaattccgaaattttaagacctgaatccccttcttttgacgacgtcggctctagtaatgacctctgcacccggccgaacgacatcgccggtccccactatcaatccacatgcactctccaatctcttaatcgattgggagagctgtgtcggattccggccaaagtaatgagggatttccagatgccggagccaaccgaatcaccggaggagcaccgacccgggttcttttgcgtgtatgagatttacttcaaagggtgtggcttgacttttcctctccccgaagccctcgtgcgttacttatcggccctcgaaatcgccttaccccagctaacccccaacctcctccggactattctaggaattatcaccattgcggcggaggccggatacgtcgtcagggttcccgaactgaacgaacttctcagtgtgaggagttcttcaaagaaagtcgggtacttctcgacttatccgaacgcctatagaaatctcatctcgcatcttccgaataaagacgagaactggcatcacccgtggttcctagtttaaaagagccctgcctcgatcgggaacgtcccagacttgctctccacgaagtggatcaccaagcccggtagttattaggtcatgcatatgagcttcattttacttcctgccttatctgaccaattctattttccacttcgcagcttttattgcacctacccttcctactactgagttcggcgaattcttcaagattgtcatcgaaggggaaaccctttggaactccttcactcttgaccggttcatagaagccaatcacaagcttaggatgagctcccctggacatctcctccagctgcctctgccccctagctcctttacctaaagggacttccgctcgagccatcacagctcgtcacaagacaatgtccaagtcgattgtggaggcttgcgagatgaacaaatcattcctccaatccacagtcgacaagaaggaatacagcagaaccctgttagtcgacgatggcagtgccgaaggggtaaggtctgccggtgcttacagacccactcctcaccatgaaggtcatagcagccgatcatcccacaaggagcgatcaccttgccgcgactcacctcgacccacttcccgatctggactcagcagcgagccaattgccgacctgattcggaagaagagagatagaccatctcgcaacagctcctcccccaaaagagacaaggcgagggcccgaactgaccgctctcctcgaccgtcgtcgccaccccgatctatgggtcctcctcctccagtcaccgtatctccctcgtccggatcaggaggggaaaaggcagagcgaagtgctatccctcggcgggatgaaactgaggtccgagatgccggaactaaagctgttttggttcctcagaccaagtcgctcacgggttagaaatttcttcatatttttttatcatattttttgccatttttgcttattgactcagcgtccttcgaccggtctgaccccttttttttaaaacagcgatggaaacggagaggaacgtctttcgatgtttgagaacccgaaaagacaccatccttccaaccttcgatagatggcgtcctgcaatccgcgagcgattcctactccctgcccatcactcatctcgggttagttcctttttaccgtaataaaccttttaatctttgcttctttaccctgtcgctaaccccttcttgttattatctgatccaggcaaacagtgaactcaacgacatgattgagtactatgaaaggctactgcttgacagggaaaaagatgttatggcgtggaaggataagtcttcatcccttgagtccgatctccactcttcaaaggatgccaggctgaaattggaggatcagttggacaacctctccaccgaactcatgaagtccaacggcgagctgcaggagcagtaccaaaggtacgacaagatccaagaagaactttcaacttcccgggacagactttcggaatgcgaatccagtgcctacgagttgtccaaccagctatccgaattgcagcttaagtacaaagcggtggccaactatcgggatgctgagttggcgaagtcgacgtcaaaggccaggaaagaggtgaaaggtcgtgggatggaattgatccaaggggcaattgtcttcatccagactgagaaggttagagcggagctggaatctgacgtcaatgagtacgagagtaatctcctccttttggaccaaactcatgaagatgatttttccgcagaacgagagagggacgagttgaaagccgtcctggaagagaagcgaaatcgtttagcttcccttccttcctcgtcgttcaacccccagcagttcgagatagtggttatcgaggatgatgatggttcagactccgcgattcctggcgagcagcccgctactgacgagccgagtgagattgagacaactgccgtagatcctgagtcagttcaaaccgaacccgagatacccgagaacccgtagtggctgtgtccacttaatggggattgtcccttaaactcgaaattcattatcgttgtttttctttttgaattactttatctgcctaagtaggctttaaacaaatactttgcctgaggaggcttttaaaccttttctttaagattatgatcccgagagggctttccttgtgctaattttcagtatgaatttgcaaagtccatctctttaaatagcgtttttgtttaaccatgtggtcaagttacgggatttgttggttgatcagacctatccctaaaaatgcagacttgaatccgcgaactctccaactccccaactcgggtttagtcagttcgattatttttgcgggttctgagcctttactatttaccctgcatttaatggcccacttatcttaaatgtgacagttgcctttttgtccttggaaatctggaaaagtgtcacgcttctgaggcaataattgccttttcctcaattcccaaaaatggataaactcactcggacacgccacaattattaactttgtggtttcgagtaaaaccctaaatcactataaataagggcataaactttcttaactctcgaaagacatgatcgcagaaatttacttgaacaacacctatagaatggaacgcgaaggagcatccaccgtctgccccctcgaccccaggagtcctttgttcttgtccggcgatggcttcgagcccgccggcctcctctttccacacgcttgtttccactttccttcgaaggaaaagaaggaggcgtacgactttatgaacaaggtaaagactctcttgttctctttttcggaacgagttctacttgttttctaaccagttcgtactttaggtcgtcgacaagcatcgccgcctgtgcgatgaaaggcagcgtttaggccttaagaggcaaacgctcaaggcccgaattgctcgcatcgagagtaaaataagtgccatggagagcgacccttttcagtgaaagtggaggaacttcgactgcgtggcgaagatcccgcacatgctccggatgtacctccgtgctcgaggccaagttttcggtcccgtaaatgctccggttcaagtgatcccgtctgacagtgaagacggtgacgacgaggaggaggacagtaacccctggaagcgcgtgaagaatgaacccgacgtggatgacaaaaacgaggcgtccactttgaaccccgaaccggcgatgaaggagcctgttcctgagccccttccctaaatgttttctgagactaaaaacccttttttcgcatggacctacctactaggcttcggcccatttatttaaggaaactttctaattttccttgactcatcaaatattcgttttggagatactctttgaatgcagggcgaccaaagcgacgtgaatacttccgcgaatcactccggctttaaatagaatcgcatctctgaaagctaagagacctccctataaatttcctctctagggttctttcattccttactaacaataccgctcttttctttcgtagttatggccttcaacctccgatgctcggaatccatgccagacttttcgaggatcgggatgattgatgaggacattccgaacgtaccagacagaggacgctccccacttcgtaactttagatcccagatccgagctccgtgtgcacttatcagggacctttcgagcagagactaagacatcgcgatgtccttcatcaaggctctcgcggctcaacacaaaaaacgctcaacgaaaaagaagaaacttcgaaagaagatcaacaaaatgctgcgaagagtcaccgtgatatcaagggagttacacaccctcaactctcaccccggagattggatcgaactcggaatcgcacaatttgctcgcatcccggattgtatgatgcccattcttgacatcgccagtcaaggggtcgaggtgttatgcaagacgaggaggattttctagttcaaaggacttcgacacattttttcttgttttccgttttgaataaatttagctttgtttcctgctttgtacgttcgcatagtcgaattccttgttttcactcgttcgtgtaatcgaactctttttcaacatgaataagacaaatttaattaatagctgaactcgtttccgagctgcctatgtacccatttcgggatcaagcctcaccgtagttcatgtacaaaaaatgcgtgtcgtttttttttttcttttttttcaaacataaaatttcttcaagttcaccacattccaaggacgttggactggtctgtcctctaaatctttcaatctgtaaacaccatttcggaccacctcggtaacaatataaggaccttcccaattaatgccaagtttgccagctccttcctccttcttgttatcgaaaacacgtttcaaaacataatcgcccacaaagaatggtctgcttttgactttcgaattgtaataccgagctgctgcgtgttgataattttgaatttggattaaggcttgatctcgcctctcgttgatggtatccaacgaatcgtcaagcattgcagaattctctttttcattcaaaggagcttccgttcgacgaagtcctggcacattgagctcggctggtacaactgccttcatcccgtaaaccaatgaaaacggggtttctccggtcgaacgcctaggagttgtgcgatatgcccataagactggctgaagttcatcataccagccccctttcaaatgattcaaacgtttcttaaggttgcttagaattgtcttgtttgcagcttcggcctgaccgttcccttgtggataccgcagagtggaataactgactttaatcccccagttgagcaaaatgcttcaaactcgtgcaaaataaattgtggcccattgtcagtaactatttcgtatgcatatgatgttcttccaaatgccttgcctgcatatgatgttcttccaaatgaaagtctttactgtcgaatctttaatattcacatacgcttcagcttcaatccacttcgaaaaataatcagttagaaccagtagatattgtacacctcgggtcgacctatgtaatggtccaatgatatccatcgaccatctcatgaaagggtatggggcggagatcgaagagaataactctgaaggttggtgaatgagtggtgcatggagttggcaacgtttgcatctttgggcatacttaacgcagtccgtgatcatagtaggccagtagtaacacattttcttgatcttgaaagccatagcccttcccgaggaatgacttccacacaagccttcatgtacttcgctcataacaatctcgactacgggcccaaaaatggaaagcaagtaggggtcacttacacctcgtctatacaaagaattctttgataaacaaaatttcgcgctaacgattctcattttcctagcttgccatttgttctttgggagtttgcctgtaacgatgtaatgctttattggctccctccaatcagcccccaatctttagccggaatttggtcaacttcgtgaaacaccagagcttctggttcgggatgttcatttggcgctagtatatcctcgtcaacccacggttcagtttcagcttcgattttagcgtcggagatgacttcttcaattagttcgatcccaatattttcctgcacagcgggcttaggtacggttgcttcctttgactttcgtcttttaacaggtggtaattcaacagcagtgtcgccacgatctcgggctgcagctcgggatcttgtgactacgaacgcctccttttcttccttaatgctcctttccgaaatacactctaccggaatgatgctattgacttcgggatcggatgttgatgccagggctgcgagcgcatctgcggtagtgttttgtcctcgtggtatgcgaatgagttcgaatttcctaaaatttttagccaagtctttaaccacatgaaggtatgcttccattcgtgaatcttttgcttcataatcaccattgaattggttaacaactagttgcgaatcacagtaggcgaccacttcatcagccccaactccctgtgccaacctaagtccaacaattaatgcttcgtactctgcttcattattgaatgagttgaataagaagcgaaatgactgttcaaggacttcctaatttgattcccactccggatgcgttttttgatgatgatccatcaacatgtagcttcaagtctaattttgaggttgttccttctctccgggtaccgataattctgttaaaaaatcggctaggacctgagctttcatggcgactcggttcttgtactctatgtcgtattcactcaactccaccgcccattttgctaacctaccggactggttcgggctatggagaatagtccgaagtggccgatttgattatacttcgattggatgggattgaaaatatggacgaagttttcaagctgagattactactgcaagtgcaagcttctccatcattgtgtatctggtttcagggtccgtcataaacttacttatgtaataaattggtttttgttccccccggtcttcccggattaagactccgctgactgcatgattagaaactgagacgtatagataaagtttttcgtctaactctggtttgaacagtacgggcggcgaagtcagatacgcttttagctgtccgaatgcttcctcacacttttcatcccaaagaaattccttgttaccctttaagatttgataaaagggtaaagatttatcggtcgaccttgaaataaaacgattcaatgctgcaatccgaccggttaatcgttgtacttctttgaaattctttggagacggcatgttgaggaaagcgttgatttggttcgggtttgcctcaattcctcttttcgtgacaatgtagccgagaaattccccagatgggactccaaacgtacacttcgccggattcaacttcatttgatattggttgagaatcgcgaaacactcttccagatgttttacgtggtcttcctttttcagcgacttaatcagcatatcatcgatgtagacttccattgtttttccgacatgctcactgaacatcttgttaaccagccgtggataagttgctcctgcattcctcaacccgaatggcataaccttataacagtagatacccctatccgtgataaataaagttttctcttgatcttccggattcatcatgatttggttatatcccgaaaaggcatccataaaggataacaattcattcccggcggttgactccacgagacgatctatgtgtgggagtgggaagctatctttcggacaagctttgttgagatctgtaaagtcgatgcaaactctatcctttccattcttctttttgactacaacggtgtttgctaaccaatctggatattgtacctcccttatagatccaattttcagaagtttatccacttcgtcatttactgcttttgctctctccactccgagttttcttcgattctagaatcacttcgatcacaacatcatccactttctgcccgctaggaaatcttgggattactcctttctttgcgggtttcgttaattgctattggatttttaatcggtggctagctaaataacaagttctcgaagcttcttgatctgtctgaattgtttccactccgctcggagttgggaattagagacattggtgataggtagaaggaaccgctttcatttgatagatccacggagttccaaaaaatatgttataggctgctggtttatcgaacacgacaaaatccgcaatcttcgagatctttccagccaaaactggtggcttgatagttccgagagacattactgattcactcgtgaaagccactaagggtgatgggggtcctaccacgtcggctctgcttatccccattctttccaaagtgctaagaaaaattaagtctaccgaactgccagtatcaatgaggatccttgacacttcgaagttagcaacatccaacgtaactacgagtgcatcatcatgagatctttcgaggtgttgcgtctccttctcatcgaacaatatcgaagtgctttgaaaatctacttcctcacttaagcttaatttcaaatgaacgttacggctatgtttcttgattacactgatggaatcacggcagagtttagatcctccgagaattacgctgattttaccctttgaagttcttggtccctcttcgctcgccggccttggtcttttagagttttgattctctggattatcccttgattcatgatattgtttgatgaagttctccatgtcgaattttgagagatctccactggcctataattctgcgagatgcctcttaaggacgctgcagtctttggtcagatgtcccatgactcggtgtatatcgcagtacgagctttcatcacggatccaggtattcgaccttcctttcccctgaaactgctttccgacgttgttattgaatggtagcaaaccaaacttccttggtccctgattctcccgaggttcgaactttttgggcggaaaagtgaccgctggttttgcttgcttatctctttttgcgaaactttctttttcatcttcgacttccatccaattattcgctcgaaatagtgcgtcttgaatagtatcaagtttatgaagtatcagatcttccttaaacctcgaatcataccataatccctttcgcagagccgatagagccgattgttgtgagattctagagagctttgaaagcacgtatttgaatttggtaatgaaagcccgaagtgtctcattcggcccttgagatagattccagaggtcggtgtccgaaatgctcttatccatcagaattgagtattgttttaaaaatactaccgatagttcgttgaaattactgatcgatcctggttccaactgagtgaaccacatcagggcttgcccacacagattttcggagaaaagtttgcaataccttacgtcttcatcggcctcgtttaggtcaactcgcccagcggctatcagaaaggctgcgagataacctttcggatcttccaaaccattgtatgattctaagttgagttttcgagaatctctgattctcaaacttgtaatttgcggagtgaatggtgtttgcctagctttctcgataacccggttgatatccggttctgagcttgtagcttggaggaatttcgacctcatttctttcaactcccgacttacttccttcatggtttcgagttggtcgaagttttcctgctcgtgctggtcaccgaactggttatcatcttcaggatgcgtttctccatcttctggttgattctccgcgtttgtaccatccggggtcgtttggtctcttgttgcatttcgcggaagagaatttggggatccgaagatggttctccaaactctagaattccctacatttaaagaacggacacgagactgaatggtactaacattctggctgagtgatacctggtttgtttgcaatgtttcgacggttttttccacgcttgcaaacttttgcgtcatatcggtcatagcttgttgcatggccttgagggtttcggctatctaaacgttggtagcatcctctctagacattgcggatcacttcgggtatataatgcacagaaagaatctgatgactcaagaatcctccatccccacagacggcgccaaaatgtggatgtcggattcacactcaagtatttatttgtttagtgagaaggattattcttgaggtcaaatatactaaaaaataagtagatgattatagagaaaattatgagtattgtaaaagaaaatgtatagctaatttgcaccaaaatatgcgtgtgtccttacatgacctttgactctcaatatatatccaaagaatacatttaattcttatttaatcacaatcattctatcttaaacgtatccgtttctagtcttcaaattaattatccgaacgtttgaatttgaatccactccgggccttcttgacttcaccttttggcccatttggcctcttcaatccgagtagtcttgacctcgacgccgcattcacttcgcaggtcaacaccccatccatattttcacctcgagaacgcttatgggccttctctgttatgggcctcttttatccacgtagcaatctttgtccggatctgagcccgtggtgcgggatccgacaccaacagacggcgcctggtatgaaagggatttttcgtgtttaagtggtggagttaaagtgtttagggttaccgtatagtctcgaatgcaggatatgttgcaaaaccgcaagagagaacagatcggttgaggtccacaatttccaaccacttcttcttttaaacaccttcttctcctttacttctttcttactttcggttccccagacttagttttttccgagggggctctcttctgtaattggctcatcttccacttggccggctgagtttgcgttcgtccggaccggcaagcaaggtgttgcctaggccgcaaggtggggcaagtccggcgaaggtgtggcaaagtccggcggactacggccaatggtcggcgcggattggctggctccggccaatgtttgaaatggtcaggcagactttggtcaatggttggcacggtctggcggacttcagccaaaggttggcgcgcattggcgggctccagccaaggtttgttgcggccgggacaacttctcctggcggtgccagttactcgggcaagtagctgggccggttgtcacaaccttctcttcttttttgggttttctacttctatttttctattttttttatatgtttttttataaaaatctgaaacaaatacttaaaaggtcaaaagcaaaagcaaaataaaattctaagggaaaatgtagctatctagtgggttgcctcccacttagtgcgcttatttaacgtcgttggctcgacgtttgggtcttactaggtgtagtaacacgagtttcttcgccctaggcgagctctcttggatacagattcgtccggaggtttcttcaggttgtctctcttcttcttgaagattgatcttctcgtcctttcaaacgtttctcgcactcgttctttagagatgtagctttccatgaagagtcttttaattggaaatttctcccatgcttcgtcgaaagaggtgtcaagtcggatgactcttaccaagtttcgaaaggtgcatcgcataccattttcgtgagtggtgcagatcatctcttcgatctccaaagctt

SEQ ID NO: 224 - DNA, 92524 bp, Arabidopsis thaliana
aagcttagcaacctctcctaaacagagcaattaacaacacattgtcaaaaagataaagctaacaacaacaaccaatattggattaaagagattaaagctcaccaactctacgaatattctctgcacgatcctcagctttaaagctaagatcacggtttaagccatgcctaacattatcaccatcaagaatataacaaagcttccccttttgatacaacatctgattcaaagcacaagccaaagtactcttccctacaaatttataaatccatagaaacattagatagatttcacatagacacagaaaccaaacttgaagcttgtttcaacacaaacctgaaccactaagaccggtgacccaaatcacacatcctttctgatcaagcaatctctgtctatcaactttctcaacagaacattcatgccactttatatttgtcgagtttccgaccgtagacaaaggtccttgcttttgtcctaattagacaattaaaaccataaaaaattggcaaaaaaatcaaaggttctgggaaaaatcaggaagaacgatacatacccgtgtgaccgttaatggatttaacctcaggaatagatccatttttgttatgactcagagtttgagatccatccatagaaacacaagcacgaacaacaacaacagatcttgaattactcattgaattgctatcgaaaatcccttttggagaagccatcgaaagccctaatagcgatttagctccggcggcgatcatatctcacggtggtggaggaaataaaatataagaaaattggattcagacagaaccaaaagaagaagaaactaaatttgtgtctgaatgtttttaattaggcaatgaggaaaatgtgaccgttaaataaaattggaaaattggatttttttttttttgagagaggggcgattaggttggtgaacataaatggttgttggccacgtttttatgaacatcttattatttgtgggaattatcaaaaccggtaacattggttttagaaactaaatgtatttaatgttgatttgcatccacattcctaaaaatagaaagtgatatggtttgattggtttaaggctttaagcttgaacttgattggtttttcggtaacaaactccaaactcacattcctaaaaacataaaagtgtaagtattcgatagtctatatgcagttgtggaactaatcacgccataaattgcattatacaagtagtgattgcctaataaattgatatttttttggctcgagtttaatcattttagtacaaaaaaaaatatgggttcaaaagatgtaattccaaccgtttatagaaaaagaaaacagaaaaaaatatttgtgggaatttattaggcccaccaatgtcggagagctgtggtagagttttggtgtctggtctagattagaaaaatggttcaatagtcaatttgagttgtttttgacctgactcgtccgagtggtagagttttggtcttggcaccattttcatcagtccgagtcaaatcatctttctattaagctaaatgtacttaacctggatttgcatccagattcctaaaattagaagaaaatgaaagtggaacataatcaggagatgcactaactaaattcaagaatcaagagctaatagattgtacaataataatgttctccggaaagataagctttccaagctatccattaacacaagctttagagattcaaacttaaatgtagtttaaattttagtattaatattgattttttaaaggcgacaaaaacatagaaattatagttttatgcttataaataaatagtgactaagattacaacattaaagtactttaaaaaacatagcctattaataaaaaaactgtgatataagcgaaatgcgcgatctatgaaactagaatttataaatattaaaacaaaaatctttgtaaaaaatttaatcaatatatatttagttacatagtattgcataatttattatattaataccaaattattcaataaatattaactaaatatatatgcaatatatttatccaatatattgttttttgaaatttgtttttgcataatttattatattaatttaaacttgtaaagttaggaatataaaacgtataagtacattttcaaaagtcaaaaatataattcttactttaataactaaaaagaagatgacttacacaaagaatcggaccttcttttgtttagggataaatgaaatgagaatcacacttttccaagataaaaggaaacaattagtcgacaaaaaaaaaaaaaggaaacaattaacaacatgaactctaaaacaagtaactctctcttgtcttgttagccgaagctacttacatcagagttttcctattacagaagtcccatggacacaagtgagaaaaaaaagcacaaagtcactcgaacctcttttgtatgcaaatacactgtaatggtaaaaaaaaaaaaaagagttacaaagatacagaggcgagaaaacatcgtcgttaagggccacatcagttaaaagaacgtgtcaccttgggtccttcccggggaataaatagatggactgttttgctttctcaggcgcgttcatcattcacgtggttcgggatctcgggttggctgtccaatggcatgtactgtgccattatggctctgatctctgagtccatgtattgctgtaaaaccaggggcataggaatgttaaaacaattttccccaagtaacggatatggcaaatacaagattaatcttcgctattaacacaacagaaaacaaaagagcagaagagattaaaaaagcttacccttagcctatatttgtaaacgaggtatgcaccagcagctgcaagtcccaatgataacattataagccaaacggccgcccatgctgatctcacttgtgcacccgtcttgcctagatttcgacaaatagaaccaataacaattggaaaacaggtgggagaaacactatttgaataatcaaactttagacttccatattcaaaaaaaaatactcactgatgcaagtgtcatgatctctgatgtagagaaggtccccgctacaagagcactcatagcttccccatgtgttcttgcagctacactctgggcactggcatgctttcttctctttgcactcattaatgtctggtgcaggaagcacgaaaatccttataagatgattagaactagaacaaagtagtactgtaattcaagttttttcagagggtctaaccttcacacttcttagtaccatctcctttaaatcctggaggacactcgcacttaacactgtccttgtcctgaaggcattacaagttgagacagaagtatcttactaaactgtgagattatacacttaagcgcagaagacaccactaaccacacaagcagagaacgcatgtccatctcgctcttcatgccaacaacctccattgttgattgtgcatctccctggcccgcttgctgcaatgcaaacaccagttcagtatggaattttgacatcaaacgaaagcacagcaaagagacaacataaaattatcaatctctaatgggaaatgatggcatataagtgttcaaagttttagtgagcatgaaataacaattatatcttgaatttcaccaggaagatgtgcgctctcaaaaatctaagagggtaaaccgaaaattttctttacaatgtactgacaatgggttatatgagagctgctagaagaagatcagaatgtcggtctataagtatctaaactattatctttccatacttagattgctactgaataatacaagtctgataaatttataagagctaatcaaagatgacatgaacacttacgttcacagtgactgtaaccatcccctttgaattgcacaccatcaactgtaggacactcgcatactcttccacgaaaagtatcctgcggattaagcagatttaataaagatagcacagaatttattccaagcaatttcacattataccttgcaagcagttatgttggctgatttatcttgccaacaaccaccattgttatctaagcactcgtttgactccacatctgtaaattgtaaaagaagtttacaatacattccaaacatttatttgataagctaggataaggtggttcaggtatgagcacaggcagctgtgggcatcaatcgttaataccccaaatatatccaaatttagatttatgattcttgctcgggtatgggtcagctatttcaggttttggtgaggacccaaattttggatactcaaacccaaattttggatacttaacaacacaagttcacccgatacaccaaaacgtattccaatgtgtatacaggtaaagcttattcagacgagtttgagtgaattccgaaatgcccacaattaggcaagaccaacaatatatacctgtgctgaggcatatcgctggttcagtggtctcctcaaaaccagagcataaagccttgagtactgcactcttctccaactttcctgcaaggaaacatttatttaacaaaggtaaactacaagtattgaagtcttaagttaactatgtaagacaaacctcggtactgtctgttgttgacaaccaaggtaggcaatatggtaacatcaccccttgaacccttgccaacctacataatataatatgtcaatcacaaacgaacggattattcaaagattataactatgaaacgccggaggaaaatacagatgaaaatgactaatatttacttgagcatcttgttcttccttaagaactggattgtccaagtcagcatcagggtctcccatacacttgtcaagttttttactatcaattcctgtaaagacatagtaactatgcatcattctccccaaaattgtctttctttaatttgcatataacagacacactcaccaagagatttgataacggaatcagcacactccttattgtatttcttctccttcatgggacatctgatctggaaatcagtaacataatcccaccagacccaaggtttgccggtttcattcgccaccttgtaaacacaaagctgtctcaagttttccacgaccacatcttttccatcgtatcccgagctaaagtcctgctctggatcaggagcacagtaccttcctttattgatacactgagacttacactgtcgactcaacgtgaaagcatgaggacaataccaagtaatataatgaggtctaaactgcgtaaacccgcctttctcaagaatctgcgccgctcccttaaaatctttcacaaactccatcaacatatcacacttaaccccacattcatcattactattagtccacaactcatactcaacacggtcatcaggatgcggaacagcctctctccagtcaagattcaagttaaccatatctcctccactaatagctttcttcagcttttcaccaaaacctttagtaacaagagcagaaggtatagtaatattctcaatatactttgcagaagaaacatcttcttcaggtgtatccattgtaatcaaaggttcatcaacattatcagctacaagaacagcagaagcacctgctttctgtgcgttccataccttcaaagcgaagaaacaatctacacaacaacaacaacaacaacaacaacacttataaaccctaaggaatcgaatcgaatcgaatcaaatcgattgagtaagagattgaagtacctccacgatcaactaagaggaaagtaggtaaagcaccaggctgagacttgaacgaaatcgagaaatcgctaaattccttacacgatttctgattctctttcggataaaccaccgtaccagccatacttccaccgtattgaggaatcccgaagttaccaattgcactatcatgagttccttttatactctccggcgacgtcacggacaaactgttcttctccaccacgaatcgagcgtcgtttaaaggggaaaccagaagagtgaggagaagcagccatggaaggtaacacagaagctgcttcatcttcaagactccgccacaacaaagaacaaattcgaaggacaaggaaaatgatcaaagatgatatgatagaatttgaaatatattctcggaaggtaaaagacttgaagagtgttttccagagaaaataaatctggtttttcttgttgagcggtttgggtgtgactgggaagactatagatgacccattcaagtcaaacaaaatattttatataacgctatcaagccacgtgttgcacgggttaaatttaaaaccagtaaaaaaattttttaacaattagttgatatcagaaataaatacatgaggaattttaatattttggttacagattgaaaaagagcaaagagaagatatatttatcaatctatcgatttactttgttatttttaagtttttgttctaaaaatatattcttagttttttaaatacggaaatatatttaattctagagtatgtaatactttagaattatccacgaaatttgttttaatactgttctgaaataatgttttttaaaaaaggtgtaaattgatgtaatacacattcatggaatgcatgtgaggatcgaaatgaagatcttattgtgatgatatatacttttctttttgcctctttccatgtgacaaaacaattaatttaattattaataataaaatatgttattgaaaattttagcattagttaatttttctgtgaatttataattagaatgttgtcaaaggagattaaagattagaatatagatatctaattttaaaaaaaagtaaaaaaaaatatagtttcaaaacatgttgttttgaaacctacccaatgaaaattataaccaattgagaaaataagttttggcgaaagttttggattttagtaacaattgagcttgaatggagtatttttgttaaaagactttgaatagagttgttatcctaaaaattttaaaattgttaatgcataaaaaaagaagacaattatcccaaaagcaagttcataatcaactttgcatatcctaaacatagatacataaacatgcaatctcagagcaacaccaatggtaagagaccattaggggctcttcatatttttttaatcataattttgaaatttaaaagtttaagagatttttttggttctttaattttttgtttgtccaatggtaggtctttaagcgggtttcttaaaaaataaaatattattattaaattaaaaattacaaatattttatttcataaaatttaattattaatgtaaatacttaaatattaaacatacatgatataaatattgaaaaccaaaataacgattagtggttagcttgattcccgccaaatttgtgccataaatgctcaattaaattatttttcaattgttgatgcatagtccgagcacgaaccaggctccagacgccataatattaccgagatttgaagccatatctgtaaaatagttgaaatccacttgtgaagaagcggttgattccggttgtgtgaattcggatgcatcaaaataagtatactcatctcgttcatcctcaactatcatattgtaaagtattatacatgctcgcatgatcattcctaccttttctttatctcaaataagagttggatttgtgacaatggcaaaccgagcttgcaaaactccaaaagcacgctctacatctttacgacaaacttcttgatttgtagcaaataaagaatctttgtcaccttgaggaagtgaaatagattggataatgtaggtcatttaggataaataccatatgtgagctagtaagccaaatgatttagtcgtttccgttgatgacgtatttcacttttggagctcggccttatattatatcatcaaaaactagtgagagattaagtatattgatatcatttaaggtacctagaggtccaaaacatatgtgccatatccaaagattttgggaagcaacagcctgtagttcgattgttggttttccagatccacgtgtatattgttctttccaagcggtcgggcaattctttcactcccaatgcatacaatcgatgcttcctgtcatcccgagaaatccacggagctctccaatacgcagtagtcgtttaagatcttgtcgcgtaggtcttcttagatactctttcccgaacaaatatatgattgcttcaaccgaatgtatcatacaagacatcaaagtgttttcaccaatccggaggtatttgtcaaccgcatctgtcgcacaatacaaattgttgcttgtggtgtcttcttgtacaagtgatgtcggcaccactcaaatcttcaggatcctgcaactcaaaactcatttgataagaccaaccacaagttagagaacttaaagcatagaacacaactgaaacacttaaattatataacacacaaactcaaaactcatttcattcatgatcaaaactaaaacacttaaagtatataatacaacctatcataaagaccaaacttattagccgaaacacaaagcaataactaaagtccaaactattagccggaaaagaaagtaataactaaagtccaaactcatttgataaagtccaaactcattatccgaaacacaaagtaataactaaagtccaaactgatttcataaagagcaaactcataagcagaaacacaaagtaataactaaagtacaaactcatttcttaaagaccaaactcattagtcgtaataactaaagtccaaactcatttcataaaaccaaactcatttcattcaagaacacaactgaaataattaaatccacgtattgcaatagacgagtgtttatgtttcaattcatacacaaaccaaatcaaattcatatcaatctaaaaggcaaaaatcaaaagtaataacgactgattatgtgaacacaaaaccctaatttcgtttacatataaaagccctaattatcaatcataaaaccacaattcacgaaaccctaatttcaacaatttctattaaaccctaaataatgaagatctaaacactcaaatcaaatgaatcataccttcagaagagattggagatgagtatcaataaattctccgatttcgaaccttaaactctccgatttggatcaatgacgaatcgacacactatcgccgtcgattgagacggatcgacacactatcgccgttgatcgagacggatcgccacacaattgccgtcttgttctctttgagctaatgatcgagacagatcgatatcggagagatacaatcgccgtaaaaagtcgccgctgcagagagaaaccaaacacgtgaatgcccaaaaaaaactaaacacttgtaaaagattacgtttatcgaaaaacttcatggaccaataatatttagccacgtatgggtccatgaagtatcccttcgatagggaacggcccagatctatttttgcattttctatttaattttgggttttctggaagaacctactatattaagaactctataagaccatccttattgcaagtctcttactataaatcttaggcataatataatcaaaagagtatgtgaatagttaagaagagtttcttagctaaaagataaaagaaagtttaagagcatcattatggttgtctctttgattagttcttaggataagaacatctcattttaactcttatataagagacaaatgacaaaatgtctcttatataagagtcaaaatgagatgttcttagtaattaatgatcaaaaaaaattctaagaactaacctaagaaactaccattaatgaagctctaagagcttcaaaccattacaaaagttcttagttacaattttttcaataaaacaattcattaagattcaaaattaagagcctatcattaaggttactctaagggacttccattgaacgtgctctaagacttattaattctaagtctagtcatgtttgagttttgtctataaagtctatatagatgtgagaagtgtcttttagtaagataatcataagaataatttcaattacaaacttcaattcaagataccataaaaagaaaattaaataaaacatagcacgatttactaaatctaacactcctcagttttctatttatttgatattttaggaggaaaactttattctaaatcaaaatatatggacaaattaaatgaatttacactaattacttcaaataaaaaaagatttgacatgtgaaaaattcccaaatctaaatgctaagaaaagcttgacaagtaacataacttataacccatttaattaatatatacaatgcatataatatatttttttaataaaagactttaatttatatttattctcaatatataaaagtaaaaatccataaaacaaattactcttaattttttttctattataatagagatttagaaaatagttataaacacacaattacattatacagtatactttatgtatttgttgtcacaaatcctttttatatatttatttatttgtttttacattgtctcaatagaattttataatgagtttcgtcgtcgatatctgtttgactttgaataagcgtcgtctatagtcttccactccaatctaagacgttaaacaaaccatctctcgattctctcgggaaaacactccaactacgaatctacaatcatcgagcacatacaaagaggaagatttcaaatccaatcatcaatcatctcttttgaatgatccgattccatctacttgctccttaaatttattgttgatccgtttgaatttggtgtttgttgaggcggagatctcgaagatgaagcagcttctatgttatcttccatggcttcttcttctctctcttgtggtttccccttttaacgaggctcgattcgttgtggagaagaatagtttgtcggtgacttcgccggagagtataaaaggaactcatgatagtgcaattggtaacttcgggattcctcagtacggtggaagtatggctggtacggtggtttatcctaaagagaatcagaaatcgtgtaaggaatttagcgatttctcgatttcgttcaagtctcagcctggtgctttacctactttcctcttagttgatcgtggaggtactttcatcttttcttcaatcgatttcgttagattcgattccttagggtttttatacttgtggttgttattgtgtagattgtttcttcgctttgaaggtatggaacgcacagaaagcaggtgcttctgctgttcttgtagctgataatgttgatgagcctttgattacaatggatacacctgaagaagatgtttcttctgcaaagtatatcgagaatattactataccttctgctcttgttactaaaggttttggtgaaaagctgaagaaagctattagtggaggtgatatggttaacttgaatcttgactggagagaggctgttccacatcctgatgaccgtgttgagtatgagttgtggactaatagtaatgatgaatgtggggttaagtgtgatatgttgatggagtttgtgaaggattttaagggagcggcgcagattcttgagaaaggcggttttacgcagtttaggcctcattatattacttggtattgtcctcatgctttcacgttgagtcgacagtgtaagtctcagtgtatcaataaaggaaggtactgtgctcctgatccagagcaggactttagctcgggatacgatggaaaagacgtggttgtggaaaatttgagacagctttgtgtttacaaggtggcgaatgaaaccggcaaaccttgggtctggtgggattatgttactgatttccagatcagatgtccaatgaaggagaaaaaatacaacaaagattgtgctgagtctgtaatcaaatctcttggtgagtgtttcttcttacaggtctcgatagttgaaagaaaagcaatttttgggagaatgaggtcatattttctatgtatgtccctacaggaatcgatagcagaaaaattgacaagtgtatgggagaccctgatgctgacttggacaatccagttttaaaggaagaacaagatgctcaagtaaattactgttcccacatctgaatttgactcttctgtacgtaacctgttttgggtttgacatattatattatgtaggttggcaagggtacaaggggtgatgttaccatattgcctaccttagttgtcaacaacagacagtaccgaggtttgttccgcagtgttcaacttgagacttcaatatatgtagtttagcttattttataatcgttccattgcaggcaagttggagaagagtgcagtactcaaggctctatgctctggttttgaggagtcaactgaaccagctatatgcctcagcacaggtatgttttacatacccttacccagacccagtggtcggtcatcaaattaatggctggactgtagactatacactagtattacacttaaaacaattattgtgaaagttttgaatttgcaagtttctcttgcatttgacagatatggagacaaacgagtgcttagataacaatggcggttgttggcaagataaatcagccaacataactgcttgcaaggtacttttgatattcctgggaagaatttctattatatctattatctattaatctgattaatttgcaggatacgtttcgtggaaaagtatgcgtgtgtcctatagttgatggtgtgcgattcaaaggagatggttacagccactgtgagcgtaagtgctcgggtcatcttttgaataatttttatgattatgtcgacttatgttatacagtagcaattaagaatggcaaaatattagtcaagtttcttacaaagtaatatgttgtggtcttacagtatggcaagatacaatataatttattgtcagtgaatcgtaaacggatgttttgtttcacatgtctctggtgaaattcaaaatacgatcttcgtgctgatcacaagaactttcatagcaaaatatactcttagatgacttcgatactgtgttctttgccgttgttgttgttgttgtgcttcgctcgttcacattttcatacgtatatggtggttgcattgcagcaagcgggccagggagatgtacaatcaacaatggaggttgttggcatgaagagagagatggacatgcgttctctgcttgtgtggttagtggtttctcctgcgccttgcttcacttttaagcgtataatctcacagtttagtaagatacttctgtctgaacttgtaatgccttcaggacaaggacagtgtgaaatgcgagtgtcctccaggatttaaaggagacggtgttaagaaatgtgaaggttagacctctgtcaaaactttggttaccctattttttttgtcttacttcataaacatcttcttaaggatttttcatacttccttcactagacatcaatgagtgcaaagagaagaaagcatgtcagtgcccggaatgtagctgtaagaacacctggggaagctatgagtgctcttgtagcggggaccttctctacatgagagaccatgacacttgcatcagtgagttttcatcatcttaagatttctagatttctataaatatgcatgtacgagtatgtcacacacgaaaagagtactcgcgcatacaaatagcctctgaatttagaaaagttctctctctctttatcaactgaaattggttcttttgtctggaatttaggcaagacgggttcacaagtgaaatcagcgtgggcggccgtttggcttataatgttatcattgggacttgcagctgctggtgcatacctcgtttacaaatatagattgagggtaagctttttattcatccttctgctatttctgttagaagcaaaagattaatgttttatgttttggttgcctgagatgtctcttaaaacattgttttatgtaacccgatatcgtcttggaattgtatcgattacttgggaaaattgttatgaacttgctatgttcatggatttacagcaatacatggactcagagatcagagccataatggcacagtacatgccactggacagccaacctgaggtcccgaaccacacgaatgatgaacgtgcctaagagaacgaaatggtccatctatttattcccccggaaaggaatcaatgcgaagcgttcttttaattgatgtggcccttgataccggtgttctttttcgcatctgtatctctgtaactctttgtaccaaacagtgtatcctatgttcttgtcaattgtgtccatgtgacttctgtaatagggaaacttcgatgtagctacggagaactggacaagctagtcaatagaatcaaaacatcaaagtgttaaagttaaatcttttagtcttggacaagttagacgactctctctttgtagtttacacataatgtcttaagatttatggtaaattaagacaacatcagatcgatatttgtatttatcaaaccctggagttgggttaaacctcaaacacacatttaggttccgcatagttttgcttagatgtttcatgatagtcaaaattattaaaaattaatagtcgataaggtaatacacatgttttgtaactcttttcctttgttgttggtccaatggcacagtatctttgtaactcagttaacaaacggtggggatgcaaatagagattttaaagttgcttagtttcgtattacttgcagatcaaatagagatttcttaaccaaattcttcaaatgagtattacttgcagatcaaagttaaggaaccgagagtcaaagttaagattcaatctagtttgattaaaataaaaaaaaatctgtaagaatttattgtaagggaaaaatagtaaaatctctagtttaagcaaagaaaatggtagtgaatagaaacaccaaaattcaaatcgagttcagctttctctataacataccaaacaagaagcaaaaatgtaataaaactaaacttgtaattctgcttgttcttctcttcggcatggagcaggaaccggtaccaaactgggaacaaaggtacagtgcaaaggccaaggatcaaccacacactctatacgagttttactgatcaacttactatcccccagtatatagatccaagcgtgaccagtgttgtcacgagagcacaccacaagccttttaccttcgatgaagtaacttggattagagaattttaccgtctctactaaatcaggcaagttaggacttgaaaaagtcatgaaattcttccaaaccacgtcatcaccattctcatggttaatcttgttctcggtcacaaaaacctcaatcttctttgtcaccatgcattgctttagcaacgaaaaccgatctcctctaaagacaccaaggacaagagcatccccatcatggtttctcccaaaaggtaggttacaaaatctcacccatatgctgttcgagaaaccgaatttatgaatgtggtagcacaagggatcagtcttttcacgaaaacaaacccaatacaaatttccattcaagcatacagcagtttgaacattaatcacgtttgtgttactattagtagattttgacttgtggtctatccacacatcggaggaaaagtcatagattttccacaagccagaaaaagcaaccatcttgtacttcttattgtcgtatacaatgccgtcgaataccataggagaatggtttaaactcggctggatccatctactctgtcccaaccaagggttccaaacaaccgcaccattgttcttaacacataccaacaactcattgcaatcaaccaagttattaagttccaaagattctaaacctggaatacctaagggtaactcacgtaccactatcacgggatcgatgcttaccgaataaatcttggatttggttgctaagataaaacgaaacgtcatcttgtggttgttgatgaacgtcttgtcgtcgaaaagagcgttccattgtttcgatacggttctgaagcgaacgagagatttaggtgggacacgagagagtatctcttcaatcaactcccatggaaggtttttcagatgcgccatctctttacctttttttctcaggtgcgctatctgtttctcctgaattagggttttgcttagtttcttctctcatatattaaaaggagtaaaaaccaacatttaatttgttaagtagtattatatcatatgtcagtggatataatgaacaaacaaaaataaattcatctacgcaaaaatgtctaggtgatcattagacacgtactatccctattgtacaagacgtcctctatttccaatttcattaatttttacacgtacgttatcaatattttgaataatactaaggaaaaccaagaattatattattatttttgttttctataccatttcgattttttttcaagataaatctcctaattaagatattcaaatagtttttgttttcttttataataattaaaaatgaaaaataataaaatatgaaaacaatagatttgagagataagcatcaaaactctcttttaatgtatagatgatattttgttgcatagattataagttctaaatccagttacttggaattctattagttaggcatgactatgattacggttattacggttacggtttattaaccaccggttacggtttattaaccacaggttacggttataattttctttaatcgtaatcttaaccgttatatatgcagttaaaacagttacggttaaatacatttacagttatttgataactataatagagttaatatataagttaaaacattatattttcttaacctttataataaaataaataaattatgatattatagataatatttattttacatgattatgtgttttaaatatttatattaaatcagctatttgtttttttcaaataaaccaacgaataattaaattaatgatcattattataataattgagttatccaaacaaaaaaaataataaagaaataatgttgtgagcattaagaaacaactatcttattatataaaatatggttttcaaagttactaattcataggattatgccacgtgtcaaatctatcgatcagatgttgacatgtgtaagaaaataattaacttttttcttcttaaagaaatagaaacacttaaaaagaaatcaattaacttttttcttcttaaagaaatagaaaactaaaaaataaatcattattaacatatactaattcatatgtctatatctaaaaaatattacattttatttttcttaaccaaaaggaaaattaacaaaaaaaaaaaaattatatatgttattggtcaaatttttaatatatatggtattaacaaatgttttattattatgaattatgttttgttaattgttaataatttttaatattaactaagatatagatttgatctcatatatatatactattttgacatgaaatcattatcaagtaagatgaagtgtgtagaattaaaatcgagttttttatgaaatagatagttaaattgtattacaaaattgaatgtataagataaaaatttattttttcttctaaatactaaattataataaagaaaaagtgtgtaggttactatttatacttcaaatatcatcaataagattgaatgggtataacaaaataaaatgcataagactactattttactattcaaaattatatatcaagaacaatgtatcgattattattttactattcaaaatttaaatattatcaataaaaattacatttccatcttacacccgcctatttaggcgggccttatctagtaagagtataaataataattatataaactacttattgatttagtttatggaaagagagtagcagaatgaataaatctaatagtgggcacattaaacgatttaatgtattatttttaaagaaataattatgtaattagaaaagtcaagtaaccaaaaaaattatattattttatccaaaaattcgatattttgttttgaattatacacagttacgatttttttaaaaggttttaactataattttaatatgacaaaaaaactacacggtaaaaccaacaattttgatacgattacggttaattaacggttagggtagtaactaatctattttcacggttaacggttactaatcgtttaatacggttacggtccaaaatacggttaccgatagtttttggtcatacctactattagtcatgtttaataaagcaggactttccttaagtattgtattatcattttccgtcgattttatccgttaaagaacttgtacaacttttcatacattttttttgtgtgttacagttgtgtcagaatttaggtttagatactagaaattttgtgttattgtgttattcatctttgtggctacatatatatatatatatatatatatatatatatatatatatatatatataggatttagggtacattaatcctaatctcataaagctaaacctagtttaagcccatcacaatattatatggcccatggcccatctctttcctattatcccccccccctcccgccccctcaagttggagtgtatctatcaacaacacccaacttgccagaaaaaaaaaaaaaaaagaatttgaagcgccttctgctttgatcctcaacaacgagttgagcgcttttcgcaactctttgatcttcacaacatcctgagcgccttcagcagctccaagattgacctcgtctaccatattttgttttgaattatacacagttatgattttttttttaaagattttaattaactataattttactatgacaaaaaaactacgcggttaaaccaataattttgattcgattacggttaattaacggttagggtagtaactaatctattttcacggttaacggttactaatcgtttaatacggttacggtccaaaatacagttaccaatagtttttggtcatacctactattagtcatgtttaataaagcaggactttccttacgtattgtattatcattttccgtcgattttatgcgttaaagaacttgtacaacttttcatacattttttttgtgtgttacagttgtgtcagaatttaggtttagatactggaaattttgtgttattgtattattcatctttgtggctacacacatatatatatatatatatataggatttagggtacattaatcctaatctcataaagctaaacctagtttaagcccatcacaatattatatggcccatggcacatctctttcctatcatccccccccccttcctcaagttggagtgtatctatcaagaacacccaacttgccagaaaacaaaaaaaaatcagaacttgaagcgccttctgctttgatcctcaacaacgacttgagcgcttttcgcaactctttgatcttcacaacatcctgagcgccttcagcagctccaagattgacctcgtctaccatattacctccccccacccccaccctcaagttggagtgtgtctatcaagaacacccaacttgcggaggaaaacaaaaaattatgtgaaacttgagcgctttccgcagctctttgatcttcacacacgtctaagcgcattccgcagctttgatgaattcaacaatggtctgagtgccttcagtagctccttgacctaaacaatggcctgagcgcattctgcagctctgatgaccttaacaacctcttgagcgcattccacagctctgataaaacaatggcctgagcgcgttcagcggctctgtgacctcaacaatggtctgagcgccttcagcagctctgtgacctaaacaatggtcaaagcaccttcagcagctccgtaacctaaacaatgacttgagcgcattccgcagctctgataacttgaacaacggtctgagcgcatttcgctgctctgatgaccgtaccatattaccctccctcaagttggagtgtgtatatcaaaaacacccaacttgctgagggaaacaaactaacctcatatgacaacccatatgatgtcttctttgaagcgcattccactgcttcgtcgatgactaaccacgcaatagtcgaaatgttgaccacacgaccgatggcctcccacgactactgcaacaacgtgcctcgttagctacttgtttcgatagcacgccacaaactcctgatacaaaatacagactcttgttgaaatcaacgcctttcttcaacatcgacttgctgtttcagagtcgaaactttctaacaccaaaaaaccggacaactcacgacgagttgtggaaacaccagaaatagagtcctctcaggtactctcaaacgaaccaaacggagaagcaatctggttgcgaagccccaaccaaccacgaactcgaacatctgagcgcaacaaccagttgagctcgacaacgaccggctgtcttcccaaacagctcttaaaaccaaacaaagcaacagatctgaagaaaccaccaacaacaacccgaatctgagacccgacacaagacaaaaacgaactgactcatactaaaccaaaaaaccctaaaacacctagatcaaccgccgtaaagcagatctaaacaccactcttccaaaaaaaataaaaataataataataatcaaaaccctaatcttaacaacactctttctctcaccaaaggaaatcttacaaacttgaaacaaagactcgaaaaaaaaaaacaaatcttaaacatcaaaagggaaacccgaaataaactcccaaagattaacaagaacaaaacccaacaacaaaccctaacgactaacaaaacttaaaaactaaaaacaatttttttttttttcatattagtggaatcaaaacaaaaaccttaaaacttgtaaacctaaaaaacctaaagctctgataccatgtcagaatttaagtttagatactgaaaattctgtgttattgtgttatttatctttgtggctacatatatatatatataggatttagggtacattaatcttaatctcacaaagctaaatctactttaagcccatcacaatattatatggctcgtggcccatctctttcctattaagttgctttctccttgtctaattttgcatgttatgagatattttaatatcgtatccttcattattcaagccaaccatggagattgttggcatgaagagagagatgttctctgcttgtgtgtggttagtgttcttctgtactatgactcactgtcaagcacgtgtaattagataccacgtgaataatgaacgtgcctgagagagatttatggcccctcgatgccggcgtttttgttcgcctctgtatctttgaaactcttttaccaaacagtgtatttacaaaaagagatttaaaaaaataacggagggaaattaaaatctctagtttaaagtttaaacaaagaagatggtagtgaataaaacaccaaaattcaaataaactttagctttcttaacgtaccaaacaagaagcaaacatgtaataaaactaaacttgtaattctgccagttcttctcttcggcatcgattaggaaatacattctttaaagccaaaatgtctaagtaattagacctactactgtagttctatgactatccctatcaacacgtcctcaatacattattatatagaacttagtttttcaaaattactaactaacgtgatcgatatgtgtcaagtttatcgactagatttgacataggtaaaaaataaattatacaaacaaaaatattatatatgaaattaaaaatcgtaaatgaattaaaattattataatattgataaaagcatataaaatatatagtaagataataaaactaattaaaattgttacaataaatgtattacgaatgtttaatcaaaaatgtttgatataactaattaaaaatacaaactagtttattaaaaatacaaactagtgtattaaggcaaaacaatggatgttaaaaaaaaatcttttctctaactaaaatctgtatttactacctaaagatatcttcttaatttttttttataaattaaatcttgttttaaataataccaaattaaaaccatgtattacttagcttttttcttaattatttattttgttttaagatacagttctttatttacagaaagaaatttcttaaataagttattatatatatatacacatattcttatataagaattatataatagaaacaaaaagttcaaatatatatatatatttccttattgtcaaattgtggaatggcaaatcaaaagtttctagatacatctttttgatgtttccattcgattacatatgcatatatcctttttcaagatacccaaaatgtatttctatataatttgtaatatatatatatatttatcttacaaattttataatatctagagataacaaaaaaagttgtagtacttgagtgaaaatatgtcaccagagaaatataaggttgcgattgttgttgatccttcgacgaaagacatttcaattggagaagaaacgaaaaaagagagaccttcttcgtcagccatgtcctttacgggagtcttcgccgccatctcttacatggcatctgctggtatatatcttaatcttattttattttttattcttctagtaattcttgaaatcttttatttcacatacttatatttattgtatatataatgagtccaaaatccaattacttgcagttttattagtaatgttcaataaagcagcactttcttcgtacagatttccaagtgcaaatgtcattactctacttcaggtaattaacttacttttgttgctcaattttgtacatctataacaactaacaatgagtttgatttactaatcacaaaagtgttatcaaaacgttataatcagcattttaaatttgcagtgttttctattactgttttagctattatgttataatttatcttgttttacccgctaaaaaacttgtaccgcttccttttcatactatttcctttgtgttgcagatgctttctgcttgtttaattttatatgtgatgagatattttaagatcatatccttcaataatgataaatcaaagagcgagcacaacaaaaatttgtttactcttgtttcgacaaaaagattgtttcagacgatccctctagcattcacatatctattttatatggtaagcattgatttttttttttttttgatgtaccttcttgtttttcaattaatctcatagataacattttttcctgctttttcttaatataactacagctagtaacaatggagtccgtacgtaatatcaatgttccaatgtacacaacgctacgacgaactactatattgtttacgatgattatggaatatttcatttctggtcaaaagcattctgttttaatcatcttcaggtattatagacttttccaataatattagaattgctattatgtttgatatgctggtaaatcaacttaacaattcatttattatttataataaacttcataaagcccgcctaaataagcagggtaacatataaatgtaaatttttatcgataatatttgaattttatccattttctctcaatatttagtttagtaattttttttaacaaattaataatatataatagtaacgggattaattatagctatactatctataattgtaaaagtatataatcgattacaatttctagtaatattaatatttaactaaagattatgtatttgactttacacattatttcaacgaaaaaaacttattattttagctcgttactctagaaccataattttattttgtaaatcaggcgactaaccaaagatgtactttaattgtgtaaggaagctgacaagcacgacacattttaattgaaaaagtttgatctagaaatagatttttttaagctttgtatgtctataaagttaacacattttaacttttataacgatcctactaattttagatacgtataattctagttacatatattgtttatacaagtatttttttcagcgtgggaataattatattaggtgctataatcgctggaataagagacttatcgtttgatagttatgggtatggacttgtattcacagcaaatatatgtaccgcaacttaccttgctttgatttcacgtattggtaatatttctcacatcttagtctagtcatgaagttctactttaattgcattcttcattaatttttgttttttcatattcttagggaaatctagtggcctcaacatctttggactaatgtggtgtaacggtgaaaaaatcatttacagaattattagagaaaaatcttgtaatatgtttaaactgatctcatctctcacataacaggaataatttgcatcccatttttgttgttatggacatctttaaaaggtgaactagaagccatgttatcatttccacatctctactctattggctttcaggtaacatttactactttgtttgttaaccttttaataggatcattatacaattcgcatcgaatatcttcaactcttatacaaatctaatctaactaattgtcaatcaacattctgatgtacattagttcacttggaagatttagttagaattataatatctaggattatatgggagttgtatatgttttattataatgtctgagctacattgaggaaattttataagtcgaataagataatccagtacttgacttagaaagggatttaagttgtcttgaagaaatgaaagaaaggagtttcatggctcccccagaattttgttctttcaaggtaacacaacaatgagattcatcgatatgcaaaactataccgatatagaattcgatgaaggggccatcacaacatcacattctagaaattgtacttgcaaatcatcaatgatttatatgtacaactacaaggtataaaaatagggtaggataggtgttaaagttacaagttataaaacatttcatggacgtttaaacatagtatctataaactaaataaaatttcttgcaatacacacaacttaaaatgatgaataattgatgtgaaatatatatgcaggtggtgatatgtctttcatgtatgttggctttcatgataaattactctgtgttcctcaacacaacccttaattcagcactaacacattcaatatgtggtaatctgaaggtacatctaagcttgtactgtttatgttttctcggtacaaccttggatatttggttcaattacataaacgacacttatctctgtatgaatatagtgttattgcacaatactcaaatcgcaatgtcatattattgataaccgtaaatgatatgcatggcaggatctatttaccattgcactaggttggcttatatttgctggacttccctttgattgggtgagtatataataaactattctcgacaatttttctttcttattgagtcttcacatgatacatattttacatggatgtaatgcaggtaaacgtaatgggccaagcgctaggttttactggatctatgttttatgcatatttcaaatataaaggcatgtgaaagttaacattataaatcaatatttttatatttttaccaattttcaaacacttgtaagaaactttaaacaagttagcttacaagatacagttccaacaagtttattgtgctgtcaatatttataataaggtttttaatttttgttcatttttaagtttgagttctttcattttaaaagactttaatttaatcattgaggtttttcatgtttctttcttacattgggcatgaaagagcaaaattatccatctatttattccccgagaagaactcaagacgtgcgtatataaatacttgtgtgtatattggtgattctagaaatggtgattccagaaatggatggcaaaaagacgtgtgagaagaatatgagagcttagttgccctaattttttttaatctgtttttaatttaattcacaatatgtttctaatcttctttgcaaagccataactctctcactcactctctcacaatatgaaccatattttatatttcgacctagcataattaattaaagcgcttgagtttattttaaaataataggctataggcccatgtttctttcacttatatagtccaaagaagcattatcttaagagtaaaaatagtttaactaaatgcgtcataagttaattctctcatatttgacagatttttaaatcatatatatgaaagttggccaactctcttcatatgattgacacatcatcactttagcatttgccatgtatctatagaataattaatataagctttttaacttctaatttataggttaatgatatatttattatttaatttgacatattattttattttacatatttaattgtactattactaaatttattttaatattacatgattttttcaataaaactattttaatagttttctcatacccgaatatttttttttgtaatccaaactcaaagtattagtgtataatagtcgtgaattacttaatgatttgagtaaattattttcttaaatttctatttatattctcttaaatttttatttttattcttttaaattgatattcatataataaatcactgatagtgaagaatacgtaaggagctttatcatcaaattcttaagtttctagaatccaacactaccctctattaaattggtttaagacagatattgtttataaattatgtgtatgatgcattgttgagaatgttgttagaaaaaaatatttttaattctaaaagtaattatttattgtatgagtgaataatttgataaataaaaattatatttaaatgaaataatacaaaaaaatccgaaaaatcgtggatagcacatcattccctgagtgacaatatatattacaatagtcgatgcaaatacatattatcctatcaatgtttcttatcaccgccgccacaacctgtacaaaatttcgagctctttcacataagcatatcaattctgcagtaaggaattaaacgttggaaaatatattttaaagtatctgaattccaactgaaacctaacttatataatttaatttcttacgtacatagatggcatgatttgttcaacaatttatatgttataagcttaattaaagcctttagagccacaattcaacccataagcatcacatcaaagttaacgtaagaatattctagataagacaataactcaatctcagaccatatcatagacacatcatctcagaccaatatcatctcaagttcagataattaattacaacagttttaagaaaagagccgctccagcatgaaaatcgtaccaggaaacttcaccaaacttctttttaggagaaggaagaggtagttgagatctggctaatagaaggctacatcctgcttttagcatgcattgggaaaagcgcctgggatagatatttcaaaattttacctaacagataaggactaaaccttaaaatcgaattacatagaaattggtcaaaatcacatagaaatgagagtagacggaaatgagagtaacaaagaaagacatgcctttgatttaagtctaatggtgattgcgttggagaatatgtcagggggagaagaacaaaattatggttgacgacaaggttagtggttttcgctaactacaatctgacggtggtgagtttacaaggtggctgggactagattcaatttgtgtgtgtgagatgtttgggtatgaaatgtttaggtttgagatgtttttcgagaaaatggggagaaaagtaaacaaatggtgcttaagtggattactttggctaagtgttgggagagtaagttattttagattcatccttagagattttctatcttaccgttggttaaacgttattatatattagtaaaattacaaattcatctttaataacagttcggaaaaataagatattattttgtgatatcaatgtggaccttttctgtagtgcttatgatcctaacacatgtaatgtcatacgtaatgtcataaagtaatacacattttttgtcccaacttaaactactttcaaataaagcaaatttcaataatataactaatatattttcaaaaaagaattttacataaacatatgtttttattatcataaattactaattataaacatttactaaaataccgctaaaatataagtaagaaaaattacagaaagtagattaattttgttgcaacatatatatgatataatgattcgtgaatgtttcttattttttttatctagctttatattttcccagtactgttaaaaaaggtgactcaccagttcagacacataaaattattgggttgactttaaacattaagtttgttatttttctttttcttgaaaaaagaacattgaatttgttattgtaatggattttggatgctttcatttacattaatcaaaatagaccgtacaaaaatgtcttaattaattgtatttttgaacattttgattttattcacatgaaccatgcacacacatatatttttgggtcataactaatttaatgtgttttctcgtgagatgtatttgcagtttcgattaaaagtatattttcccccctttactaaggtattatttcttcattagttcattgattatatgtaaaatacagttttagaaaaaaagaaaaaaaaaataacactttgagacacgaaagtttctctaatgtatattaaaaacaattatatatatgaagttatcactacatgcattataaaaaaaccttaccttggtgttctaaaaatagcttatataattatattaatgttatagtattaataatagaactttaaaacattgctatacagtatatacaatataaagataagaaaatttgaaaattatacttattccactggcattattaaaataagaaatatgtatatacgtaccttttgtgtgctatataatagttacttatttcatgataatggattaatcccacaagaagggtcgtcatacatatctcattgaggatttttgagttctcaattgtcacaagaaaagatgaaaagattcaactatggctttttccacttggtgcttttcctcatctctcttcttcttcttggttcaggaatttgcatggatcctttctcctacgaccagtctctaaaatcagaggtataacaaaaagaacaaatctataaatacatttcacttacaaatattaatggaatgcaatgttttgaatctatgtaatgtcatgagaaagtgcctcatggagcctccacaaacaactgccaataccggaggtgaaggagtcaaagaattgaagatcaacgaaaatggtggaatcagaaatgtagtagagggagttgatcttcgggaaggaaacatatacatcacttctggtaagaaaatgttggttttgttgttgcttgtgtagtaagttatgatgtttttgaattgtgtgtgaatcagcttgggtgaagttgagaaatgagagtcagagaaaagtaggaatgacttttagtgagaagaatgggagaaacgttttcggaggtgaagttatggcgaaaagaggatgctggtctttgcttaaaggcggtattaccgctgatttctctggccctatcgacattttcttcgaggtaaaggaactaattgtgtgttcttttgtggagatttcaagtactaatgtaggaatttacacgaagcagagcgatggcttagcgggtttggagatatcagtacaaaatgtgaggatgcaacggttccacaaaactcaatggaggctacaacaagaccaagttattgaaaaggtattatacatacattatgaaaacgttttataagcgtttaaaacaatctatgactttgagaaaaactcgcagattcggaagaataaagtgagatttcaaatgagttttaagaacaaaagtgcattagaaggatcagtgatttccatagaacagatcaaaccatcattcctccttggttgtgctatgaactaccgtattttggaaagcgatagctatagagaatggtttgtgtcgcggtttagactcacttcattcaccaatgaaatgaaatggtatgcaactgaggcagtgagaggtcaagagaactacaaaatagctgattcaatgatgcagctcgcggaggaaaatgcgattctagttaaaggacatacggtcttgtgggacgataagtattggcagccgaattgggtaaagacgatcacggatcctgaagatttaaagaatgtgacactcaacagaatgaactcggttatgaagagatataaagggagactaataggatgggatgtgatgaatgagaatgtacatttcaactactttgagaacatgcttggtggaaacgcttcagctattgtctactctttggcctctaagttggatcctgatataccgttgttcctaaacgaattcaacacggtagagtatgataaagacagagttgtgagccctgttaacgtggtaaagaagatgcaagagattgtttcattccctggaaacaataatattaaaggagggattggagcacaaggtcactttgctccagttcagcccaacttggcttacatgagatacgcattagatacattaggctctttgagttttccggtttggcttacggaggttgatatgttcaagtgcccggatcaggtgattatacaatgcacgtttgagttagtttgaaactttgagctaacgtaacataacaagcaagccatggttcaatttatttgataggtaaaatacatggaggatattctgagggaagcttactcacatcctgcggttaaagccataatcctatatggagggcctgaagtgtccggtttcgacaagttaacgcttgccgataaagatttcaaaaacacacaagcaggggatctcattgacaaattactccaagagtggaaacaagaacctgtagagattcctatccaacaccatgaacataatgatgaagaaggaggtcgaataatcgggttttctccggagatttccttactgcatggacattaccgagtgactgtaactaatccatcgatgaagaacttgtccacccgcttcagcgtggaggtaactaaggagtcaggtcatcttcaagaagttcaacttgtaattgatgcttgaaaactgcactatattatgtatcacatattgtgaatcatcccatgagaggttatacaagagattttgaaatcaaattctcaataaattatattcacagagccacagaccaacttaaaatgccggtaacaaactgaagaatgaatttcaatggtgttgttctttcattatctcggctgctagaataacaagctccaccatctcaaatcctgcagcagaaacagaatcggtcctttcacagctcgactcgccatcagtaactgattcaatgtctgattccgccgaccagctaattggtatggagatcccaagggcagtcttcaaatgggttgcctccacaaggatgttggcaatcgctacttcgcaacttcttgcagttgtttcagtatcatttaattcctttacctgaaaaaaaagaaacaactgaaatttggcctaacaggaaggaaccaaaaagtgatccatatcacgctagtgttcttaaattaccttcaagagcgctagacggagcctgcggattgaagtcgtcaagtgccccatgctttccaggttctcttttatagctgcatattctactttcattctgccaaaacaatagtgatttatcgcagaagcttccaagtacgataagacaatgtagatgtaggatgccaaacctggaatattcgatgttactggcataatctgcttcagtgttcaagtgacttccgcctcttgaacttgggtcaatccaacggtttatgtaagatttcttccacatattctttagtcttccatctttctcattggagataactatcctgccactgtttcccgttgattcttcctctcttgtaccactcattttgctggcaaatgatatagtatttttagaggaatgtaacagttacctctacataagaatcaaaaatatttacaacacagtatcatccctgagaaatgtcactagcatcgcaggtacaaggaaacaacattacaaagcaaatccctgacttcaaaacagaagatagagcgaaattggttttaaaagacggcttacaccatttacagaacgtgccatgcctaacttttaatatcaacaacatttcaggttgtctacattgttagcgactatgcaatcaattgcacatattactatgtatttcaagtagacgtaacagaatgatagagagagcagcacacgtattcagaatataccatgtgggtaagcatgtaatgtaagcaccagaaacggaacttcatgcaaaataaaactaggacaaatctgattaaaagaagttatgaggaaaggatggtatcatactctcttagcgactgatattcctgtcgtagttgggctaactccataagggttctcaccttttcattggtcacctaaaagaatatttcaagattattcagaactggccataggagttaaatagattatttttttctatctcaacatctggaaacaacttaatgtagaaaaaggaaacctgcaagatattcctttgaagctcatctactttctgctgaagagctgcattgacattttcttcatgtaaatgcctctcctcctgctgtgatagaagtaaaagagctccaacctaacaatacatccgaaaagaatcaaaaatcatatatacacattactacaacagaaataaatgatatagcatactcatatgaataaaaaagacccaaggattgtttcttccgttaagcaatgaagactagtcaacagtcacgatacatgagatgcaattatgttatgaatcttctccactagtgtatgatggatcgttaggaaatgagaataaccttctcttgtaatgcttgtgcaaaggcttcagatgcatcccctctactttcagccatgattttggcaatactagcttccgcaagctgcattcagaagagaaacgctcttacaacaacaacaaaaaaagtcatgaaaaattgtaagagacagtaacgatccaaatctcaaatagctccaaccactttcacattatataagatcaagtatgctattagatgctgattgtccattacggttgaggaattaggatctaggaatctctaaggttctagacattatgtcttaagtagcagttgcagacatcgatgtaagtttgagctaaccaaacaaataatgaggaagtccaaaattatgcctcctaaacaaaacacaaaaaatacagacataaaatgcagagaaaaaaagaggaaatttggtagcaaaatcacccagcaatcacaccttcgttacttggcaagattcaacaactgtagtcatatgcacatcccggcattcagactcatcaggttttaaatcgtgttgcggtggcactacattctgtacttctgatgagtgaagtttaagtttttcttcaacatttttggaaatcgatttaatgtatagtccttcttcattaagtaaagcaatgatgtaggccctcagttgggaatgatgatggcgaatatctgtaatgccattaacgatcagcccatctgcaacaatctgtgagcaggttaacagtgacaccaaagggtaagagaaataattctagacttcaggaattataatacattgagtacccacattcttcttttccaatgcacgaaccctcttcttcaaatgattctcaatttctaagccctagagtaacaaatatctgacgttagtgaatgctgcatctaggttcataatacttgaagataaacagatgaggaaggaaaggataaataccactcgtaatttactctgaagattatccacagtgttcttaacctttcccaactctccttccagtgcagcctgtctgaaaagagttgttcaaatagcagatagaaataacaaatcacctaataatccgacacatattgcttagtgccataaccatgtcaacactagcaaacacaaataactcttgaaacattttcccatagcttttagtgaatatagacaaatacttcctagaaatgatctattttgctaaaacaaaaattccattctatctatgcttcttttgtggttgacggaaaagaataggagattcagaatctgaagaaataagcagagtggaatatactaaaaagtatctacatgatgcgaataagttccaagatatttgatcattaataaaaatggccaattagattgcctctgccttcaaatgcaatgtcaaggttctcgatgtttttcgtatccaagaacgaaaagtctctccggatttacaaattaacaagaaccgatattgaataaaatccatagaaattttataaaacactaccttattctcaaaccagactcctgccactttagcaaacacgaacttctatattcctgctaagtacgatttttcaatatgttctgatagtttttacatttactatctgtactttatggcaatcatacaattaattgtaacaaccaatatccaaaacaatttccagaaaactcatttgctggtatccagaggtactagtcaatagaaaaaaaatcttctactgcgaccaattttaccagccaatggtgaatagccaacacacaaatgacgaaattagagctttctccggaaaaaaaaaaaagagagagagagattggatatgttttcagaaacttactacataatctgaagttgaaggatcattgaaagtccatgattctataggatcatccaataaacttgcacacttttcatgcaaactcatttcaagggactcacagagtgaagctttacggatatcatagaacttctcaatcacctgagcagatagagagaaaaaaacaaacctttatggaagaatttagtaactgagaatcataaagattcagatatacgtgatagcttattcaggaggtaaaatataaaagatcagaagttgtagacttcagaggacaaataaggggaagaaaacgtaataagactattagggatgaattatgtgtagacaagaacgaaaaatttacccctgcatatgttctagtctgttcttcaagttttgccaagtcagcttgcaatgtgtcatttagtctcttctgtacaagacaatctgagctaagttcttccaacctagctcaccagcaccagggaccaaacaaggaagggcggaaaacataagtaacacagggcttaggtaataacatcgatattttgctaaattcttgagggcggaaagtttttatagaacatcatttttagagagattcagataagtcgatgcagctacagaacgtcaatttttcaagagaaatggagctagtaaaataaatcagggtgaacagggtcacaattaccgcatctcaatttcactaagtttctgtgacatcatttcagcattctcttcagctttttcggcctggtcaaagtcaggaaaccatcaaaaagtaagttagaaagaatacatactcaaaataaatgttgcttcttttcattagactgagatggaattccctcatacctccattactgacttatccctttcagaaaaagcagctgccacagaaccctggaaaaatctaacctgcttttctgcttccaagttctggaagtgaaagaatacatcacaacatttagatcttagaaggatattttctaaagcagattgaaaaattagtatgaaatgagagagacctttgctacttctccagcatgtaaatctgctaactgagcctgaagagacagcttgtaaacatttgcttcggaacatttttaaaatcaaaatccttttattttaaaagcttcaaagaaactgactttcacacggtaagcttctgcaagctcctcttgaagattgtgtttctcccttgtgcaagcagccaacttcagttttaagctctctatttcctgctccaagctagctgtcctaatagtattacccaatatcatttaatataattgttagcaacaaggctcttattttacacatctatgaggtaaaataagttatgaagtatctttcattggctaaataacgaacttaagtcaaaccataagatacctctggaaatgcatccgagcagccacaccaagaatgctaggtccaccttgttgcatgcacaactgttcaatatctttctgtagttcattacgctctggtgataaaaaataaaaaaaaatactatgttcatactcaacatacatcaggtaatcaacctgcagatataacatggagtctcaacaaccttgatacataatatcttcaaacaagcataacgcacacagtagcaaaagacatatgatataagtacataacccaaaagagaatgagaacaacttctacaagtgatgtcttcaaatgtttcttaactcatccccatttgctaaagataactcatttctaagattataagaagaagaaataactaaaaggaatcatcttttgcatctgagaaggcagggaaatgggaaaagctaagtggtcatgagaataagaaatagctatcgtatgaaatagattggactagatgacaaactaatggagcagaatacacttcaagaaggcttcagagaagcaaatgtaagactttagaaacccatttctataagcttataaacatgtccagggtctaaataactaccacatagagacttgtagagaaaacgtaccatgttcaagttgtttgatccgagcctttagattctcattttcatctaaattaagatccataatttgatctgcagaagatcaaatcaacactatgaaaaagtaaacaacttgcttggaaatttacagactttttgagcagattttggtgcttagaagacataaaaacaaatccttagcaaaaacccagaactcatctcaaatcaacaaagaattcagatgagaccctgaaattagtttacagatcaaagcgaagtcttaaaattcaacattccaagggcaattccaaaccctaatcgagaagattgaaattgagaaaaagaaattaaaaaaaaaggatcagagagaaagtgtttgtacctttttgttcttcttcgttttgaccaaaaatgactcctttcgtcagattattatgttcgttgggatattcctcgtaattttttcaaaaccgaatttctccttaaccgaggatcaatccggtttagtaagtgttttctatcttattctttttcctaccttatctattaaaaaaagtgagatttatacacaaaacttttgattagactatttattacgtaacctataattagttctatgttaaccattatgtcattttcagttaattccctaattttttaaaaaaaaaattgtacaaaaaaattcagtgtagctatagacttatgcaaatttcttattcaagtgacagagctttgtggatttgtttggatttcttttcttatttaagagagattttgcattaataatctgatattttggttgtaaacgattgtcaaatatgtatttgttttgactaactctaatcttaggaagatatatagaagaatagttctctatctagtaatgacgttaaaatcaaacgatcatatattaatgttagaataagattaaagaaaaaaaatgttagaatatgattaagaaataagaacttaatataaaagcttgagattagaacttttgagataagcttgtgtatgataaggatttaagagaccggtgaaaggtgttagtgttttggcaattggttctatctttgcttcggttttgtcattggcaaatattgtcggactacggaccagtcagtgagtctgtaaccgtaagagtttaaaaaggctaagagaggggcaatcatgaacgtgatcaaaatatggtaccatttgagctgatggaagatgtgtggaatgataatgattgttaaaatgacttttaaacgattaaatcttacaaattcgaaatgtttctctaagcttttcatacaactcataaaatgttaagtttacatttaacaaaaaaaatattatgtttacttagaccaatacttttttgcaacccttaaataatgagaatactataataaaacctaaaatcaaagcataaaccataaactcttaaccttaaaccttaaacccttctcttgaattctttcgcgaagagaaaactctaaatcttgttattatattttgtttgtcgattaacatctgatttctttagattttgttttatgttttagccttttaggggggtgtattgaattaagaattttagaagattttggtttttatttgaaatctcttgatttcaaaatatttttccaaataatctgttattgaacatggaatttacctaaaataagtcaaaatcatttacaacttgttgtcatttataaaagtcatacattacagaaacaagaaattgaaaaatctgtcacgatctcaaaataaattatataaagataagataataaaccgatttctgttatattaacgttagtcttgtcattattacaacaatcctataaggatatatgcgttatagccttactataaaagatttaccttcaaaactattgaaacacagaatcaaaacatttagatatataagtctcattcctcttcttcaccttgtctctaagagacaagccttgtttctttcatctcatccatcaccaacaccaaacacaacctctaagacaaagtgaagaagatgagtgacctccaagcaaaaaacgatgtggtagctgtagatagacagtcttcctcgtcgttggcggatcttgatggaccatctccgctgagaaagatgatatcagtggcttctattgccgccggtattcagttcggttgggctcttcagctgtctctgctaactccatacgtgcagcttcttggagtcccacacaaatggtcatctttcatatggctatgtggtcctgtctctggtcttcttgtccagccatccgtcggttacttcagcgaccgatgcacgtcaagattcggacgtcgtcgtcctttcatcgccacaggcgccttgcttgtagctgttgctgttgtactaatcggatacgcagctgattttggccacagcatgggagacaaaatcgacaaacctgtcaagatgcgagccgttgttatcttcgctctcggtttctggatccttgacgtggctaacaacactctccaaggaccttgtcgcgctttcctcggtgatttagccgctggagacgctaagaaaacgcgaacagcaaacgcgtttttctctttcttcatggctgttgggaacgttttgggatacgcggcaggatcatacactaacctctacaagatcttccctttcacaatgactaaagcatgtgacatatattgcgcaaatctcaagagttgtttcttcctttccatcactctcctcctagtcgtcacaatcatagctctttggtacgtggaagacaagcaatggtcgcctaaagcagactcggacaacgagaaaactccgttctttggtgagatctttggagctttcaaggtgatgaaacgtccaatgtggatgctattaatcgtcacggccttgaactggatcgcatggttcccttttcttttatacgataccgattggatgggtcgtgaagtgtacggtggagactcaaaaggagatgacaaaatgaagaaactatacaaccaagggattcacgttggtgcgttgggattgatgcttaactctatcgttcttggaatcgtctcacttggtattgaaggtattagcaagaaaataggtggagctaaaaggctttggggagctgtgaatatcatccttgctgtgtgtttggcaatgacggttttggttactaaaaaggcggaggagcaccggagaatcgctggtccgatggcccttcctaccgatggcatcagagctggagcattgactctctttgctcttcttggaattcctcttgctgtaagttcaacatgtcttttatcaaatttttgttactattgtcattaatggtttataatttgttaacattaataatctattttttttttgtatttttatagattacattcagtattccgtttgcactagcttccataatctcaagtagttccggcgccggtcaaggtattttaattaacctctctttttaaaaagtattatgtatctgttgaaaaaatagtaatcattttgtataacatatatatttaaatatcaaattaataaggatgagttttttttccgttgtcatctctacaggactgtctctaggagttttaaacatggcaatagtgataccacaaatgattgtatcgtttggagttggtcctattgatgcgctttttggaggtggaaacttaccaagatttgtggtcggagctattgcagcggcaattagcagtgttgtggcatttaccgtgttaccttaatttatttttcattttacttgtaatatataatgtagtactaggtgaattatatacttaaaactaatgtaaaatttattctattaaattattaaaattaatacatttgatatacaatataaagttattgactttttgactatattttggcgactttccaaatcttagaatttaaatataaaaattattcttatagaaaatgtaataaaccataaaatagtctatttttttagataaataatctaattagatttttatttttttggccaaccaaataatctaattagataacatccaaattaataaaaaatgaagatgttaaaaaaaaatcaattttttataacatttttgcttataatcctttggtcatataataaaatctttttagaataattgacaatgtttggtaattcttctaacaaaaaatgaacaagtaaaacgagttatctaaatgtatcgttttggtttgttggacttcggttttcttgtttggtctggaaagtaatatacaaagacttcttttaagctttctcgcgtattctatttacttaaaactaaggaatcctatttccttcttttcagtcttacaatagaaactttgcactatgtgatttcagctggagtcgtcgccgctgtgaggtatgatctcaattctatcattcagaacatcttcatcttattatagacaatccttccataaagattggtttcttgcagcacacgtgtatcaaacaatttgggagttgggaatcctcaagttgctagggtctcagtattagcaaggctttgtctctggatagtagagtcagctttctttagcatacttctattcacctgcaggaacatcataggatacgcattcagcaacagcaaagaagttttggactatgtcgccgacctaactcctttgctctgcctctcctttatcctcgacggctttacagcagttcttaatgggattgctaggggaagtggttggcaacacattggagcttggaacaatactgtttcttattatctcgtatgagctcctcttggaatttacttagctttcagtcgtgagttgaacggaaaaggattgtggtgcggtgttgtggttggatctactgtgcaagccactatactggctattgtcacagcttccataaattggaaggaacaggtaaatggccatttcagctctttacacttctacattcttttatgttctttctttaatgctatgaagtaatctatgattttgcaggctgagaaggcaaggaagagaattgtctcaactgaaaatagattggcttacacaaatgatgtttctcatagttatctcaaactatgcaaattttttattgaaagatgtttatatatctatatttgttggccatgtttaaaagctctaataactagacattctaaatgtatatatctcacaaattaaatctcaaaattgtgttctttcttaaattaaatctcacaaaatataacatagtttcttgcacaccacatgttcgacaaaatgcaccactcaatagcatcaccactacgaatcaatcattaagcaaaacccccaaaatcctaacaaagttaagaactttaaatcacataatacaagaacggaatccaatttaagactcattcatcatcactactttcacaatcttccttaccatctccacaaaacccatttcccaattcacaaatcatattccaaacatcttcctcaacaggaacaacagacaacctcggctgtctaaacaaaacaaaacctttagtaataatccctttgtctcctttcatttccttcaaatccacacatttcctcatttctccaatcgctttgacatcaaccgctccttctccttctactccttcagcatcatcagtgtaccattcacgtgatacttcaaccacgccaacgacgcatcttgatttggttcctgaatggtagaagaaacagagatctcctaaagtcatggatttaagattcttctgggcttgtttgttcttgacgccgtcccatttgctgataccgccgtttgattcttggtctgaccatgaccactcatttggctctgttttcagtaaccagtatcgcttcgttttccccatctttagattgaatgaaacttggctccgtgtccttgctggctttattaggatcatatatattcatgcccgtgggccgaagtgggccgatccattagcccaattaaatctattagaagaagaaaagtactcaatccagaataaaacggtgccgttaggaacaccacgaacgaaatacgaatgagattcatgaacatttacgagctccgcaataaggttgattgaagtgtactaagattggttatttctttgtaaggcacaaaaaatatggtcggtccaacattgaaggcccactagaagttttgttatcattgttgaatattagaaggaatttgtttttgtagaaaatgctaattcttttgggaaatcttacaaaaataccattttttttgtgtggaaaatatgtattttactagagattgatctgcggtataccgtgggttgatattttcgttagaatgttagaaaattttattttaattaatactatttatagataaataacatatttaagaggtacaccacttccttatatttttattaaataaaaaattaaatttttttaaatgaggtatagatatatgctattgttttttctattttatgtaagaaatcagaattagatgtggcgcacagagatggtagaaaatcaggggaggagattacggagttaacactgcagttgaaagagatatatcgagatgaagaattgtattggtataaaaaataggaatctttggataaaattgggagataataattcaaaaaacttttgactgattagctttgctaaactttggtttttatttgaaggatccttttcatcctcaacaatgtcactcattgcacagtctttgacccaaagacgggaatacttgagagaaaagacgagtatgctatgggtgaaacaatgtatgacacttcttgagttatcaacgataaaatcttccatttggaactaatagcaagatcgaatattctgatgccacattcaagacatggacaatggtaaaaggtttacctgatttcgacatattgaattctattttaactcaacggaaaaatccttgtcataaagtagcagagaccttaatggatttcatttacaatgattacttaacaaatgcgtagcttgagatatgcggcaatgtcgaatcttgtaacgagcttcttaaaaaatttacaaggattttaaaatgcatttttttggctgaaaaatttacatgttctcattagattattggtaatttggtcattttgttcaaaaaagtatttttaaaaattgtcaacaggaaagggtattgttacaaatggtagtaaaaaatggtacttttacaaacccccaaagataatttttcttttttactctttctcttttgtgaactcaatttgttctgttataatatatttgtaacgtccgtgaactggaaaatcggttagggtttgtttttaaatcatccggtttaattggttgggttaattggaaaccctagagtgtgcctataaaagaaagaaactcgaaattagggctttggttagccacttttcgttttataaaggagaaaaagagagaaaaggagaaggagtagaatcgttagggtttgggagaaatcagtttcgtcatatcaaatcgtggtaaaaggtaacgaaatttggtaaagttattcccaagtcctttatcgttattctccagtttacagaattggatttggattaaaattggttgagttattcgcagtttcgtgagacacgttttctaagacgcgaattaggaccagcggagattgaaactgagatcgtggtctcgtcgattttgcgatcggcacgagattttgtgggtagctttgtgacgtctgcagctaggatttcaccggagcgattgaatagttaacgtttagtttgtattttagggtttcgtctttgagactgcttgtttctggtttttcctgtccagtttgcttcaaagttgcttttggttgtggacttgttgtaggacgtttctggactgtttcagacgcaaagagagtctctcctgggtttaattgctattagaatcaatttgttaaggtgagtgcgtgaccatgagcttatctgagcgattggattgtgtgatttgttttgtgtgatgatatgtaggtgtggtgaatgtgttttgggtgaattgttcaatgactggtttgtttgtattgtattcgtgattatacctttttatttgcttgtgtgtatagctcgtagatgggaggatcgcctcactaagtatttatgataatacttacgcatctcattgtgttgttgatgcaggtaaagataaagtgtgattgtggaatcatggcaaggaagagaggatgatctaggaactcgtttgttttatgtttggtgtttttggttattggaacccggttaggattgtcagttattcttggttttgttgatcgaattatttatttattcataaaatggtatttctgacttgcggtttaattattatgttattggttggtttaattagatatttatgggaatatttaattatattttttaaaaaaaaaaatgggtcgggttgtttcaatttggtatcagagcgattacggttctaggatgtgtagaaaaattaattgatgaattatttttttgttgattgatgtgggatgagctagggtgttagcatattgaggattgattatggagtgtttagtcaattgtgtgttgttggagtcctagcatcatcttctccgagccttaaatgagattccacggtaagttgtttgtgatatattcgtttgttttagtttcttagccatttgttcttgagtagcgcagatggttagaggagctggagttcgtggtcgtggtcgcggtcgtggtcgcggtaggggacgagtcctcgagggtaccggcgagagtgatggccacagtgccacagttgagcagagtgtgggtttgcagcctgagtttgtggagcccggggttgggaacggtcttggtaccgatatagctggtgcagccggagtgggggctggtggagctggtgtcggtaccggtgtgcatgccgttggtgctgagggcccaggagtgatgggtgccgcagccggaggagtccaggttccagaggttggtttggcgggcctgttgaggcagttattggagcggttagcaggtgtggtaccagtggaggctccagttgcgccacgagtggcggaggtgcagcagcgggctgcggttgctgaggaggttccatcttatttgaggatgatggagcagttgcagaggattggcaccggttatttttctggtggtactagtcctgaggtggccgacagttggaggtcgcgggttgagcggaacttcggttcgagcagatgtccggcggagtatcggatagatctagcagtgcattttctagagggggatgcacatttgtggtggcggagtgtgactgccaggaggcggcaggcggatatatcttgggcagattttgtggctgagtttaatgccaagtactttccgcaggaggcgctcgaccgtatggaggcgcattttcttgagctgacacagggtgagcggtcggttcggggagtgctaccactgcagggagaggggacatctcaggccgaattgtcctaagctgcagcggatggcagtggcagcagggagtgcagcagttggcacatattgcagcggcaccgcagggttgcactacgcgtgagataggcggtaccagcaacagagcgattactggtatgatttctgagacttagactttgtgaaatatttctgttgttttggatatcattgttttgtgatgaatgttagggttcttagcacatgaggtctgtgtagggaccttattagtgggcggtgtagaggcccatgtgttgtttgactctggagcatcgcattgcttcattaccccggagagtgcctcgcgcggcaacatccgtggggatcctggtgagcagcttggagccgtcaaggttgctggagggcagtttgtagcggttctggggagaacaaagggtgtggatattcagattgcaggggagtcaatgccagcagatttgattatcagccctgtagagttgtatgatgttattctgggaatggattggttggatcattatagagtacatcttgactgccaccgtgggagagtttcttttgagcggccagagggaagtttggtttatcagggagtgagacctacctcagggagtctcgtcatctcagcagtgcaggcagagaaaatgatcgagaagggatgcgaggcttacctggtgaggatatctatgccggagtctgtggggtaggtagcagtgagcgacattcgggttattcaggagttcgaggatgtgtttcaatcgttgcagggattaccaccatcacggtctgatcctttcacgattgagttggaaccagggacagcgccgttgtctaaggcaccctacaggatggctccagcagagatggcagagctaaagaagcagctagaggatttgttgggtaagggattcattcgtcctagtacttcaccttgaggagcgccagtgttatttgtgaagaagaaggacgggagtttccgcttatgtattgactaccgggggttgaactgggtcactgtgaagaacaagtaccctttgccaaggatcgatgagttgttggaccagttgaggggtgctacttgtttctccaaaatcgatttgacgtcgggttatcacctgatcccgatagcggaggcagatgttcgcaagactgctttcaggacgagatatggacattttgagttcgtggtgatgcctttcgggttgactaatgcacctgcagcgttcatgaggttgatgaacagcgtgttccaggaggttttggatgagtttgtgatcatctttattgatgacattctggtgtattctaagagtcttgaggagcatgaggtacatctgaggagagtgatggagaagctacgggaacagaagttgttcgctaagttgagtaagtgcagtttctggcagagagagatgggttttctgggtcacattgtttctgcagagggagtttcagtggatccagagaagattgaggctatcagagattggcatacaccgacgaatgccactgagatcaggagttttcttgggttggcagggtattacaggaggttcgtcaaggggtttgcgagtatggcacaaccgatgactaagctgacagggaaggatgttccttttgtgtggtcaccggagtgcgaggagggtttcgtgagcctgaaggagatgttgacgagtacaccagtgttagcattgccagagcatggagagccttacatggtgtatactgatgcctcgggagttggtttgggttgtgttctaatgcagcgtgggaaggttattgcctatgcatcacggcagttgaggaagcatgagggcaactatcctactcacgatttggagatggctgcagtaatctttgccttgaaaatttggaggtcttatctttatggcgggaatgtgcaggtgttcacggatcataagagtttgaagtatatcttcactcagccagagctgaacctaaggcagaggcaatggatggagttggtggctgattatgatctggagatagcttaccatcctggtaaggctaatgtggttgcagacgcgttgagccataagcgcgtgggcgcggctccaggacagagtgttgaggccttggtgagtgagattggtgctttgcggttgtgtgctgtggcacgagagccattgggattggaagctgtggatcgagcagatctgctgactagagttcggttggctcaggagaaggatgaggggttgattgcggcttataaggcagagggctctgagtattagtttgcagctaatgggactatccttgtgcatgggcgagtttgtgtgcctaaggatgaggagttgcaacgggagatcttgagtgaagctcatgcgagcatgttttccattcatccaggagcgactaatatgtaccgagacctcaagcggtactattagtgggtcgggatgaagagggatgtagctaattgggttgcagagtgcgatgtttgccagttagttaaggctgagcatcaggtgccaggtggcatgttgcagagtttaccgattcctgagtggaagtgggattttatcactatagattttgtggttgggttgcctgtgtcgcgaaccaaagatgctatttgggtgatcgtggaccgtctgactaagtcagcacattttctggccatcagaaaaaccgatggagcggcggtattggctaagaaatatgtgagcgagatcgtgaagttgcatggagtacctgtgagtattgtgtcagacagggattccaagtttacttctgcattttggagagcctttcaggcagagatgggtactaaggtgcagatgagcacggcttatcatccacagacatatgggcaatctgagaggactattcagacgcttgaggatatgttgcggatgtgtgtcttggattggggaggtcattgggcggatcacttgagtttggtagagtttgcttataacaatagctatccggcgagtattgggatggctccttttgaagcgttgtacgagaggccatgcaggacaccgttatgcttgacccaggtgggggagaggagcatatatggtgcagattatgttcaggaaaccacggagaggatccgggttcttaagttgaacatgaaggaagctcaggatcgacagcggagttatgctgacaagaggaggagagagcttgagtttgaggttggggacagagtgtatcttaagatggccatgttgcgaggtccgaacaggtctatctcagagactaagttgagtccgaggtacatgggtccgttcaggattgttgagagggtgggaccagtggcatacaggttagagttgcctgatgttatgcgtgcgtttcacaaggtctttcatgtgtcgatgctgaggaagtgtcttcacaaggatgatgaggtgttggctaagattccagaggatcttcagcccaacatgactttggaggcgagaccagtgagggttctcgagaggaggatcaaggaacttcggcggaagaagattcctttgatcaaagtcctgtgggactgcgatggtgtgacaaaggagacttgggagccagaggcgaggatgaaggcaaggttcaagaagtggttcgagtgttgttgagtttttgagcttttgagttgttgttcttatttctttttcatttgtattttcgtttggagttgtaacgatcatgacagttgatgattaataagatgagtatttttttcttggatttgacttgagttgtcttatttaagaatgtgttgtgcggtttccaaaaatgaaaagtttcctagaaaggacttgtctatttttggaaagtttgagtaaacaacctaagagaaaggtgtgtttacgagatggccgggagttggtcataaggatgttctcgaggggatatgatggatggtgaggcatagaggtgtcttacgcgaatccatgagagagtctggagatatgctcggaagcgtttagtattgtttctcgagggacatgagggtcccaacgactcgtgaggagcggggtatgcgcctgaggtaccggtaactcgagggacatggtgtctttagagtacgaggggtacggtggcttcgggtgacgatttgagagcacgctttagggtgacgacccgagagtgagttttgtggtattattttctccaagtgtcgtaactcgatgactttgtggctgagagtgagccgacacaactcagggttgactttgagtggggaagataatatgtgtgatacccgagataccgtaggccgaggcctgagagtgacggtttatgctcgaagattgcggtgtgagagtggagagtgagttgtgagcaacaatgactagtaaatcgttagtatatcgactggatagagagacctagagggggtctggttggagggagtgcagactgtagtgatggttgcacggagttcctcggagtggaaggttgaagttagattcgaggacgaatctatgttagtgggggagaattgtaacgcccgtgaaccggaaaatcggttagggtttgtttttaaatcatccggtttaattggttgggttaattggaaaccctagagtgtgcctataaaagaaggaaactcgaaattagggctttggttagccacttttcgttttataaaggagaaaaagagagaaaaggagaaggagcagaatcgttaaggtttgggagaaatcagtttcgtcatatcaaatcgtggtaaaaggtaacgaaatttggtagagttatttccaagtcctttatcgttattctccagtttacagaattggagttggattaaaattggttgagttatttgcagtttcgtgagacacgttttctcagacgcgaattaagaccagcggagattgaaactgagatcgtggtctcgtctgttttccgatcggcacgagattttgtggacagctttgtgacgtctaggatttcaccggagcgattgaatagttaacggttagtttgtattttagggtttcgtctttgagattgcttgtttctggtttttcctatccagtttgcttcaaggttgcttttggttgtggacttgttgtaggacgtttctggactgtttctggactgtttcagacgcaaagagagtctctcctgggtttaattgctattagaatcaatttgttaaggtgagtgcgtgaccatgagcttatctgagcgattgggttgtgtgatttgttttgtgtgatgatatgtaggtgtggtgaatgtgttttgggtgaattgttcaatgactggtttgtttgtattgtattcgtgattatacctttttatttgcttgtgtgtatagttcgtagatgggaggatcgcctcactaagtatttatgataatacttacacatctcattgtgttgttgatgcaggtaaagataaagtgtgattgtggaatcatggcaaggaagagaggatgatctacgaactcatttgttttatgtttggtgtttttggttattggaacccggttagcattgtcagttattcttggttttgttgatcgaattatttatttattcataaaatagtatttctgacttgcggtttaattattatgttattggttggtttaattagatatttatgggaatatttaattatattttttttttttttaaatgggtcgggttgtttcaatattatccaaggattaagtttttagatatgataattcagtttttcgatgatatatgaagcatttttagatgtaactagatgagtacccgcactacgtgcgggtttatgtattactatttacaaattattttatataatctctgttcatataaagtaaagttgaatgcatctgttttaaaacataaatatgatttgtaattgtttttgaaaagtccaactatattagttcatctgaaaaacgaatgtgcttgagttgttttttattgttattctagattctcagtttttttttaatttatatattcctgtttttttggttatatgtttagattgtgagacggtgaaattttagaaaatatatttcttaaactaaaaatataacatgactttattaaccatgtctctgcatattcaatctaatcatattcaacttgatgttcttggaaagtttagttaagttcctgttataatcttatatcttacgtattaattataaggataactcctcaaacatctttcaaattacttgttttcttagaataaatcttgaaaagcttagatatatttaatctgcatattcatttagtttctttcatgataatcgtctaatttttaggcaatgaatatgtgtagcatgtttggattttatgatcactttagctacttaatggatctcaaaattaaagaggatatattgaattaaaaaaatttagaaagagtgatgtattacttattttatgaaatttaggtggcaacctctcgtgtgctgatgtgtcaacaacaatataacacatgttcatagtgaaagaataaacccagactgcaaacttggctttgatcgcacccacaaaaaaagaaaatcccgtttcagcatccatcaacagaactcccaccaaatcagttaattactggctgaccgatgatcgtcgactgtacgcattcaatagcagagaagagctatatgaatcgagaccactaagacacacaaccactgaaattacatgtaggcgaagtaggatgatggaggtgaattttaaaaaattattacaaatttgagttaaatagataacaaaatgtgaacttggaaagattggcgagtaagattccgaaaaagaagacgaaggggatgaattggaatttggaaggagacgaaagaggtaaaactgaaatgtcattaattgattcattatgtaaaagtttgagcaaattacgtttaattacttttaatgatttttttgtaaatatataaaaatatgtgctgatgtgtcaactgctggagtgctgaggtgtcatgttgtggaagagagttaggcttctttcatatatatgatttgattttcttattaagcattatatatacttactgtaagagaaaagtaagatatgaaaactgaaaattgttaatttattacatttatctaaacacacacatgagagatatgaagacaaagacattagtcattgctggagaattaatcaaaaattatgtccaaaatactttgctgagtatgttacttggagcaaaagaattaaataagagttgtgaagagaaagatgtgtgagagacaaggttaatgggttgtagtttcaagtttaagtttctcgttaagtgttgtaatcagagcataagaaatgctctttttctagaagaataatttatagaattatttacgcaaaaaaaaaggaaactaaagaaatattgtgtttatataatattttttccaaatttttgtagaaagaaatttaattaatttgagaatttttaatcatttagcaagattttaaaataattaaagatataataaaaatttaattatattaataatatcaaagtttatatgaataattatgaatatagaatgcatatatggataatagtttaattatttgtcatttatatctatttttcatattttcttttagtagaataaaagtgcggcatatgggtgttcaccgcattaccaatttttaccatgatatattattaaaaaaaataaaaacaaattcactatggaatgaaaagaattggaacattttacatgtgaattccatttttgatgttgtaagctttgcaatttaacaaaaaaaaccaaaaaaattgagccaagtggaaaataatagagcctagagcaagtagaagaagtcggagagattgcagaaaaaaaataaaaaaatttggacttgatacgacgtcgtttgaacaagttcagcaacaaaagaagaaactggttattgggtatgctttggcttctaagaagaagatgagtttcttggaacccaagcttgaagttcttgctaggtaagcatttcgtatttgttgtttatatctttctcaagtaactgtgtaatgcggtccctcttcaaagctaaagattgctagaacataagacaattggtttgggtagtaatgactacctctttttggtttttcattgattatatggaagcaaattggaactacacattcttacaaaacaggaagcaaataagaaatgggaaagtagaaaatagaacatgttattctctgatcctacaaaccaggaacagagaagaccaagcttattcaaccaaataacaaattaaaagacttagtgacttagtcgttgtacttcgggtttggttttctcccgcgtgctgacttcttcctctcaacgacttcttcttcagtagtgacaaccccatcaataccctccccctaaagacgaaccttgtcctcaaggttcaagacaaactcaggaaaacttgctgccagttgatcatactcttcccaagtagcatcttcgatgtgtagcccttcccattgaacaaggagatctgcaactcttttcttatcttgagacctccatcgtacctctaacacggccgtaggctgcaacttcaattcgccattgttgcgcaagggcggtagttgtcccatatctggctcaccatctccaacccaaggtttgagtagagaaacgtggaaaacaggatgaattcgtgtaccttcaggaagagtgagacgataagccacctcgccatgtttcgatgcgacttggaaggggccatagaagcggtgtgatagcttttgtgaactgcgacggaacagagttttctgacggtaaggttgaatgcgaagtagaacccaatcgccgacctgaaaagagacatcacgaagcctagaatcagcttgctgcttcatgcagttgtttgcggtgaccaggtgctgctttagttcagctaacaactcatctcgggctgccatctgctcatttaattcgccacaaacaactgagcccagttcgtaggctggaataggtgatggtggtcgaccatagagagcctgaaatggagtcattcctgtggaggcatggaacgttgtgttgtaccaatactctgcccatggaatgaacgaactccattgtttcggatggtaatgaacgaaacaccgcaagaattgttcaatgcaacgattcacaacttccgtttggccatccgtttgtgggtgatatgcggtggacatccagagtttggttcgtgaaagcttccaaaattcttgccaaaacaagctcatgaagatagggtcacagtcacttacaatggaacgaggtatgccatgaagctttaccacatgtgacacaaactttgcagcgacagatctagctgtgtaagggtgagacagtggaatcaagtgtgcagacttactcagacggtccaccacaaccatgagtgagttgtgtccttcagatcgtggcagtcaggtgacgaagtccatcgaaatgtcctcccaaacttgagcaggcactggtaggggctgtaaaagactagctggtgataaagagaagaatacttagctttttgacatatctcgcatgcagccacgtattcccgaacaatcctatgcatcgacggccagtaatattgctgtgcgagacggcggtaagttcgtagaattcccgagtgaccaccaagaggagtgtcatggtgttctcttagcagctgcccaacgagcggtgacgacggtggtaccacgatctagttatggtagcagatgaggccattcttccactcatatgggtgcccttatttatctgtggtgagagacccaatccacagtaaatatgggtctgttccgttcagtgccttaatctcatcccacaacgaggactgtggcacaaagatggcatccaaggtgggatcttggtgcaatcttggtgcgatccaccttaactccatcaccagatatcatgtgaccaagatattccaattctttttgcccaaactcacatttcttatacttcactacgagcttgtgttgttgcagaagagaaaatacctcacttacatgttgaatatgttcggaccatgaagaactataaacgagtatatcgttaaagaagaccagaactgacttacaaagcagaggccaaaagatctcattcataagcgcctggaacgttgacggtgcgttgcataagccgaaaggcattacgaggtattcgtaatgaccgttgtgtgtctgaaaggctatctttggtatgtcaggagaatgcatacggacctgttgatagcctgctgtgagatcgagcttagtgaaatagactgctccattgagctcatcgagcatatcatccaccgtgggaatagggaaccgttccttaaccgtaagagcattcagggctcaataatcagtgcataaacgccatgacccgtccttcttcttgactagcaacactggagacaaaaacggactcgagctcggtcgaataatgcccgcacgactcatttcatctttttggtaaaacgcataacgataaggccgcacattcaccggatctgtcccttttttgagtgctatgcggtgcactattggccgctccgacggaagctgcgtcggcgtctcaaacaaaccggcgaactcctctatcagctttttaatttcgccatcgggtgtattagggtcgctggaattatgggccatagtgattgcaaaaatagtgtggcccattcgggcctttttggttatggttttatgttccacgcctctaagcccagtaggcttaatacccatcaaccttacttcatctccggcccaatgaaactgcagagtttgttccttccaattacaaagtgttgggcccaaagtgctgagccattggactcccatggccaaatccaagcccattaacggtaaagcatagagcgtgacagggaacaccacgccgcccatcaccaccggaatcgcctcgtacctactccgacaaaccaacggcattccgttcaccactctcacagtgaatggttttgttgttgtggctttgagattcattccccgaacagctttctctccaatgaaattgtgagtagaaccgctattgatcaaggcaattagacgattcctatggattgtggctcgaactcgtatggtgctcgtagtgtcaaccccttcgagcgcgtacagtgtgatttctggtttcccctctgcttctgtactctcctcctcaaccgcttcgtcatcattctccccttccataacgaatagttgaggttgtttacatttgtgtcccggcgtatacctttcatcacagctgaaacataagcccaaactccttttctttcgtaattcttcctaactgagtctctttggcgtctgttactctgtctctttgcgcaccaccagacggttagggacaaaactgcgtggagatggtgagtagctcgtttccttcttctgtctttggatttgcccttccatccaacgcgcaagttgattacttctctcagagatcgaggctggaacatgcgaatcccattagagatggagtaatacaatccattcatgaacgctcccaccaacacctcttgagtccatccgtaaaccttgttctgtagccattcgaattcatgttgatactcactgagtgacccggtctgcctgatttgcatcaatgttcatgaaagttctctccgtcgttgggaccaaatctcgcccacaactcagcttcaaacacctcccatgtgattagcaccctatcgtggcggagcgccttaatgtagcctgccaccacccgttagccaccccgtcaagatgaaaagtggtgaatcgaacggcttgttccactggcccctcgtgatattcaaaatattgttttgccttgctcaaccatttcgtcaagtctcctccatggaagcgtggaaaatccagttttgatggtctggcgatggcgttattgttgttagccgtcaccgcagcgaatgggttatctggttctccacggttccctgtcgattggaactggttcctttcggtccttcgacttcctcttgaagccgctgaccctccactttctctctgcgtcactgcctctatcaaatgcgcgagagcctcctccaacctcctatggcggtcctcgttatctcccttgagatcaaccatagccaccgtcattctctgcatctcatcttgcatcatgtcctgactcgtttccaactgctctaactgatccttgttggtcgccatcggctctacggttatcaccggagacacgacctgcttccctttacgtttggatcgtcggagggtaatggctctatttttgtgaaaagaaaaaaaagaattgtgctctgataccacttaatgcggtccctcttcaaagctagagattgctagaacataagacaattggtttgggtagtaatgactacctccttttggtttttcattgattatatggaagcaaaatggaactacacgttcctacaaaacaagaagcaaataacaaatgggaaagtggaaaatagaataactagtggtattctgcgaaattcactatgcttaatagtattgatctcatctctcttgtaaatccctaaaactatgaaagcattataatcatgtttgataagttcacctaagtaatcgacgctatgacgcatctaaataataggctcatctaagatagttcgagtaatagacacctatggtgggcatacctattaacctaaaatcaagttctagttaattactctagaactagcattaagaaaaacattaagaacaatctaagatgaagaattctaattatattatcctaacagggtttttgatctactaattcatccaaatcccttgaaaacccaacaagagaattactcagacatgattatcaaagaacaaaacatgtataaagtaaaaatcaaagtaagaaacaagaagagaatagagtttagaaagatcttctttaaaactatatatatgacctaaaaacgtgatggaccttctttagaaataagagaatgttttgggccaaatttagaaatcttcaaaacatcaataagttgcgttttcgaattgccgtcaggtattggtgtcgttcgacactaggagtggtgtcgttcgacacctacgcggattttgatctgcgaactgcttctgcaacttaagttgtctgttttgctctagaatgctccataatctccaaatgcttctcaaacatgtaaagacctgaaaaagactagaaaagactctagaaataacaatagaactctaaaacctttacctaaatcatagctaaaagcagtaaaaatacggttatatcaatctacttccgctgagttaaaaacaatagaactcctcatctaatctcactattttaaggtctaattctcacatgttgtgaacatattctagatattgaaccgcaaatgatttgttgtaaatctcactatctctctatttctcacactcatttacggtttcattgtctttagagagaaagaacaaaaaccattttactttaatcttctacattgataatatcttggataccttacataacacaaagacacacatacatatactactttcactacttgacgctactgcccacttgcacttagacctaatcataactcttacttagaccatactcctaggttctgggcacgcttacacaagcctcctacttgtgttggaactctaacaacacttacaactactcttacctagacttgactaacttaaacaacactttactcatttgggcctaacataacaattaggccaagtacttattacaaaacaacaagcccaacatcttctttgacttgttcttctcctccttggtcgttgacctcttcacgactttcttcttctttgtttcactttgctatgatcttcttctcactgaagcttcttctcttttttgcaggttcaatcaaggatacaattccaacatgattgttgttcatctacatatatatggggagttgtttagtatgattacacagttcatctacatatataaggggatttttttttgttttgttgattatcttaggtggccctcacatagtcttgttcaaatgcatcgacatgtcttcaagaaagggctgctggtgcactttgaggattattggagtcagaagcaaatatgtgctaattacttctgaattctaagttttatgggttctttttatagattctcaggtgatatgtttaagatcttgttgctttgagcttagccaagcaatcttggataatatgatataaaatttcctctatgtgctgttttttttttactaggatgtacatgaaactgcagcaggagttctatgtctgcttgtttgatgaaggaggagttccagctattgttcagttgtgttcgtcttttatctcaaaaatgtccccattcatggctgcattggctttggaatacatgtttgatggaagtgatcatatgtctagtacacgcacctccttgttgttgtaaataatcgattccataaagtcagttttgtacatctgatgatactcgaatgtcaactgtagttccaagcctggagtatacttagcatttatttgactaatttcattcctatcaaagtagcccatacctggaacagaaatcctttataataatctctaaattccaaacctaagaaacataaatttcaaaggaacgaacttgcctttcaatatatccataatactactgcctaaataaggaagacatcatggtcgcagagggaagaagaaggttgtcttagggttttttttctagcgaagaagaagaaggtaaaattgtgaacacttacttaggcctgggataaaaaaacgaaccgaaccgaatcatcatcatcttttttttcttcttttccgtcttcgattcttcaaatatttatgagaaacaagcggtgaagataatttacggaagaaaggaagcaaacatggtcgttaatagtagaggagaatgtggaagagagaatatggccacaagaaagagcttgggccgaagcaaaacgagactgagaatgaaattcacggcggcccaagatgttctcccaagacatatgtagattagatttaaaattcggccaagtctcttttcttttgggctaattcacttttcgttgggccaattaatatttttaattacaattgctttttgcgccaatttttgagcaaacatatttcagaaaaaactaaaaactaaaaaccaaaaatatatatgtatatatatatattaaaatatatttaaaatattcctcttttgtcatcaactttttattagaactcatatgagccaaacctgaagaacgttgtttacataagtgatgtaaagcgggagattaaacatttgcattacgagagattaaagataaagaaaaatttgtgaactctttcttgtcgctatgaaattccttcaaatatgctgagaacaccagtcattcattaagaaaagaccacatcttcaccaggtctcaacaatttgtaaaaaaaggctacatcttagttgtcgactataatcatacatctcatcgcccagagtagagcttcgacttcggtatgtaaaggagaaagacttcttcaaagattagcagcacccatggttgacaactctccatttgctgatgtacaaaaccacattgtctctaaaaagttatcgctttctttccatattctgtcaacaaaacagcggaatcccgaataattattatcactataaagctctacttgagctaactgaagctctagttgagctaactaccacgattttccctctttttctactaaacgtaatacctctagaggatctttatccacattcttaaaaatcttctcatttcttgctttccaaatataccaaattatccatggatatgaggttgaatcaaactctcaaggtattattgagaattagtaatccaaattcgcataaatataattcaaaggaaaaacttcggggaccataggattatgtacatacttgttagcagcatacttgtgtgatgatgttagcagcatacttgttagcagcatacttgtgtgatgatgttagcagcatacttgttagtagcatacttgtgtgattatttcattagtacttagtctcgtggcagtccactcattatattgtgtggtttgtatcaggttgctctaaggaagaaaggaaggttgtatggggttggttctctacataatgaagcatcctcagccactgttggtccacaacctcataatgatctggttgttctattggagaagcttgctgctgctgaagcttgtcttcaacttcaggctgagaagatcaatagtttcgatgcctattttgaatacctcgcagagaaggatccagtgtttgcatgcatgtaccgaagaccatctgaaccagcaaatgcagacgccacaagacatgctgagggcaaccagaccggagatgatcagacctgcaccgatcagaccggaactgagactgagacaagaactggtaccataccagactcctctacttcacaagctttttaatttctctctgttttaagacttggtttatagttgctaatctcaacttttggtttaagacttgggtttgctaatctcaacttttgtaatctcaacacttatgtttttgaatcatttagcagttaatgtttttgaatgtctactgatttcatatatgtttttatatgtttactaaaaatcaaattaaaatcaccagaaaaataaattagcataaatttcgtaaatgaaaaaacaaaaaagactcccaacagacttgcaaatccctagcaaatgttgcgagggaagtgctgctcttatggtttacgagagattgtggtccccgcaaattttgcgacggaatagattcctcgcaaaatttgcgaggaaattgcgagatattaaatttgcgaggaatgacgtggcgtagcaattctcttgctatacgcgtttgcgacggatttactaggaaaccttccctcgtaaaacacatgttttcttgtagtatgtgagagagcccatacttgtcacgttggatggcattgaaacagtgtatggatgattgtttcctctacaacaacacaacgggcgcatccagtatcacaattaatccctctttttcatagattttccgtagtggcacacaacctaataaagtttgtcaagacaaataacgcaactttgggggacactgcactttccaagtataagatttgagtgctttgatatcttagccaataaaagataaattgtgatccaacttttctagctgcactgtatgataactcgacttaactttaaattttcttgatttggtgaaatgccaaacctaaggaatcctcctttgttgacaaaccctagtgtagaacactaatcagctggacatctttgggatcaaaaacctcctttagaagatcaatattccacaaatttgaccggctatatatcatatatagtagtgacttttaaagatggatcaataattgagtcttactttttgttggttttgggatttgagctttaatccacggatcctcataaaatgagacggatgctccaaaatcgactctttagtagctttgaaaaaagaagaaactgttatccgcaaattagagaagataaactgaaggactcactattgtagttttgatgcccgtactcaactttccttgttttaatttccgaatattcgcaattaacacctcactacataaaatgaataactaaagggaaagcggatcaccttgtcttaaaaccctttgtggtattattaatcttttaggttgtccattaagaaggaccttatactaaactattatttttatgttaaaatatttctaaatatttatttactacatatttatggtacttataaataaatagaattcttaaccaaattaaaaacgaattaagtgaattaaatgaaactttaaaatagtagaaacaacactataaaaatagaattagtagtaatcatatacttcaattttttaacaaaaataataattagaagtgatcatatatcatatttttagatgtgttaatgagttttagaatggaagtaagactagatgcttgatatagtaaactatttttatataactccatttataaaattttaaacatgaagataaaatttaaagttaaaaaataggttttaaaaacaatggactacaaagatttttatttattattaattttccacttaaaaaattaaactatttataaacgtaatatataatttaattgaagacgaagacattgtaaaaggcgcacttttggtgaaattatatcttaaataatacaaatcatcttctaaaaaagaaagaaactaagagcatctccattggaagtatctcaatgagatacccaacaaaagtaataataattacaaaagaaaaagtatgagagaaaggagaaaaagtaggagagaaggagagttgagtttctcggaagataaactttgagaaactattctcatccaatttggacagttgtcattatactattagttcaactattaaataataattaatatatctgttttggttaaaatattaatatttttttttttgagaaacttttcttatttatattgatggagatggtgtaatgtttatattattcatgagttctacaataaaatatacaaaagtgatatgttagcttttataaaaaatcatatatatgaaagttggtcaactctctccatatgagtgacatatcatcacaccagtgagtgtcacatgtcattctaaattaatatcattaaaatataacaaaacttactgataaaaatttaaaagtttcacttgcattaaatcatccattagtctcactcttaacaaaatatcttcatttaaaagaaaaaatacaaaaaatcatgttaatgtatcaaacactactttcattgagtgacatatcatcacaccagtgagtgtcacatgtcattctaaattaatatcattaaaatataacaaaacttagtgataaaaatttaaaagttttacttgcattaaatcatccattaatctcactcttaacaaaatattttcatttaaaataaaaaatacaaaaaatcatgttaatgtatcaaacactactttcattttacttttcttatttttgctatttttataatagtcatcacttgataatgattagaaatttttgtgtattacaacttagctgtttgctacttaaccttttttagtttagtaattttaacttactattttctttttattacattttttggtttatatgatatggtatttttgtgtgtttatgataaattggtaacattaataatgacatgcatattttttaagtagtgatcttttgagacgttagatatatcattgggcgttcgggtatgcgggtcgggttcgggtcgggtatttcgggttcgggttttttcggatttagaaatttaagacccgttcgggtaatttaagattttgggtcgggttcgggttcgggtttatttatatattgaaatatcagaattttgtatgtaaatctattaaattacttgaaaatttcaaaaatttccaaaacaacacgagtagttttgcttgaatatatttaaaaatatacaaaattaactaaaatatccaaaaaatcttaatattttctatatagaagtataaatataactaatatatacttatatttgagatatgtttgggtacctattcgggtttgggtttttcgggttttgaagtttagacccgttcgggtattttaaaagttcgggttcgggttcggatcgggttgttcgggtcgggttcgggttggttcttcgggttcgggtattatgcccaggccttagatatatcaaaaagtttaatatacgacgttttctctaatatggatatatgcaaatgtaaagagagaaacctaaaagtgttgactcaaaagactatttaatttatgctttcttttttctctttcatgtgaaaacttataaagcaaatgagtagtttatatatttgtaattcaaattatgtgaatccaatatttaaccatgcgcctatcatgatgtgattggaatactagattaggagagaatacatggaacaagaaattgtttgcttagaatcaagttaggcaacttttaaagcaaataagtagcataattgcatacaattgtatcatattgttgatgtaagtatttcatgatagttaaattttttagaaacttgggtatatagataagaagatttatacatgaaaaaaaagataattgatatttgaatcaaaagtgaatctaactatacaaatataattacataaaatgaatataactttattaactacataatagcatacacaaaaataacataaattagcaattaaaatagttaaaaataattatttttaaacaaatcacctagtgatttataatttgtatagcatatcttgaagaaaagtctattttcgagtggaactacaactctataagataatcaacaagaaaaataagttacattattttctaaaacaatatattacaaagagttttatttattattaaaactccacttaacataacataagagattactaatctcaatttaaattttctatttaagaataatacattgtaaaagtcacaccttttgggaaattatatgaaaaaaagatcttcaatatatttcttaaatattaaaaattcatcatctaagaaaagaaagaagattaatggtaatattattcatgatcaacaacaaaatatacaaaaagtgatatgtaagtcgttaaaaagtatagtcttgaagaaaaattaggggtggggtgtagcatatctcgaagaaaagtctattttcgagtggaagtacaactataatcaaaaagaaaaataagtttgagacttttcaattgaatcaaatggttttaacctaacaaatttggtacaaacaacgtatttaaagtacacttaagttttttttataagacgatatatatgttatatcacaaaattaacatttcaaaataaggtcatgatatttaagtatttgatttgtaagtattatgagaaacaaaaacaacaatattttcatgtagaagcttgttaatcgcagttagacttttttaaatagttcactatgtaattttccaaagaaatatcataatgtataattgtagatgagatacaacataaatggtgtgttgttttggttataagtgatataatgtttcattggtctcttgttttggatatgcatgctaaattatagtatacttacttatgttacaattttttgtttttatcgtaggaaaatgtatcttagtctggttgactcatgcacacctcgcggatccatctacactgactttctctaattgcaaagcaagtgtaactcacctccatcccgtcattgtacgtctcacggccatatatcaacagatataaggggaacccaacattgaattatttatatttgatatttataaatatttaatttgttgagatgttaaatcatttgaaaaataatatttttgttgagatggttaaataaggtgtgtagataaattctggcaaatgtgggagaacttcggagagagctgttagatgacatacatgctatgaggatttctgatggtgacattgaggtggcaccaggccacattgaggtggcttatgttatggatgtggtcgatggttattgtaaccatacctttgagcaaccttcctagaggtctttgaccaaatcaaaaactcaagaaaaaaatggatattgatatgcctgagcaaaacagaaccataccttcgctttgccaaactgtgatcttgagtggaaagatctttttcatcctaaactatgacactcagtgcacaacttttgacctaaaagaaacatgaatacttgacagatatgttatgcgtgaaaaaatgtatgacaactcttttgttatcaacaaaaagatctttgcatttggaaccaattgcaagatcgaatattttgatgccacagtcaggacatggacaatggtgaaaggtttacctgattttgacatattgaattctggcctatttaaactcaacggaaaaatcctcgacataaagcagcagagacataaagagatttcattcaaagtcataactttacaaatgagggggcttgagatatggggtaatgttgaatcatctaatgttatttttcagatgtattttgcaactattgaagcattggttagcgtagaaacgtgacaagtataagatatcagatcaagagataattgtaaccgaaatgctacaacccaaagagcatttacattaaaattcttctcatatttgctatgtactttcatattcttagtcggtgtctgctatgtactttcatattcatattcttagaagatgacttgagtgcatggtaggagtgtatggtttaaaacatgtctttgtttcctgagattattgcaaaacaaaaaattgtttaggaggtgattatttatgtgtgaaagcaagtttacctcagatgaatcaaatgacattccgcaaaaccttgtacactaataccaatatatgaagccaggatagtgatttacataagggataaataattattatcccttcgagatttaatagttcatgccagaaaatgaacgattaagatcgtgggagatgatagatccgcggaatctcgcttaccccaatcatagtgtcctacgattggctcaaaattaatccaatcatcacgggtaaaattgtgtttatatatctttaaaatggcaaatcttattggctcgtggttgtaacagctttttattgtcattctttcaaatttgctcatattaaaatagttacattaaataataaaaaaagaggagaagatgtcaaccttgacgttaaggtacgttaaatacatacaagaattttctttccatttttggtttttctgatttagttttacttaattatttttatttaaattcagtctaacatggcataatgttattggctaatagaaaaggaggtgaacccaagatttgagcaaattcaatatttaggaagagaacattccttcggtagcttgttattgaaccttccataatcttggcaataatcataaatcaagtgatattttctcacccatttaaaccatctcttttgcactcttgtcaaagaactgaactcattcttgttccaccagttttcagtgctctctccattacaaaaacttgtattgcctatccaaatacaagcgtctatcttgtaatccccaaaggaagccacaaatggaccctttgaccaatcaatcttgtcatgtccaccgcgcgtagcccagctctcaccgttccatagactcgcctgtacactcataggttgcaaccttgggtaggctacgcctttctccccatggtttctatacaaccttatcggaatctgatccaccataaatctgaaaccaccaaagtaccattattatgcgtcttgagtacgtagtggaatatatttttggttgatgaatcttacacaatttggtgaatgttccacaagatagagtaagtgtgaaagtccttggctgggtcgaaccagagatggatcctttcttcgcggttatcaagtccctcggcatagacatttgtctggagaatgtaaggctgcccattaacgtttccgaggaactcaaagtcaatctcatcccggttaggctgatctgaggacatctgataaatcatggaaattatgagattcattcacatcaacccgttaagatgaagagatagagacggtttcttacataataagcaaccacggttccttgagaacttccacggataagtttgatcttcatatctatttggccgaacaagaacgtctgaatggaagaaaaagaagctcctaatattatcaaaacataagttctcaatgcggaaaaatataacgaggacatttggacatatatatgaaaataccagattcttgatcgagtttaagggttcttgatcgaccatcattggaggtgttaacgtgggtaggagaccatgtcacaaagaagtctttgttaaaatctcctgatgaaacaacggaagcttgtgagacccataatagcaaacttgagataattgagaagcctacgagaagtacaaatggttttgagcgatttattagagtcattatttaagatgtttgaggttgagtacgatggacatatataacgatcattgattagtatatatacatattgtattgcatgaaaagtgtttaaagtaaattgtgtcctatacaaagaatatatataacgatcattgattagtatatatacatattgtattgtgtgtttaaagtaaattgtgtcctatacaaagaatatctttgtggagaagcaaagagaatacatacttacgtaggaatctttttgttttcttttttcaaaacgtaagaatgtttgcttccttacaattcatacttattaacttacatattatgttttcttttaaatattaaaaataactaatttttattaggcagcaagtcatttacaaagtaaaaaatttctccatgcatgtaaccttcatttatcattcattttagtttgtaactttttattagattttgatcaagttaaccgctaaaatctcattttatccgttcgcattaaagttaaatagattgctgacatattttaaatctaatagaaaatgccatctggcaaataaacaacggacacgattttaaactaaattttaccaaaaagaaaaaacttatacgacttttcttgcttagaagtctttgcattgttaatagattgttgaaaaggtttattcattactttcatgcagagagataacatatcatcgcgtggggatttattcaatccaaagaaaagcttccaaaaactgactttgcttcatgaaacactcactctaatttgcttcatcaatcttaggactgacttttccaaatcaatatgcgaactatcttctaatttacattggtttcgtgttttttcgaaaggagacaactatctttttaaaagcttttctatagtgtgatgacaaaaaaaaaatgtaattgttagttgcaaaagaaaagtacaatagtcttttctagttttgagagtttaaggtttatgatcggaacttagagtttaaatttaaactattttgttaatttttggactgataacagtttttttttgaaaatattgaaacgttgtttacctaatgtaacatgttattctacttaaattactttatattttaataacatataatattgaataggatatcataggatattattacgtaataatatcctatggtgtcattttataagttagcacaagcttgttttaacttataaaatgattctccctccatataaaaaagtttgattttatagaatgtttataccgattaaaaaaataataatgcttagttataaattactatttattcatgctaaactatttctcgtaactattaaccaatagtaattcatcaaattttaaaattctcaattaattgattcttgaaattcataaccttttaatattgattgataaaaatatacataaactcaatctttttaatacaaaaaaactttaaaaaatcaatttttctgattcggagggagtatatgttattgcttagaatcacagattcatatcaggattggaaaattttaaagccagtgcatatcagtagtcaaaattggtaaatgatatacgaaggcggtacaaaattaggtatactgaagatagaagaacacaaaagtagatcggtcacctagagtttttcaatttaaactgcgtattagtgtttggaaaaaaaaaacaaagtgtatacaatgtcaatcggtgatctttttttttttttttttttttttttttctttttggataaatctcaatgggtgatctattgactgtttctctacgtcactattttacttacgtcatagatgtggcggcatatattcttcaggacttttcagccataggcaagagtgatagagatactcatatgcatgaaacactaagaaacaaataattcttgactttttttcttttatttgaaaattgactgtagatataaacttttattttttctgactgtaaatataatcttaattgccaaactgtccgatacgatttttctgtattatttacaggaagatatcttcaaaacattttgaatgaagtaatatatgaaattcaaatttgaaatagaagacttaaattagaatcatgaagaaaaaaaaaacacaaaacaactgaatgacatgaaacaactatatacaatgtttcttaataaacttcatttagggtatacttacatatatactaaaaaaatatatcaacaatggcaaagctaccgatacgaaacaatattaggaaaaatgtgtgtaaggacaagattgacaaaaaaatagttacgaaaacaacttctattcatttggacaattgcaatgaatattactaaaatactcacacatggaccatgtatttacaaaaacgtgagatctatagttaacaaaaaaaaaaagaaaaaaatagttttcaaatctctatataagcgatgtttacgaaccccaaaatcataacacaacaataaccattatcaacttagaaaaatgaattttactggctattctcgatttttaatcgtctttgtagctcttgtaggtgctcttgttcttccctcgaaagctcaagatagcccacaagattatctaagggttcacaaccaggcacgaggagcggtaggcgtaggtcccatgcagtgggacgagagggttgcagcctatgctcggagctacgcagaacaactaagaggcaactgcagactcatacactctggtgggccttacggggaaaacttagcctggggtagcggtgacttgtctggcgtctccgccgtgaacatgtgggttagcgagaaggctaactacaactacgctgcgaacacgtgcaatggagtttgtggtcactacactcaagttgtttggagaaagtcagtgagactcggatgtgccaaagtgaggtgtaacaatggtggaaccataatcagttgcaactatgatcctcgtgggaattatgtgaacgagaagccatactaatgaagtaatgatgtgatcatgcatacacacgtacataaaggacgtgtatatgtatcagtatttcaataaggagcatcatatgcaggatgtatcaatatttatcaaataatacaaataagagctgagattacgagaatctatttaaattaaaagttacatacttaattattatagttatatatgtaaaatatgtggcctttttaaaagttacataattaattattatagttaatgtctttcaaaaatttataactttataacatcctctattctatgtaatacaaaaacaatatttcttatgttcatattagtatgtgtatgtaaggattaataatatatacacatgtatgttttaagaaaaacataataaaaatatgatattaccgaagatttcatcataatctaattagaatgattaaaaataaggaaacaaattacctaaaacaataaattcatatgtaaatgtggcctttaaaatgttaaaacgttcaagtggcctaaggcaaatgcctttttggtaacactataaacacggctctggactactcatgatgctataaccggaaatcactactgcggttcagtccaacaatataggcagtttgtaatacatcttcataatcgaaatttttattaaagcgttaattaaggattgtacattttcaaaaataaaataaaagaccgctcatatctagtcatatatggaaccacagtttagcatcaaattgttccactaaaattgttgtacggtgtttttaagaaaagttttagagttgagtgattttgtttttttctctgaaaaacgtaaaacactaatatggcgcccgatgaagaatagattttttgttatttgaattttgctattctttcctaattttaatatacaagaaaaatcaaattaattcaattaattttattactctgaaaaataaatataattattattttattaaaatcctaattgtggtagttagttaattcttaaattaatttgatcaatagttaccactagaagatgttatttgtaaataaataaaaaactcttaacataaaattactgtattatgtatgttgaccagtactagaacggagcctaaatcgtcgtaatcaaattcgtcttgaaaatttggcaaccaatcacgtcaggtaaaattgaacaaaaacgaaaactttgataacttgcggtcatctaaagtcttatattcttctgtagttctgttaaaactatgcaatctcgttttaacgctaaaaatcgtagatcatgattttgttcaaatgttatggtacaagaagaatccagattttttgttattaatttttttatatgaaactaattttatatatcagattgatcaaagtatgcaactcaaaacgaaatatgattaatatccaaatgcaattatttaataaggaagagaagttattaaaaggataacgttttgatgtggaatatggatatttgccccttccacttccaaatttggattttagatttaaatgcaaaacgtaaaacgaagaaaaatacttgtacatctgaatctaccacctattctattgtacatgtgaagagagcgagttgtctttaataatattaaaaaaaactaaaattataaaatattaataattaaatatgaaggtgttttaaattaaaatcatccttctcaaaagtgtttctaacaagacatttaagacatagtgttttcggtttgtcgatacacgaacattaaagtaatatatatattttatgtatttattttagtcgggaaaacggccaaatcaactcaactattttcatgcggttttttcgaatccaaactttaattctctgtatttatccatccgaactctcttaactgttaaataacaaatctgaatttaaacatatatttattattaaataatgtaacaaatctgaactatataactgttagctaattataaaaagaataattcagatacgaagaacatataattacgacttaacaattataattgacattaaaaagtataaaaaaactatgttgaaattaattgattaagggttacatcgtttaagtttataatttaaaaattattctggattcggattgataaatgcagagaattagaatttaagttaaaaaagccgcgtaaaataatttgtattgattgtggtcgttttccttattttaattgtgggaagacagcgatgaagaatggagatggtctagtagacttcaattagctacattctacgaacgtcgtaatacctagtttgtgctttaaaaaaaacaatgcaatacctagttgcagttttttttgtttacgtcatttttacgtccacatattgttttgcaaactttacatccaaatgcacaaccgagttcaacgagatagctatattcgattttcgaaaataaatgatgcatgtgatttaccagcaaggtcttttacatggtaagaaccttcagaaacgaacaaggtcttttaaatggtaaaaactagcagccatattagtaggtctataaatctggctatataaataaatgagatacgcccccatccccattcagttatttttatagttaatgaaatgtcatattttgctaaagaatatgcttccacaagattaaaaaacaaacaaggtctttattaggttatattagttaccgattcaagtaattattagctaaagaaatgtcatatttatctacagaacccctttttcaagaagcatacttttactattacatagaaataacttgaatgcaatgattatgatggttacaaagtcgttttggtcaaattgtcaagatggctttggttttttccctgatagataatagatgacgttttgctctgtgcttagtccggtatgccatttcaaaatgatttggttctacttatcttgtaccagttattggtgttaagctgtaacaaatagaatgaataatgctgatcacattctatattcgatctaccagaaaattcgaaactgccacaaacgtaaatttatatttttataatttcatttaaaataattaataacaataagttagagagtaatttacaggaaaaagttgaacatatatttatataacaatacgatgaataatgattaatttttctttttttgaatcgtcgatgaattatattcctccaagtaagtggacctaacctttataatcataactacatctaccaatctgatattcaaattgaaactgtagaagctttcctttttttccttaagaaaattaatccattcatattgaattttttttgtatctacgtattttataggtagtgttcctgcctaagaatggaagactttttccgaatcaacaccactatatatatatatatatatatatatatatttgtgtaagaatagacttttctttaaattctacttgtactataaaaataaaatagtttatattacaagaaggcaatgaattgtgaagaattatattgtgcaagtatctaagtagatgtttgaccccattccagtgcttttgagttgggcatgagctaaatcttgctaacaagttcaccgaaaatgatatatcaggtcttgtatgattagcaaaatacattaatgctcatgttgcacttaagtacaatattttaggaacaaaaatttcttcattttcttctcgaaaatggaatggatctttatccacatcaagtgctcttacaattattgggctactcaacggatgtgttttgtctaaagagaatctcttaagcacattttcagtgtatgtcgtttgatgcacaagaattccatttttcaggtgctcaatctgtaatcctacacaaaatcttgtctttccaagatttttcatctcgaattctttcttcaaatactcaactgtctgttaaatttctgcagaagttccaataatgtttaaatcatcaacatacactgcaatgataacaaatcccgatccaaatctctttataaaaatgcatggactaatcggatcattcttataaccttattttaataagtactcactaagacgattataccacatttttcctgattatttcaatccgtaaaaagatcgattcagttttatgcagtattatatcactacttggaggtatagacgtcattgtttaagtttgtcctaagatagaaaaacgcatcataaattgattgcaaatatctatcgctaattcttgtataccaaatgccaatgctacatgcgtacgttggtatatatgtagcgaccaaacgattcgtcactagtttatatttaatacaacgattatatgtttgtcggtatttaaagacaaattataatcactaattagcgagaatttaacaagtgtggtaggtgttggacgtatccatcacatattagaacagctgatgtgatgcaataatgttttaggtgcagtagtgttgcacgacgcttcgctcgagattgcaaggcactggttaatggataaaaatatacaattacaaggtaaacgtcgtggaggagagtttccaccaccactaaaacagaaaaccgtagatacaagagtcttcatgatgggtggactagaatgatttaacatgaaaccaatggatgcttgaggagattgttagaattctgatacaaattatttttgagtgacgaagttgttacgatccattcttggagttttcaattttgtaagcttgagtcgaaccaagatattatcctatgtataagttggattacttttctaattgttgtaccctgtcttcagggccgaccctgagaagagcaacatgaaatatttgtatttttttttttaaaacaatttacaccaaaaattacttgtaaatagactctcaaaaatatttagttctgaagaaggcttccaaattttaaaacagtttacattaatttaaaatatataatttgttgttttggtctccaaattgtcaggaccggctagttgccttcgttgttaataaaggaatatttgacgaagtgttattggaaacagttttgagataagtagtcttttgcggtttgagatcagtttaaggaaggtcgataatggtcggtcatctctggccatatgaatgtgtgtctgatagtatctgatgttactgttttggcctacgtcatagacgtggcgtcatatatacagcaagtgggatagatacatgcatgaaacattaaaagactatttattcttcatgacttttcacttcttaatttttttaaaaaaatagttcagttaggatttttgtaaacactagactcagattccctgcgatatcgcggggagaatattttaaatatgtttatataataatttttttaaaacaaatagtatattataaattttagtaattatttaaaaaaatatatatagataattagatatatatatatatatatatatagacgggaagataacagtcaatatttttacaaataattccaataaaaaaaagatatagtcaaaaaaaaaaccccattaatattaacgaaaaattacgataaaaaaatacgaataaaataatcatctatgttttaacggaaataagcgaagaaaatatacaaacataaaatataactgtcaataagtaaccaaaagtaagtataaaaatatatgaacgaaaaaggtaagtgtcaatattttaatggaaaaacgcgatgaaaagactcaacccaacaaataattgtcaatattataacgaaaagttgcaacaaaaagacataaccaaggaaaaataaccgtccataattttacaaaaattgcaataagaaacaaaaacgacaaaataacagttaatgttaacggaaagttacgatgaaaaaatatgaacgaaaataataactgtcaatattttaacagaaagttgtgataaaatgaaataatcgaaaaaataaccgtaaatattttaacggaatgttgcaataaacagacacaaccaagaaaaaataactttcaatatttttatgaaaatttgcgataaaaaaatactaaaggaaaaataacagtcaatattaataaaaagttatgatgaaaaatcactaacaaaaaaagttgcgataaaaaagacactaacgaaaaaaataatcgtcaatattaatggaaagctacgatgaaaagatacgaataaaaaataaccgtcaatattttaacggaaagttgcgataaaagagacacaaccgaaaaataatcgtcattattataacagaaagttgcaataaagagacacaaccaagaaaaaataacagtcaatatttttaccaagtgacgataaaaaaaacaaacggaaaaataaccgtcgataataacagaaaatgacgataaaaagacacaaataaaaagttgcgataagaagaaactaaagaaaaacataaccgtcaatgtaaatagaaagttacgatgaaaatatactaactaaaaaagtaattgtaaatattttaacgaaatgttgcaataaaaaaacacaaaaaaataaccgtcaatattaaaatgacaaagatataaacaaaaagttgcgataaaaatgtagtaacggaaaaaataaccgtcaatgttagcggaaagttacgatgaaaagacatgaacaacaaatataaccgtcaacattttaacctgatgttgcgataaaaaaaacacaaccagaaatgcaaaagatatttttttggattcatcatgaaataaataatatgtgataaaaaaacaaaaattttataattacctaagaagaaggacgaatatatagagttcaacagttacaaatatttaagtagaaaactattcataaggaaatatacaatgaacagacacaaacgaaaaaaataactgtcaatattataacggaaaattgcaataaagagacacaacaacaaaacaataactttaaatatttttacagaaaattgcaataaaaagacactaatggaaaaaatcatatatcaaaaagttacaataaaaagacatgaatgtcaaaaagtaacccatcaatattttaacagacacaactgcttacgataaaaaatacagttttacgagaagttttgataaaaaaatactaacagaaaaagtaactgtcaatgttaaccaatagttacgataaaaagacacgaatataaaagaataaccgttaatattttaacagacacaactatttacgatgaaagacacgaatgttaaaaggtaaccgtcaatattttaaaggacataactgtttacgattaaaatacagttttatgagaagttgcgataaaaagaaactaacagaaaaataaccgtcaatgttaaccaaaagttacgctaaaaagacacgaatgcaaaaaagtaaccgtcaatattttaacagacacaattgtttatgatgaaaagacacgaatatagaaaataaccgtcaatgaaaagacacaaatataaaaaagtaaccgttaatattttaacagacacaactgtttacgatgaaaagacacgaatataaaaatgtaaccgtcaacaatttaacagacacaactgtttacgatgaaaagacacgaatgtacaaaagtaccagtcaacaatttaacagacacaactgtttatgatgaaaagacacaaatgttaaaaaagtaaccgtcaatattttaatagacacaactgttcggaagtgcaaatgtcatttattcggattgttattattaatagattcacaaaacgtaccatatttctaatttagtttgtataattatgttaggattttttaaaagtgaacctatatataagatatttgatgaccaaaaaaaagatatttatgacccaaaaggacaaaaaaaataaaagagataattcgatatagaagattttaattagatatatgaaaactaataagggtattatcattatctgtactcggaagactcgaaaattaagtcgatcgttattcgactgtttatcttacgctgttcctatggcaaataccatgatacccctgtattatattttcgaaaatttcattaccgctagactagtattgtgtcagacggcaacataatcttttttggtaaatttgttttgaagaaacgtgatcctaataatgaactgagttgaactttactagaaacccgaagcgtcgtcacctttcatctctacttatctgttcttatcttcgtttattgaagtaccctagaaagagtgaaagagtaaaccgtctttcatagcaggaatttcgttgttcaataccgtgctcaatctttcattgtttaggcagtatactcctttatatctgatctaactcggttaccgctgggattcgcttgtacagtatggatttgatttcaatttgctctgatttagggttttcgttggctctgccgttggtgataaaacccttttttttttgcagatgggtgaagttgatttaccgaatcgtttgattgcctttggagaagaacctctcggcgagagggttaatgtctatcacaaaatcgaaaccctatgcggcattataaacacccttgacgatgaagagcggtccttcgtccttaatagttcgcttggggacttttggattttctgaataagccggcgttttctgcgagctttggtatttttttactgagtaggcaattggaagttgccaaaccgcatgaaatttgggtagtttacgctagtactcctgtccgatttttgttgagggagttcaagattgttactggccttccgtgtggaaaatatccaaaggtagaaaataagaagaagaaaaggacggctgggaagcagatccctattacagttccttgtttggtctcgaagaagacgtaactattgaaagagttataacgatgcttaagaagaaggtggtaacagatcggaaaattaggttaagatatgcttgtttggctcttgtggatggttttttgttgcctaccgccgaaatggctgatgatctgtagagatttctgaaatacccttgggtgcgattgtcttttgagatgatgatgacttccattaaagagagggaagttaaacagctcgctaccacttgcgtggcggttcaaggtcttctttacgcattgcaactcattgtcttggaagcagcacctgatatacaggaaggccctcaaatagatgaggtcgttggttctgattccgatgaagatcccgccgttgtcgtaggtcctcgtcaggtcgtggccctcaagctcggcaatgcttaagatgtggatgcaaaatgcgaggtaacgctttgttttcattctagcgctaacagttttgttaacaccattcaactgttgttatcgttgataataccgatgttaattttatgatatatgcttactatcagtatctgataacaagtttagtatgcggcaacttcatatcaggataatgttttacctaccgattattgtaaaggatctgaaccggacttgctcagttgtgtaggagatatttttttactgtccttaacgccataccactgtacttagctgataacaatgtttatcccatctaaggaccctacacaaaattacttgtttggttacacgaaattcctccttatcccatctaaagatcctacacgaaattacttgtttggttacaatggttgattgttggcatgttttagtattattaattgctaatatccatgttaccgtgattggtcctctgcatgttgccctattatgtcctattgtcctgcatcttgagcaacattttgctgatgtcctctggacaaaaataacagccacactagatcgatttcttatcgttatgtgtatccgtttaacagcaatgttaccttcatacacagattcgtggattaccttgaactctcccctagagaatagtcttctcttcagcggcctttcaggtggcctacaaacgtaaggtgggcaagtttgccacctccgacatcattgggggaaggagtcagtgtatccatgtcggggacgggtatgataatacccttgtacgccaatctcagatatggaacggtgtagcggacgcctaccattgtttcgacacgaattgcttcctttatcgctgctgctatagcatgggaacatggaattgttagtagctggaattttgtgcatgtgcatgtcctctcccaaaggttaaccgcaaatgccgagtcttctttgtctcgcacttcataaaatgcatctccgattttaagtacgacataccctgctctttttcaaaaatttcaatgaccatctcattcacatttgaaggtaaatgattcccctcgagttgtgcagcttcttgccggagggcaaaccatgtgaccagtgttgttcgaagagtctctagcagcaaatttaccggataatcccttgccatggttaaaacattgttttgcgactctgctatgttgctcgtcatgaaatcatacatatctcccacaaaatgcgagcgcgtgcaatgttcaaacccaatgccttcgaggtaatcccgggctgcattggcgaccggtaagcccgagctgcattggcgaccaaatcaacccttctgacttgaatattgagactatgttcctctttaaatggacaacgcaggccgcgtgtgaagacatgagataaacctggagattcatgacaatgttttagagttatgatatatatatatatatatactcacgtatcaggtaaagtaagtcttgcgaggtactagaaaaattagctttgtaagtgtaacgttatctagtaacattatcttgttaccggatataacttaccttgcgtatgctagcatatatagatgagtgcctgtctgaaacgaagaccaaatctggatcatctggtatggtgtccgtgagcctctccatgaaccatgtccacgcatagtcattctcgctgttcactatcccaaaagcaatggggaagacttaaaaatttgcatctggagcgctgacagcaattaagcagcctccgtatcggcccccctgatgattcccatcaatcactatcacctttctcatataagaataaccttggactgtagcagctagggcaaaaaataagtacctaaaccgctccacaccttggttatctttttccgtatcaagggccactagcgagttagggtttgtttccagcagaagtttgaaataaggcttgatcaatgcgtagcttcccattgccgagcccatggcattatccatagctatttccggtacgagacatttaggctgaactcatcacggagcatcttcctcaactcgttaggccttgaccccctaccaacccccaggtattttgttctcatcaatttcccaatcacagctgtagatgcttgtttgtgaaagtctccccttgcgtctacactgcaagtgtgctgttgggttgcacattttatctcgaatcgttcactatcctccatttttgttgcgtaaatacgccacgggcatgtatggcttacgcacgcagcgaggagaatgttagggtaagacttcgcgtaaatgaaatgaaactttcgccgtatcgcatgtattgcaagttttgttgcgcagtcttctttattcttgaacaatctgccaatgaagatattgtctccttcgtagtcggcatcctttagagtgtgatgcaaataatgtgcagtttaccattttgttagataacttattgattacaggtagacatctaaatcgccatatatattagcagctacaagattgataactgtaatgtatccataagtattctataagaacacattaaaattagcggctacactaaaatttagtttgcaaactttgaattaggtcctaacatgttttaccttcttctcccggatcgtcgaaatatggtggggcgtcctcgtcatacaacacggttggtactggtgtttctttcaaatagatatctgccatcctccggctaacctgggtatttaacgtcataacttgttcttgagttgcaatgatttccacccccccttacaatgttgttaaccctactcaatcttggtgtatttattggttccatacagagtggtccgtccggatctgagtagtaatgtgccacctcgtgccgaacgggtctgagtatgacgaagaagccattttcaaatgtgttcgttagtgttatgtggcaacacatacattattcgataatctacactttacaagataacatacctatcatggccagacaattgttgctagataattcatcttcgtccatcagctcctcaacttgagaaggttatactattctgtggtgtcttaaatgtcgagtctgttgaagatagcgccactattgagatatcgccacgagctagatctgcgcttccaagggtaagacgtatagactcctctgggtttgaatttgaatgccctccaaccacgttatcttgaacattaatcggggtactattgacttgtcgtcctagcgagccagccagacggatttctctattttgcatctctctcagcatttttgcctgtttgttttccctccacattgcaaactccaagtccttaatgctctcctcgtccaggacatattctttccctttagcggttgcacttggttgcccttgggttagatttctcggtgcgacgcttcctacacccgtctctctcgcattctctcgtataattatgcccccactcctgcctaagtgtgttctggcaccgttcttgtcctgtccgttaatcccagtcacactaataccaggaacgttaccgaataacattcttgttactaccgaatcccaagctgctcttgtttcactgctattccagtacttatcagatatcgtttctaaagtcatacatcctatatctaagacgctttggtatgaattaactgttggggtccccacaatcttccgtatggtttgggccttcagctgaacctcctctagatcagaatgaattgcaataaacaacgtcatatcctcgtcatcgagaatatggattgggtttgcccgctgccaatctggccccatcatccactgcggccactgataggatagttccacttcatcttccggtcttagcgtcagtctttccttcacagcttcaaccactttagcgaacgtgtctctctcacggagctttaccgccaagcataacccatctaactcggctacgtgttcatagcatccggattcatgtcttttccactctcctcgaaccagtctaacgaccatcgccatggtgcttgtcgataatcaaccataaccgcaacgttagcagacaagtatgacagaagttacaaaccctaaggcagggtggactatttattaccctctatcgaagttgaacaaagtaactcgagaattaactgcttatctgagtctctaattactttgattttgttatcttcgcaatagtaaatgtaggttcttttccgtcatgtgtttctacttttgttgttgaagcaacaatgatagtggagtaacaaatagccaaacacgcaacccaaataatatcatggctcatcattacgattctttttctgtaacttacgccggcgggattttttggcaggtttttgtcgccgcattaaatgcgcaatatccatatttcccaaatcttttttcagtcccctacaagtatcctgaacaatagggttaaaataggaatattcgttttgcatgatttatcacacctaaatatctgatttacatatatatattcttaattaactcacgctgcatgtacatatatttaactcacccgacctaacgtattttattgttttacatttatttaattacgtataaattatatgaaaatagtttaataatgacaaattgacagcatccagtatgaataaaaagctattagacttcttatctattagcttagccaccattcaatttgtgttttctttcaaaatgatatgtcatatttgcctaacttaacaaacctcattcaagaagcagctttgattattccatcccctgcaagaagcaagtaactattaccgtggaattattgtatcaatgacttatttaacaagtgaagatggctttgttttattccctcatggattatgctttattttttggaaaaaaaatactcagctacaccaagtagaagggaatacatgggtcacacatgctaagtttagaaatgtacaaccaactacacgaactaaatttattgcatacccacatatatcaactatatgacgatatgtggtcaacatcaacatcacgacatgtggtcaatgccgatcaacgatggtcaacaccggatttcgtgatgttgaccacatgtcgtcatatagttggtatatgtgggcatacaatacatctaatttgtgtaattagttgtacatttttaaacttggtatgtgtgatcatgtatttcgtcatacttggtgtagctgactatcttttttccttattttttccttcctttttttttataaatcataaagaaagacttcttgttttattccctcatggctccatgttacaaacataagcaagaccgtaggaaagaaatacatgcatgaaacactattttcataacatttcacttgtaaatattttcttttaaataattgcatgtatcttttctcataattatttgattttctaatggggtattaaatatgtccacggacaatattaattcatattttagcagtgaggcaaaaagttttgtaatacaatggagactggaaaatgaataaagaaaataagcttccacttttctcaaaaatgctttaaaaatcgaattaattatggattcgccattttttttattgacatttgtggattttttcttcttttaaatagtttgattttgccttttttcataatataaaaatgtaatttaacgtacattttactcattatgtttgagtttattctctttcatttgtttttagagtttagtatttgatataagtacgtatttttccaaaataaaatcataaatacatatatttttaaatgttaaaaatggcaaattcgtcagattttcgtaaaaatagcattttgaaaattttattttttaatagatttgaaaaattcttacttttgcaggaaaacaaaaaataaactacaacattaaagaatgttgaagatatgatcgattttgttaaatcagagataaaaaccacaagtaagaatttttagggtgcttatgatttgttttaactgttttcattataatattaatctccaacaccacatagataatcactttataatacgatatatgcccatatctaaaatttaggttgtaataaatattttggcaattttagttcagactatttacaagattgaagagataattatggttaggcattggggcttataagtcatgttcacaaaatttatgaacttcagttattcaatttgaaagaagggtatccagagttagactgaacaaaatcttcgcttaactaaattcaaaattataaaaatttggtttggttgtagttagatatcccttgccgaattgaaccaaaaatttcgataatcttggtttaaatttgtttgttattttgtttaggctgttatatatttttggtactttcttatgtttctttttaaaaattgttttcatatgaagatgtgagaagaaatttagacctatgggttagggggttcccgactagctaccgtattaaatgttgggtttattttatctcctatctcctatccaaaggtgaaagattaaacccataaaagaggtttaaatgttcagcaagactttgtttatttattatggcaaacaaaacgaaagatagttttcaaatctctatataaacaatgtttacaaaccccaaaatcataacacaaacaaagcttggaaatagccattatttcaactaagaaaaatgaaagtcacaagctactctcgaattctaataatcttggcagcacttgtgggtgctcttgttgttcccttgaaggctcaagacagccagcaagactatgtaaatgctcacaaccaggcacgatcgcagataggcgtaggccccatgcagtgggacgaaggacttgcagcctacgctcggaactacgcaaaccaactaaaaggagactgcagactcgtacattcccgtgggccttacggggagaacttggcaaagagtggcggtgacttgtctggtgttgctgccgtgaacttgtgggttaacgagaaggctaactacaactacgatacaaacacgtgcaacggagtttgcggtcactacactcaggtcgtttggagaaattctgtgagactcggatgtgctaaagtgagatgtaacaatggtggaaccatcatcagttgcaattatgatcctccggggaactatgcgaaccagaagccttactgatgtgtgatcatgttacacatatggcatatacacacacatataaaacacggacctgcacaaaggacgtgaatatatatttcaataagaagcatcatatgcaggatgtgtataaatatttattaaaaaatacaaataagttaaaggcctctaaaaccaaaagaaaactctaggcttgctctaagaaaaaaatatattggcatttcttagagttagagcacgtaatattcttaaaaatccgtttccacatattttggttctacattcccgattattagaattcaccttagtggctgttgagaggacagactctccccagatgtagtggctgcggtcgtgaattgggttaccaaagcttgttgttattctgtttgtgaatcatgaaaacggtcaaagatgattctaaggtagaataggattagaaatcactagacaatgcatcctatattttaatgattatgtcattgaaaaactaattatggtacttattttaatcttcaattaattagatcaacaatttactcgttataaaacatgaacagaaaaatactccattatgttactagaacgaagtctacgtcattgtaagcaactttgaactgtccgtcttgaatgtttggcaatcgatcatgtatgtgacatagtccatattaaaacgttaacatcttacacccatcaatggtgtaatatatatttgcaaaaagaaatccattcctaaccctaagaatgtttcagttaagcctttctatgatccatcagtttgacatctcgttcttggtccatcttccgccaaaaaacgaacttctttgttgttgactaaattcatgatttgaagaagtttttagacaaacttttcaaatatactgatctattgaccagccgtaatatgaggatatatacattaccaaatgatccaaccgatgacaatgacaaacttctacttactaatactgtagatccgtcacttattgtgataattcttgaagtaacccaacgatatatattctagtatgaaagttgtgagcttacgtttaaaaaaaaattaaaaaaaaaagaaggttgtctcatattacaaaggcatcatttaattgatgatattaatgtgggttatcagcatggaccattgggaaaacgatatttttcaacccaaactaattactggcgggtttttccaacccgaactcagatcccagtctatttcaacctgaaccgaaattaaatttaaattgaaaacctaatctttgttacagtagccaatttcaatatagattttaacggtgttaattgatgtttaagggatgctgagtcaacggattaaaggtcgacgacgtggcatttgggcatagtaaagacgacgtcgtttaactcgtattgagttgatttgacaaaacgacgtcgttttaatttgggggaaaattaaaattaggtctttcgtgttcattgtttcgaatcagagaaagagtgaatgtgcgttgccgagaggagaaaacgatgaagatagtgcagtaggaaaacgaggaagaggcttcataatcggagaattctagatccttgagaagttcaaatgaggtaatgagttacttttaaaactatgaatgtcaattttgcatgtttttgggttgaattttcagttttaaagggtattgagtgtgaatatattccttttatacattttctttatatgaaattgtctaaaactctatttgttcaagggtagtgttcgattttaggatagacaccaagtgttcgatgaaatgcctaagagaattttcgtttgttttaatgtggatgttcgatgtctttttcagttttccgatagaggtaagattcactgtgtaccacagtggacattgggtgattaatgaaaacgaagatgttgcttatatgggtggtggggtgttaagttttgagtgtgaacacgaagagttgttcacaaaattgaggaataaattgggtgatgtaatgtattggaagaaggtgtcgtatacttatccttatgaggatagtaaagatcggaggcaattgtttgaaaaggataatagtttcaagatgatgtgtgatgggggtcgatgtgtaagagttttaaatgtgtttttggaggagtcaacagagaatgacgatgaggagattgatggtgagccatgtgaggaagaactgagagtagaaaggaatgtagctccgtgtgctgaagaagatgaggatgaagaagagtttgactaccacaatactcctcctaattctgatgatgaaggtgaagaggagacattggtgagatgtaagcgaggaagtggttaattaaagatgtaccaagtgtttgaaagcttagatgagttccaagaagctttattggactattatttaaagactggatataacattaagttaacaagatgggggaaagacaagaagtcagcagagtgtggagtagaagatgctgaacatccgtgtgattggaggatacattgctcgtacgaagagtaccttgaaagtggcacgtgaagacatttgagcatgaacactcttgcatataagatggaaataacaagattttgaaatcaagagtgattgcaaagttgttttttgatgatataaggactgatcctggcctcaagccgaggacaatagaagagaatatcttgagacctacaatctcattgcctcaatagacaagtgtagaaaaggaaaaaagaaagcattggacatcattcaaaaagagcatgaggagcagttttataggctcaaagactaccacacgtagctgtgacagtgattttatttttttgatgttgaatgtccagtttgagtcttacatatttccagcgatgtgattagtctatttttgtttgataggtcgaaccctggatctagtggagttaaacatagttttagatgatgaaagaacaaaactctttcacaagttttatgtttgttttgcaaacctaagaacccaatggagcacatggtgtcgtcctatatttggacttgatggatgctttctcaaaagcactcttaaaggacagttattggcagctgttggtagatatgcaaacaatggaatgtacccattttgtgctgtggtcgatgtagagaatgaagacaactggacttggttcatacagaagctgaatggtgattgtgtaaatctgcaagatggtcaggtatataccgtcatctcttatagacaaaaggtcagcgagtttacttttctcaagattgtaaaacatttttgctatcttctcatgatttctctgtttcattttcagggtttgttgaatgctatagagaggaaactaccaaaggttgaatataggatgtgtgctagacatatatatgggaatctgaagaagctt

SEQ ID NO: 225 - DNA, 89840 bp, Arabidopsis thaliana
gaattcatttcttgatgtcagatttgtttgatcttggacatgttctaagctattctgcttttccgatatttgttcaggggaacgcggttcagttatacttgccagattgaaaagggacttactccccgcgctctttaacggtgtcatgtattggcctctatgtgattttatcacattcagattcttccctgttcatttacaggtaatccttttgactcgccattcttgtgttcaagacacaaaacaaaaaagacaatccttttacgttctccattactttttgtgttcttgctgcttatctcaggatgcactcactctgctcttgcttttatttccatgcagcctcttgtaagcaactcattttcgtatgtatggactatctacatgacttacatggcaaaccgtgaaaaaccagtcgcaatttcaacctgaaacactcacatatcttctacatcgactcgggcaatgcctcccttagtgctcagttatcgccacatcaaactgcaatgagcattcttcaaaattattctgtactgtctgtagaattaggttgttacaatgtaagagcttggaagaacttctcatgtcagacatgtatatcacgaagtaatgaagttttgtttcctcttatttgtctaagttatgttctgcttcactgaaatgtaagaggaaagagtctatgcaactgctaaaactttcttttgctttcatggaaaatttgttacattagacgtgaggaaaaaatacagaaaaaagtaaagatatcacctaaacaaatggtatttaaactatattatatctatcagaacttgtacaatcccaagaacctttgtttcccattcaaagcttcctcaagaaatttctaattgcaattccactcaaatccaaaggaaagaatctcaggcaaaggaaccaaatctgtcaatcaaatatgataatcggtgtatcgctaaattacggcgttttttctacaactttactcttcagaagcacggcaacagatcttttctagctgtataggccattcctctccaagaacccggggattaacctccatggcggcatggaaatccaacatcgatacattagacaccgctcgcttttgttgacttgctaaactcaaacaaggctcgatcagccttctcatatatgcattcaacccacgattaagaagattagcagagtccatagataactttatcccttccatctccaatttcttctctaaccgagctctcaatgttatcatatcaggtaactccccgctgctttgacacgtctcacggttgataccattgtacgtactaaatctagctttgctcttaagatggaaagaaacaccgagtggagcggttaaggggcttctgctttgcacactcggactacccgtcatttgctcaacttcttctccatcttcaacagagacaacttccataggaagtctttgagcctttgacattgactcatcattcgtagtagtgagactttgaggcttcccaagtggaccaagaggactaggccggtctctaaacttcctcgacctgcatttcctcggcgaaggaggaaacacgggatccccgtaaagagatttcttcggatacctcggcggtggagacttagcaacacttgcattcttcagaatcgaacgtacaagacggttgtgtagagaaatgttctctctaccaaccgtcttgctacatagcttatcgaactcggacttgcttatcctcgaggtaaggaattttccgagctggtcgaagtaagtgtcagctctctgatgcccaattttctgataaattagggctttaatctcaagtgaattcaatctcgaaaaacattgatctgaccccatcttccaacaaatttacacctgaacttaatccaaatccagcttcattcaaagatccagcgaaactggtctcttctctcaattccaagacctaaaaaaccccaattcaaaatcaaagacatacattaattcttgagatcgaagtaagagaagaagaagttcaggtagataacctgagcgagctagagcaaatacgttgaacaaattgactaactaagaaagtaaaatcaaacataaatttctgaaagagtcggtgaagaatcgtaatttcggacaaattctaggaagaaggaagagagatttgagaagatccgaggtttataaagtattaagaagctttatcgaagaaacagtgaaatcaatcgaaattgacttgaggaaaacgaaacccagaaaggtaaatcgaagattgaaggatgaattaagagagtaagtacgtaccagtagaagaagcgattgatttagccgcgaaattgggttttgttgttgttgaagaagaagaagaagtgttttttcttcgctttgttttgtgccctaaagggattttttgtttttcctttttgtttatcgaaagtgttcgcttgtgttttgtgttttcgtacgtgcgaattgtgatgaccaaacaagagttgacggaagaaataaacctcgttaactcttttccgttagtagttcggacagtcacacacgtgcgaattttttttattttatttttcttgtttttcagttcttttcaatttcttaaatttttttaaaaatatgtttttaaaattagatgaatgtattacaaagagtaggatttaaaagtctcaaagtttaaaacaaaatatagagaggtactctccaatgccataaaaaaagataactaaataaataaatataaattttatgagagttttgagactaaagttagaaaacggtttgacatatgtaaaattccagttagtcgaaagatctcctacgaacagattaatagccgatatggtggttactatcaaaagatgaaatgacgttgatgaaaaaatcatagccataattagctccaacacgagaaaagaggtacatgaagtagtgcaaacaggggtagacccacactgattaaggagacagccgccaccactaactttttgattttattttaatttgaaggtaacttttatagaatttatattatatccctataagaaattcaaaaatttccctcatcttccaagtgagattactttcaaactctaaagctcatattactttattttgttagtagctcatttataggttttccaaattgaaatagattatttgactcccaattaaaactaaaaatttaatttagaatccaagtcttggtttgttctctcgtttcttcttatattttaaaagttaaaacaaaaatcgttgagtgaattatatatttttaataattattgtcgtattgtaaatgtaaaattttgaaggtttcagttttgattttagttttttatatcgatatcttgtctcgtttgctatattaaaaatgaattgtttaaatctatcattaaaaaatttgaaaaaaaattcaaaatgataagtgagcgtaagatgtatttgtaagatgttttggtgttttatttttgcatatgttttaatgtttccttatgaattttttatgttttatttaatattttaatgtgatttttttggttatatttttgtcctagtaaaaaaacattatagatctgttacggaatataaaggtcataaagcgggtgcttatggttccaagaaacatcttaatggctctcgatcttccttaggacaatctaaatctgcatgggagagtaggatccaggtcctagaagggttggcaattgggtggtgcttgaagtaaaaaaatatatggtacaacgcaaaattaattctaaaaacaaataagagaataaattcttcaaaatttttgaaagaaaaaagaaataggagaaactaaataacagtaaaattagatacccaaatcaaatagaaacatgagaatcaatttgttatgttttttttaaataaatatatataagtaggcaaaacttctaaaattacatgcgaagaccaaataacatgagaactatatataataaattacgcattaaaaaaataacgaacaatttaggtgtatagctataacataaatttgaagatattttctttgtacgtgattttttttccactgttcttttgatctaaagcaatatttgtaagaaagcaaataaatgtggttaaaccaagacaaattaataaaatcccaatgatcagcattataactttatatgcaacattagaagatatattaatttgataattttaacactaatagctctaatatcctactatattatttgggaagtacattttaaatataaccttattttttgtaagtaattacataggtataccattagaaataaaattttaaagagtaaattaattcatttctttaaaaattaaaaagtcaaatactaattaattaaatttaactcaaaaacgaaatacattattaatttccaaaaaagtaaccaattaaaatcaacaaattagatttgatatctaaattatcatattaattttttattaattcttatagttcacctctcatctttatatgattctatttttgtgaaaaaataatatcatcgttataaaaaaataattagagttttttcgcatatgccacaatttgaattatcatattagattttttaatgtgtatgatgtgattcaatttttaatacaaggtgaaaattcctagaattgacgggtttaaatcaatattaatacaagatggtatactacaggtgaaactataaaattaacaatcaaaatacaagtatataattttaaacactaaacaatataaataatatcaacaaaacatatacaactcgcagtttactatacatttaaaataaaataaaataatatcatatatttataatcaactttacaataaaagtttttagtttaagtaaaatataagcctacctgctgtataatgcaagttaaaattataaataagcagattaccatcacgatggatgtacctctcacatacacacctatcaaaaacttaaaacctttcaaaacctcttggtatattcaaattaggattcttcatttatggaatcattattccaagggttttgggatgtcttatgaaatgattttggcagaagaggatgtaaatttttttgaataaaaagtagtcagcaaaacatatgttttattgaaattttttagataattaaatcagagaatagggctgggcatatgagtaacccattcgagttcgggtagaacccattcgggtttgggattaatgggtatatgatttactacctaatagaataattctaaatattcggttcgggtcgggtccagttgggtttgggtcagtttggataaaaagtttcaggccctaaaaatagaaacgggtattttgtatgtagatagtgcgtctccaaacaaaaaaaacttttaaatttattaagttttaataaatttaattatatttgaatatattttactaaatttttacaaatataacaaataattttgacaaacatagcaaacataacaaagtatacaatttaatttatacaaaatattaatgtctataacacgggttatgatctagtaataatttaaaactttaacatttaggaattggtatagcacaagctgttaaaactttttgagcttttccagatgatacatattgagtaaatgatgggattttaagataaccacacaaacacgacaattgttctttcagttttccacaacattgcacagatggttggcttccggcttccaccgccggcagacatactcgaagatctgttactatgcacaccactttctcctcctcctcgactctaaccaccactgctttggtcggagccaaagacgacaaaacaaaagcgatgaatactaatgtaattaacttcatgtcttatagctttagagacttctttgattctattataatttttatttatttttctttaaaactgtttgcgatttgattttgaagtgtttaaggttcataaagctatatatatagatggagtagtgttagaaatatacaagtgaaaatattcaaagattgattataaataaaatgatttggaaagtaaataaacaattagaagaaatatatctatttagctatacaatattaaagtgtagtcaaagttagaaggattcaaatttggatatttaaatggactatatataattagaaaattgatgtaatctatttttttagtgaataacatataatgagttagaatccgaatagtgacatagtcttgccgacaacataaatcaatattctgatttcttgcgatatgcagttttttttcactgtatgatatatatatatatatttaaaaataaacggtaaattaacggatagttaaaaataatacgtattgaattttaaagttaattaactgttatagttaccataactaaaatattttctagttactggttacagttttttactatcttgtatggttagagttttagtatggtccaaaatacggttagaatatgattatggccacgtccaactagatcaacttgcaaagttggtattttattttgttttttgtaacaacattttgatactacgcactacaaaaaaaagatcatattaaatcacttaaattgtatcacaaaattaaatgatattattttaaatcatttatttataactgaagtaaatatatatgtcttagcatcaattagactaaatgatgttataattatttgtttggcatcgattaaataaaattgattcaatttttatcagtttgtatcatttaagtttaattgatataaaatttatgattttcatcatttggataactgatgtatttcttaatttttggtaagatcattttttaaatgattcaaaatttatatcaatataaactgatgttaaaattattaatataaataacaataataaaaaaaagaaaagaaagaagtagtgtagaagaagactacatacgacctagctgctagcttatttgttcttcttctggttttagacaaaaattagattgataatcattacacggaagttttgtgcaaattgtggcatctattcgcgaatcatagaatcaattatatatttattcaggtcaattgtggcttgataatcgtctcttctaatcctagatttttcaattgaatggtttattatttattcaggtcaattattggaattctttaatcatagaatcacaattcacaattaagttttttcttcacatcacacgttcatacatttacttttaattagatttcaactaaaagcagaataaacgatggagatcatgatcatggtagatagatttatttttaaattcttaaggttttgaaattttagtgtttatatgtcaaattctaaagcttacaaatacaaatctttttgcttttaagattttgatggatagatcatggataaacaaactatgtttatctcaagattacatattgggggtgaaaattttattggattttgcatttggttaatccatgttaccgttgttgtctcctcaaaactaattcaagagaagatattaatggtgatttgatgtgttatggatttttaaattcttacacaaattgagtaatacatggagaggatatatgtgtcacgagtaatacaaaagtaccgccttctgatattgcttcagttgaattagattcaactaggactctcttggatgatatttttcttgatattagtacaaataatgatggtggatatgaagctggatcatctgagaaccctatagacactgatagaccatcaactgcaagtggaagttgtgaaaaaggagaagattttgatgagttacttgctgattttaatctagagctatatacaggatgcactaagttcacgaagatgtcctttatattgaagttgtaccatatcaaatgtatgcagaggcggacataccttggcaggaggtggggcatgtgccccacactaatcgataaaaaacttaacatttaagcttaccatttggattcttttagttcatttggcacttagtgcctcattcaaagccttatgtaaacgagttcgacgtctctccttacactttctttttgcttttatttcttcttttacattttattttttataaataaaatgtgttcacttttttggtaactttctataattacatgttttaattctcctttatcattagctgcatttcttttatttattttattatttttcttatatgaaactattttctttcagttatatttatctttctaattaaattaaacttttaacaaattttaaatcatcaatttctactgtaatgtatatttttattaatagtttacattttctatcatgagttgtaacaatacttttctaattaacaaattttttaaaaataaataaataaatatacatatttatatatattaaacatatccaataatatatgtacctaagtatatttaaatgcattttgatttagtgtctttagatttcaaagttaaacacattaagggtaaatatcatatttatttaatattttattattatataaataatatttttaaatataatatgtgccccatataaatttggtttctagatccgccactgaatgtatgtgtggaattagcgacaagggaatatctatggtacttgatttactgaaagaagcttttacacatgcgagattgccaggttcatttaatgacatgaaaaagttgttcgcaaattaggattgacttctgagtcaattcatgcatgtccaaatgattgcatgttattttgggaggctgatgcgggaagagaaatatgcaaagtttgtaaagcttcccgctggaaagaaacaacttcagtaaagagtacaagaactgaaactggatcagagaaaataaagagtagagctcttgcaaaggttttgcgttattttcctctaaagtcccgacttcaacatttattcatgtcatcaaaaactgctacccatatgaaatgtcacgcaacttctagtaacaatgctgggaagcttcgacaaactaatgttatatagtaatttgtaagttcaattacattattataattttatatatagagagacaaatactaatgttcaaacaaaatattcagccaagtgcatgggctgcaaattttcaagcagcttttgcaaacatcccaaatctagcatttgtaaacattccaaatctgcctaatcctcaggtaaagagtatttacatattaatttcatatatactaaatatttagataattaacttatacattgaataattttttctcaagaaagggatggtggtgctagctagctagtggataaacgtttaagctagaattgaagcaatgctagttattatgattaaagtttgtttagcaaaattttttagttacttttaatttatttatgtttatgcatttgcacagaagggattgattatgtagtttgttttcagttttttttttattattattaattatatttgtctttttgtttttcattaattaaaatttgttggattaaaaaaaataaaaaactaaaagtcgttagttattattttcactagcttcactttataaatgatgtgaaattattttaatacatatttttatcaattaaaaaagataatcttttcatcgatttttaaaaatgattctacaactaaaatcagttttgaaaattgacataaataaaatatcaatttcgtagaagtgatgtcatgttttaaatcaattattataaatgattcatgtactaaaatcgtttacctgacatgatacaacaattaatatcagttatgaaaattaacactagcattagtatcatttatttgtaagtgatataaatattgacatcaattagtataactattacaaatactaacatcgcttaggcaaagtgatgtacataataccatcgtttatagaaatgatgtaaatatcacatcagtttttataaccgttacaaatactaacatcgtttaagcaaagtgatgtaaataataccatcacttatacgaaatgatgtaaatatcacatcagtttttataaccgactcaaaataaacatcaattataacaagcgatgcaaatattatgtgaatttgcattagttgttaataaatcgatgtaaattatttgcatcaacaagataggaatcatttatttaactgatataaaattcttttacatcaattataagtaatacaaatattcaaaataagtgatttaaaatgatttttttgtagtgtactaaagttgttttacctttgtggatcaataaaaaaatcaaaattaatattaactaaaaaaaatattatgatagtatgattgtaggatatgcaaaattattttcaattatttctgcggtataaacatatattgacatgcaaaattcctctaaccattacaatggtaaactaacaaaaaatattacttgctttaagatcaacatatctacccacatattattcccaacgaaaacaagattaacaaataatctggagcaaactataaaatcaccaaattgaattcacttgcatataaagaaagatcaatagttctacacaatggaaaacttaaagcttaaaaggaagatcatacattcattcattaaaacatggatagatagatgtaaagcttaaaaggaatatcatacattcattcattaaaacatggatagataaataagattgatagatgaaggcctaattggtagctctcccaaaaagcctcaccacgagctggaggctggagccatctttgatgaaatagtccccaggactgctgcatcgtccgcaatcatcttctttgcgaagtgaagcatctgctgctcagccaagaccaagatcctcctgctttctcctctaaaacagccttcaaatcctggactgtgtttccctcacctagggtatggattgtcacagttttccctcctaaccgtttcacaaaaatctgcatggctacgaacataaaaacacaccataatcaaatcatataagcaaaggaaaacaaatacataaataatgatatgcatataaataatttctattctactgattcaaaagaatttaggaaaaattagtgagttagaaagtattgtgagctgtgcgttagagagaaagagagatgtaagtttatatagaagtatttggggacgcggatgactctctcgcattaatgatgcattttatgatgtatctctcacacacacaacttgtcaaactaatgcatgtgtgcttaatttagcaaaacaaaatcactctcttgttaaagtatatattagacttatatcctcttgtttaatacaaaaccatcctaatgcacaatgacaaacaaataaaatcacaaataataatgcaaaaaagattaccaaaaatggttttcatcagaaacagaactcatcactctcagtttccaccttaccatgcaagacaccttttgcaacaatacatttttctcttggccatttaaaaaaaatatccattttcttgaacaaaatgaccaaattactcattttctaatgagaacatgtaattaaaaacttatatttttatgccaaaaattatttttctcggcaaaaaaaaatatttccgccaaaacattttttattgccaaaacttgttttctccgccaaaaaatattagaaatccttgtaaattatcttaaaaccttttaaaatccttatgaactctttaaatacatatgtaaatactttaaaactcttttaaaaacctttgtaagtattttaaaatccttgtaagtttttttaaatacaatggttttaaaaaatttataagagtttttaaaagatttacaaaggttataaagtctttaaaaacattagtaaatcattttttcactctacaaaaaaaaattgtaattattttaaaacatttgaaactttttttgaactattttaaaactcttgtgaacccttacataaggttttcaaaatatttacaagaggttttaaagggttgtaaaacccttttaatcctttaaaagttttttaaatatctttataaatcctttaaaatccttataaacctttaaaaatctgttaaaaacccttataaaccctttaaaaaatctttattaaacctttgtaaatttatttcccgccaaaagcatttttttgtgagagaaatgtttttgaaaaaaagatttggcagaatttttttttcattattcttttggcaggagaaatatcttcgaaataatttaggggggaaaatcaatatttcattttgttaagctaaaacattttcaaaataggggtaaaatagtcattaaaagttaaaagacggtataaatgaaaatgacctaaatgaaatggcataattaaaaggatagtcttggaagggtattattagcaacttctctttgcgtaatcataggactcttcatgttacaaaaagaggttgcaaatcaaaacggatacatacatctatataatatgccaaaaaataaagtgtttgatattattaaatactagataaggacccgtctcatggacgagtttacttttttataaattaaaatcgaatataacaaaaaattaatcaacaacatttgtaagtagaaattttcttcaaaagtaaaaacaatattttctttttcacagttgcattgtttctttaaccactaaagttattgattcaaaattatttcgaataaaagatatatcacatagtaataattcatcgtatacttatatgaaaaactaaaattaaatatattcattataaagttggcgaatgaaaccaaaatagtgatttttaattagacacgttaaaaatatataaacatgataaatcgactaaatcccttagtcttccaagctaacgttatgggcttgatttctatatactcgtttgcaatgactatgatcaatcaataaaaaactgataaattcaaaaattataaacacgatgatatatgaatcttatataattcaaatataaacatagaaatttaaataaacaattttgaaatagtataattaaattcaaaatatcacaagcaaagaagaagcatatgtggttattacatattcatgaatttcaaataaacaatacaaattttacttaaaatcatcacatatttctaattagaaaataaaattgatataaattatataaatttgtaatttaatcatgacacatatcgctatctaaaatcattagaactatgatatattattaattttatataatttaaactgaacgtagaaaccaaaataaataatttaaagataaaacagtttaactaaaaataaaaaattataaacatggaacctttgataatttaaatatgaaaagaaaaattgaaataaacaatctaacaatactaccatcataaacaaggagaaacaaaaaagacagttaagtaaaacaaatattacaaaaaggaaagaaaaattaatttctcgtatttctaaaaaaataaactcaagtaattaatatgagaattatcgtaattaaatcatcacatatttataattggaaaggaaattgagattaataatatcaaaatttaaattaaatcatgacacatgataaaatctttgacaggttcatgatactattaattactaattttgagaaacaaaaatatgtaatattagttatataataacatatgcttcctttttaagaaaatatgcctgatttttttcttttttaattgaatatatattttaattataaaaaatatataatttccttataattatcttttaacatttttgaattgtttatagaaatattaattatttataattattcttataattatcttttatattgtttaaattatttaaatttataattacttacaattatcttcttcctttttttaaaaggaaatgtctgatttacacatttcaaaatctaagatcgatagatttgccacgtgtcatgagcctttgagttactaactttaaaaaccatactttatataataagatatcttcattttttatttagatgagtataagtttacatgtaagttaataaactaaaagtatgaaaacagtagtttatcaaaaacatatattttgatttttggttgtaggaactctcacttgtgtagttacagctttattaattactaggatacgacccgcggtacaccgcatgttaatgttttgtaaataaatattttaaaactttaagttgtatctttgataatatttttttttgtttagtgtataaaattgtataatcggattttgattgtttattttaagattttatccgtggtataccgccttgtatttatgctgactcaaacccgtcccaccatataaccttgtcccatgaatttaaacataattttgttatttttatttttaatagtatttttattttacatataatttgagtcaatataaaattttgctttcaaatgttttttatcatataaaaatttattttgtctagagttcaaatattattaatattataaatgttttatagaatctaagtgttatagataccaacttattaagcggtacaccgtaggttgattcatttccttttattttattagttataaatttatgattttgtaaactataaagtatatgatatttaataagatgtagctcttatagtcaaattatcgtattatttggcatttatatagctaaataaatatgtgactaagattcatgttattaagttactatcataaagttcaaaattaagtttatataaattgtaaaataacttaaagtgcctgcaaacaaaaaatgtggtatatgatttaacccgtggtgtaaaataaaatgaaatttgaaaactatataaaatcataaactaaaacaaaaaaaaaagttatttgggagaatctagtaataaaaagttatatgggagatttggatatagaggacctttttatttcaatttgcctttaatcataaactaaaataaaatgaaattacaaaattatagttttctcttcactttttgtgtgccaaaacctctaaaaagaaaagatcctttatagaagcattattattttttcccagggaaaaatcgaaataaaaaaggttttgttcctctttctctccgccgatggttgcgcaagagtaatcttccctctgctcggcgtttctccttttctcggcgttagcgtcggcttaaacagtagcaattaatgtactcgctgattccatttttcaatgatacactaataacaattatctgtatagcttttttaattttcagaagcctgatttttgtgttctcaaccatgcgagtgatcgaggctgaaagtaaaacgaaagaaataaacaatctttttacatgtaactgatttatcagtgtaatccacttctctggtgtgctcatcaaatacaacatttccaaaactgcaatgagatgagaaccgtattgttatatcactcatttaatgttttttctttctcaaaaacaattccaacatattgtctttacttgttccaaacttgatggcgttccatattctccctcgaaagatcaacacactttgcatagcatccaccctcaatgttcgaaacaccagtctcagtccaacaatgctcatcatctccaataagatacatgttgtgatcagtcccggtacctataacattcataaagaaagaaagaaaaaagtcatgaatctcaattcacacactcatttcaacaaagaaccaagcagttgtcaagccaagtaggtggtatttgtgatgtatcatttgaattctatttccttccatcatcaacaaacaccatctttggtgatgagactacaatacgtgaaagtccaaagaagagggcaatatctccatcttttcccatattgcatccagaatgaagggagagaatggtaggctttaaggtaatgcataacactcattgctactgtttaagccgaacttttgacattgtgacttacatgttgtgcataaacaatgaatggtaggctctaggtgagacaatcttgactttgattatgttctccggatctcagtttaagtattgatcattgacaaagacctaaaaaccccaacaacaacagaaatttcataaacttatatcaaacgttctacactcaaaaacattgattaaagttttcaaattttaaaccttttccaagaaattcaagtaatcaacagctctttctctgttcaccatgaaagtatgttcatccatttcaataatgggcgaacccttacaatcaaaatcaaaaaaccaaaacaaaggataaaaactccatcaatcaaaatcgagataagaattaagaatactcactttccccaccaaagctcatacacagtagccgcaactttaacaatacgcttgtctgtcggagatgaccagtcttagcacccgaaagcgtcgccaaagctccattagaagtaataaacgaacctttctcatacttaatagcttgctcataaagctctacaaaaaaaaaaaatacaaactcaatctattaaattcgtcgcacaaacactgataaatattctgtatagcaaaacatctctagaggtatgcataagaaataccttgctatatgagaattttgagagatcatttagtctgaggcaaattgttgttgtggtaattgttcgatatgagatggttatttatagagcagagtctaaggttttggtttgcatcggtttgacagtttgagaatatcttggagagcaagtagaaaaatcatagatacgaatcaaaaattagaataatactcacatgtttaaggggaagattgtgaatcattatataaccataaaagtatttttgttaacacatttacgttagaatgttcaagatattttggtatctgaacaaaatatcttgagaatatatgcatgttgttagtttacaaatttaaacaaaatcaatacgcaattgttaatgtggttccttttttgtagggaaatcttgccaaaagatatattaataacgattgacgaaaattaaagaaagtttgaactcaagatttgcgatttatcaaagagatttgttttggaaagtatcaaattattagaatccgaaggactaatttccgggtcaaaaacttttaaaaaaacccgacccgattggattccttaaaatgtacttcaaaaatgttaagtagatgatgcaagcacggatctttgctgcattctgggtaaatgagaccgtcacgtgtgtatcgccttcgatttctttgacgcaaatcttaatccttgcatcattaagaccgtcacgtgtgtatctaaaataacaaaaaactctgtttctttacaaggactttccgacgctaccggtagtcgatttccagaggaaaatgggagtttagtatataaaaataaggttgcagagacgcagattctaattctggtttgacttcaaattaagagagacactactcaacagcccacaaaacattgaacatcaaagcatccataaaatgcgttttcgtctaccaaaaacaatagctacaactaaaacatgtcgactgaaccagaagcagagagacaaagaactttagaccagtcacaaaacaaggaaaccgacacaaagaaccgatgtgtaacgctctaacaaatcaaccgcagcccacaattctcaaaatcagctcgtaaataacattttctagtcgtccaaaagggtatccaccagggcaaattgatttggataaagcaggaatgtatgatatatgttgtggcagctttattcccctgtctgatacgatattacctcatcgctgctcctcatcgggtagttcttgaccaattgcctgtagtgcgagtctgtagtataaaatccccattgttgccatacacgctctgcacattggtcacatagatttaggccatggataatactgattgattctgcaccaaacatttgacatataacgagcagcagaagaaagagttacactgtaaacaaggtcttacatgagagctatgaaaattagtatcttccttatatccatttttgatgatcgttgatgccttacacgaccttcagaaccatcatctgcctttgctgcatccttacgaggtggtgctgtcacgggtagagttggtaatgcactagaccagaaaggtagtaaagctcgtagaaacttgtgacgaagaggaccttacatgaaaaaaaaaatgagaatcagtcaaagtcatcgcgacaatgctatagattcatacaaaagtggagtttgtctaatggaaggcagacacatgcatctcagaaaacaaaaacaataagaggaaaggagaagcacaactctagcgtaagtcttgtagtaaagcaaaaaacagacaagagaggtaagaacgataaggtttttctcccacctcttcttgagtactttttacgattgccgtcttcatcgtctgcataatatagagtctcggagttctgcctgtctacagcgggtactcctttccgtgcagcagcagcagcaagctatatacgacagcaacaaatagataaaactgtgacaactcataaaggaaaacagaaactgtacgtagtttttgtgaaaacaccaagtttttaagagaatatcttactccagggcttgagcttttcatgtaactcccagcagaagcaggaacatctatctcaactatctctgaaaccgcagatttggaatattctccatttccagctactgaataaccatcaggaaggttattcccttcttgtgtatgagaagatgatgatatattaattaatgcatccgaagcaaatgccggtggtgggctacgagattcggtggatcgagaaactggatggttcccaagtaaattcttctcaagaccagtctgccatatagagaacagagaattaaaatccaactaaaccagtgatcctttcaggctgtgtgacaatacaaacaatcggatactgccaaatctctgcaaattttctatgctctcactgagagatgtctaaggtgggggtaacaattgaaaatgtaatacttttaagattgtaacttcaaaaagaaatttggataatctacaaacaattgaactaacagatgaaactaacctgcgtaattacttcccttaacagagcatgaagccgagatcctgcatcttttaccatcataggaggccatatctgcatttaatgatcatatgagaagtgagaactatattgcggcactcttccaagcacgaaacaacacttcaaagtaaagtaaaaccaggctatacaaaatgtttttcaagtaaaacataaggacaaagaggaatggaatacaatcgggatggctattagctcaaaccctggtgaaccaaaataatctagatagctacctccagtatattacatcacagagggaagtattacacaccaaaacagctaaaaatcatccgaaatttgatagaaaagagtcaatagaacatgaatcatcaatcattaaatactctaattttagttacttccccaagatttatctgtctaggtgtaattttgattgctaggctttcatctgctacattacaaacacgggttgctactgacttgaagaagctaactgaaccagaaaatcatgtacaactacagccgaacaatcaaaccatacaaaattgcctaaaacgttaggtccaaaacaaaacacccaaatcttcataaaaaagcacccggtctccacatgcaaatagtctttatcatgtttctatggccagaaagtaagaacaacactgatgaagtgctcaatattatcatagagaaacacaggaaatcacaccaactcaaatatttttctaaatctatgtatcaatattagacaccaaaaaagagctccagccaatacaagtacacacggaaaacaatgcgatagaaacatgaagaacacaaaaggaagtttactaataaatatatatgaatcaataacgcttacaggtgtgctacatgctgggcacacataaccagcaggtgcagtatgaggaggaaaactcttgataagcgaaaccaggcagcttgtatgtatagcatctgatacaaatagagggtaaaaaatgttccattaatttaattatcaaaattcagaaataaaaatccaatccaacaatggtaagagtcagacaacatacgcaagcaacctaaccgagtgacttgatgacctgccccctcatcaaatgttgcttggcattgacaacactttggctgatcatactctccatctatcacccattctgaatacgtccggacctattgattaccacatgataaaaacatatttctatcattgtcccaccttgtctaccatataaagtagcaaaaagaaaacgagaaattctgaacattgttcaacttataatgaaggaaaaaaactgcagaaagattataaaatagaacaaaatgtatatgccccatgaaatagatcttgccgccactaatatttatctcgcgtctgttatgatggagcactgtgaaaacatcagtaaatcatatttttcgaagtattaagttgttgagagtgtcaattatatctaaccacttggggaccgtaaatctagatcatccattacaaatgaacaaacataacaatcaataactaaacaaaaccaaatgcttctgttcccataagcagcaatctgtccaacagttagatatcttccacacaacttttcaatttctaatccaaacaacaagagactaattcctcgataaaactatcagttcgcggtaacaacaagaaaatgaattgatcaaacataccacacaagtttgatgctccgggaaacaaatgcattcgccgcaaacaggggccttgtgaacaaagcaatacagcctggtagcctagcaaaaacaagagcaatggcaacattagcattcacaagacgagctttgcaaacaaccaaatcgttataattctcccctaatccagatcaaaatacgtcaaatcaggggaaaacaagatacatacatgcaaacaaatcgaaaattacttcaattgaaagaaaaactcagctgcaagatcagaaatcacgaacactttgatttgacaagaaaaatctccaacagatcatcaaatggtacaattgaaatcggtaaacgagtgacataaatagagattatgaacatacctttttgcatttgcagaccaccattgcgaaacgacaagatcagaattgataagccagagttagatcgaatcaagcttagggtctcggctggattatggatcacacagaagaaattgagatcaaatttatggaaaaactgagctcgttggagacattgggatattcatagatcagatcagagactaagaagaaatcgacgaatcaaacaattgaatccgaaaattggaaacccagatttgaagatcaaggaatcgaaagagagtgacgatgcgaaagagagaacgtaccaaagcagaagaagccgcgaaccgatttttccctttgctggttcctgaagcttttttttttctttatgcaaatctttttttgggtacaaatctttttttttagtgccctataaatatgaatatgatattacattcactttctttttgttttaagacaagaatcaaattgttacaagaatggtataattttcttataaaaagtgaatatcgaaattagcgaaatataataggaataaggtttatattatgtttctctgtaatttattggcataatgacggtgaattcgatatgaaaaatatgtatatcagtttttatttttattttgtaggcaaatttatttttgaggattttacatcaaactttaaatttatttgttttttgttttttttttcacaaaacaacaacatcatttattgattaaacgttaaatagttttatgtatacaacatttaatacatgaaaaaataaaaaatatcattaaaattttcaactaattgtaaatattgatttaaatcctcggctctcgactaaacgaaagaaatatcaaacttatgttgactttccaaatatatatccaacttttgttaaccttgctatattagacaaattgttaagtagattaatagatcttgttaacgaagttaattttttgttaacagacatccgttaattcaaaacattatcattttcaacaacagagtgatgtcgttttgttgtaatgactgaactgaattcccaaattcaatctcagtccctaaattgagcaaaattcagaacactaaatctccatatgatttgaaacaagagatttaattgaaccagtatgacaaaacgacgacgtttaattgttagagaaacattgtcgttttcaattaacgagttttttaacacaataagttaagtatttatttggaaagtcaacataaatttgatatttatttcgtcttgaagatttaaatcaacgttttaaataaattaaagattttaatgatattttttccagaaaaaaatgtgtgcatcactgttttttttttttttttatgtggactgaatcacatattataacaagaaatcaatggatcctactttaaatgtttttttctcgataaaaaatactttaaatgttaatgtgaaagaatgagagtaaacaaatcatcatgaacgcatatgcttttgtttttgttgttgttgtttcctaagagcagtgaagtgagcaacaatctgatcataatcgggaagcttaggatgaacatgcatagcttttttgaaacttctttctccttcttcgctttccttttgatccggcaacattgtaaacacgttgtacactatatggtaacaacatttaccacactctttcctttgacgacttctctttcccttgtaatagtacctccaacaatccacgtctttcgcgataggactgcttgatgatgaagttgatcttggtttcctccttaacctctttctctcttttctctcatcttcagtactctctctaaatctgaatacactctgatcttcttccaccacttcttcctctatgcaatcatcttcctcatcacatacttttctttcttgttcttggttttcctctatatccgcatccgtgagagtaaacttatacacttctgcttcactctcagccttttgtgatgaacagtacggctgagcagaattggaactcatgacttctttctcttcttctgccttctcgctttttagtacctacacacatcaacaagtagcattttacatactttcataacttcaagaagcaaataagattacttatataatgatgcaaagagtcacctgtttgtgaaattcgggagtgtattcgattgccaacacctctagacgaaggttatactcttccactatttcacctaatagtttggacttggcatcatccgatactgagattatggagagtttctctataacctatatttgagtatatatatgctctgttaggtcaaagatgtactctttcttgaaccttaagcaagtctaaacaagatttgaagttacttgaatcataagaaacaaaactctaaatgaaacaaaatcaagaaatgaaagagatagagatgtgaaatgtgagattgatcgacgaacctgagggttgacacaattaccaggcagaagattaagagccgtgtccacaaagtgattcccataacgcttgccaaaaagtacccttaaggctcgtagctcaggcaagtctccacatctcgcagaggcaaagacaagtgttgaaacagcttcattgatgccatcaggaaggtctctacgtctccggatgtaagagaggttgagaaggattatgtcggagaagtgaagcaacaagtggtagagagacattagattctcatcaaggaagagttgttgagcacgatgaagagcacggtctcgttcaccaatacgtagtaactgagctatgtcgttacgtaaatgtgaagaaatagcgtatttcttgttcttgagtaggtttagacgacactgaagctgtttgaccacactcttacacttggaggttcttcgccatccgaataaaaaacaaaacattgtatcgtgttctgttcgtttgtatctgaaacttcaaagatgaatttgctcataatgagtgaaaacagaggatttgagagtttgtaggagtaagtggggtttgatcatgattgtggggaagtgggcacttgacggttattattatcttttattttatcaaaagtataaaaaatgtttatgacattatattaaataattgcatcgagttagttttttcaattaaaataagtttataagatttagtaattattatcaaataattttgtaaatttatctaaaactttgcttttaagtttatttttttgggcatttaactttaatgaaattataatttaactcttgataatattggttcgtgagatgatatgtaatatagtgatttagaaacttaataaatctcattggaacctaaaaaaaaacaaaaacaaagaactcaatgtaccaaactttcttcactaacacatctagagagacagataggtacagaaaaagagagctctttggtgttatcaaagttggggtaaaggaggagcctcgccaaatttaagaatgtaagcagcttggtgaattggtctcagctgcaaaatgatctgagcatcaagatacgcttcacagcagaagcaccataccgacaagtcactgttacatatatcaacctcagtcaccattaactaataagaaagaaagagctgagcatatctaatgggaaatatgtatgtacctatagcttagtgcaaggcagtgaccggtttgttgatgatgcatcagcatatgcctattcacgaaacggctgcatagaacctctttacaacaaaggcataaccagttctctaccgggttttggcaccttattatacacattagaaagaaagataattccattaacacaacaatgatctctaaatcaatacactgtcaacaaaacaatcacaatagccagtggcatggtgcatgagattgtttccttagaattcagaatcactaaaccctcctttcagcatatgtattaaacaagcccatatctattcatatgttcaacttcaacaaaaatcacaaaacggaagagtcaatccacagattttagccttgacttcagagagacaaactcacaaaagaggaactgattcaaagttaagttatgtctcaacagttaataactgagtcaatacaataatgatttcaaaatcaagatactctcaatggcacaaagtatcttaaaattcaacaaaaatcacaaagggtcatacattttcagcctagaactgcagagacacagagacacaactttattttagttgtgtgcaatgaccctaactcagtgctcatagatttgattccatgtaatatgcaattcaatatcactgtatcacactatacttgttcaggctacaattcaaatgcatcattctaaaacaatgatatcaaaatcaacaaagctctggtgccaatacttgagattggttctttaaaattcataatcactaaacaaaaatcacaaagctacaagagtccaataacatgagatcttaaagaaactcgaattgagacctagaaatcaaaattactagacgtgattcttgcaaaccaaaccatcgaatcaagagtctcaattacctagaacaaggagtatcaggagttggtaagtgaagtaaatcgggagataaagtgttcaagtgatcgcaagttttacgagcttcgacccaacccgacccggctccgagtatccagtcttgtgtttcatctgcaacttctttctgaggcagagatttggtttagaaaatagtgacagagacgggagacgatatcggtaaagagagtacggttatgaatttaccggcggagaagaggaggaggaggaggacggtgctttttccgccatggatattgaagcgtcgccgagaaaactcctaaacgcagcgtttagttagaaaccgaatgatctctggttgcgttttgactttttgactaacctattattatttttatacaagtagtggagattttacgaaattggtaaaagtttattaaattaagactactatataagaattcattttttttgaaaaaattcctaacaaattcatattttcaaaataaaaatttttggaaccaactaaatttcaagtttttttttttgaaaagtgaaacttgtaaagaaattatccctattcgatataaaactcctttttgaatatcaacaaaaacatatccgtcttccaaaccatcgttttgaacattgcatttttttagatcaaagactctatattttattaagtttgttcgaacatgagacagctactccggaacctaaaagcttaaatatgtaaatgcttatttttgctcgaactctttttgcaaagctatcgacacggacattattaatacgaagaataagacgaatcgaagaaattagagaaaaacgatcgaagagcatgataagattcaaaaattccctagcaaaaatttagggcatgaatcaaattctactaattgaaggcgggccaataatcttcagcctcaatgattctcaattatgatatgtgattcaactttagcataatgttacaatgaattttcgaaaaaagatcagatgagatagaaattgatcttctaatttgttctaaaattggcagattgaagttgtgatacactaagaatcaataaacgacgtagttttgtttaaaaagattctcacctcgtcgataacctcgccaccgtgtcgtttgagtcatcgatttttaccatttgactaacattgttgaagttaatgttggtttcgactcaaaacatagagtctgaatagtaactttgaatttttgatcaattgaaatcgaaaagcactttctctaggtaaaaaagtaccatgcgaaatgttgaggttgaaatactacatttttccaagaaggataatgatacatttgctcatttttcctctataactaaatatatcttgtaataaagttctgtgtatcatcaaacagaccaaaagaacaaagtcaaagaaattacagttgattcatataacctgacgtaaagttgaaaaataacctaagtaaaacctttaacttaaaacatgtttgggaaaaaaaggaaaattgttcatcaagaaacagataccctcctagtcaagtttctcgaaggcgtagcggttttcgctgtttcttcagccgcattcatagatccaagactttccgatgaatccgacccaccgcctcctcctccattgttcttctctcctcctcctttactctgcaactgtaccttcttcccaaatatcttctttgacattatcaagcttcttattttgcttatcgccgtgactcctgctctgtccatgctcttcctcccactttcttcctgcagcttcagcgccgctatctcgctcttcaatgctctcatctcctcttccgttgcaaccgcttcccattcgtcttccataactgttggcactgatcttgagctcccataggtaccgcagctgcgtagctcccttcccatacctctaggcaagtcaggtgtgctgcttccagatgaagcagctgctctaacttgctcaaagaagagtacttggaccactactcttaacggaagcctgtcgttttgcacagcatgcatacacgcttctaccgagagttttcgacaatccataagtttgcacattcttttcttttctccctttgtgattcctggatgttcctgtgtttataatccattatcaagaaacaaaactcgactacaaagaacacgcgaaaaacagagttttcggttatgtttagtaccttcaaaaacatgtcaatagcgcggtagagtgcatcatgtgctggtctggggatgctagtaacactctcagcaacatcaatgaacttagatgcaggaagatttggatcttttgcaatttcagtaaggtaactatctataacttttgccaccatcagctttgaagcttcagacaaaatccctggtaatttccttacctcttgaacttcgaacccatcttcatcatcttgaacctctatctcactgtttttatctcttctcatgaactccataactatcttctgcactaagtccacatcgtacaatgtttcgcttccttgatgcgattttatcaagagttcagccatagaagcttcctccagttgctgtcctattcttcttacaagttgttccttaaccacctctccagagttcaccatagtcactgcttttaacagtttaagcaagaaaccacacgagacgctgtttttctcagctggtagtaaccaaacaagtgtctcaatgattgtcttatgcttcaccaaatctccttgctccatcactcccttgttaaaacctgataatcttctatagccataagctttcaaagcttctccaatgacctctccaccaagtatacatttggttttgatgttcattataacccttttgtaataatcaatctctagttcgcacaaatcctccacccaccaatcatgtggaacatctcgagccttgattgaatccgccccgttgttttcttcagctagtttctttttgttgtaagtatatgaccactcgacgtgagaaacatcaacacaggccttagttgctatagcatcaatgcaaaggctaacaagtttgagatcctcagagagcggtaagaacggtttggtggtctgaagaacaatgatggagtctttccagctacggaagagacttgagcttaggaacacatcaatcttgtagatgagattacctttttcgacagtctcatgcattcctagatactcagctgcacatctggtagccacaacgttgtaggcacttagtgttactgtcataccgtaacagaatttggcacatgtctcgaatgcagttggaccaccgggaataccagagatatcgatatcatcgatattattcttgtccgtgcttgagagcaacttttgcaggcatgcacacttggaaagaagaggaaactgcagaggataaaacaaagaatcatcatgtctcaagcaaaactcagacatctaaatttgatgcttgcaaaactgatgtatgaccaagcaaagtcttatatccgcgtaactagacactacgattgccagatgcaccacgagtgatcgaatcccaagtaaacagatgtgcataagaacttggagacaaattgtacataccttatgcagacaaaatcttgatccctcaacatcgacactaatgtcactagccagttcattttctacatacctgcatgagataaaaacaacatcaataagaatattctgtttctaggcacaaaagtgcaagcacttgtatactcaagacaagctttgaaggtaaaaggaaatcataatgaaacatagatcatagtctctcgcatcaagattcaatttcatagatctctcaaaagaagagaggaacctcagaaaacaaaagcattaaaccaacagatgcaacaaaacagaacaagaaaaaacatgatcaagatcagctattacctgacattgttcccatcagttttaaacgaatctagcttcgaaccaattttcatgaacttcatcttcttccccctaggataactcttagatcaatgacttgcaagaccaagaaaaaaagcctcaaaggatcacaactctcaacttcttccaaattagtctaaccatataaccaaaaaccattcccttaaatagaaagaaagtgaagaggttccaagaactgagggtggggaccaaattgatacaactaacttaacttcctcccttggagatctaaaagcacaaacacagagaagaaccaaaagaaagaaaacaaaaccctcaaatacagagaaaactgactctaaaaccaattagattagcaacttttctttcctctttattaaattgttaacttgtagaataatcaaatcataaaaggttctcttttcaatggaaaagccaatcagagaagcaaaatgcttccttatagactaacaaaatgccgtgaaccacggcgatacacagcattcgaaggggacaataccgtagcgaaaaatgtcttcaagagcacaaaatcgaatcaagatccaccacacttaatcacacttgttgtaagtgtattctaataagtataattaatgtaatgcagcttaagatgagattaaaaaaatggattaacatgtattgtgactatgttgtgtttgttcaagtcttcaagttccaactatgaagcacatgtttgtggtattagtttattgaaccgtagaagtttgggaacctgcaaaattaaaaataaaacagcatcttggtatcagtagaagataaccaccacaacggtagacaagaagcatctttctttgttttttttaacctttaatttttatttgttatcttggcaattaaagaataattaagcaagactgcaaattgcaggtgctatgatcaattttgaagttgacccttctaaatctgagaaaatttacaagaaaaattcattacagaaactaaagtttaatgctttgggcaagaaaccctagaacaatgactaacaaaacccacaaaaatctctatatctgatatttcccaaaggcggtacctacaccaggttaaattcatctcaaaatttaaatcaagtaaataagatttcaaaatcaaatgtgtttagaagcaactttgtgaaacagcaaaacgaaaggacagtaccctaaaatagctctccgtgtaaagaaaaaccagagaaacccaaatctcaaagctatcacaattttaaaattccaaaaaaaaaatgtaggctgtttctgaatcttcgagactttgacataacagattaaaacagaacataaacaaattcacaacgttgaagtttcgtacgttacacaccaaacttcacttgtttcttattaaaatttgttttagaaagtatttggtgaagatataatcataactttttctcagagtaggcacgcaaaaactgacacatgagactatgagagtctctttctctttacttcttttgaattttgttctctttaactatttcattcagtgaaatgacatctttcacgtcttctctaattaagtttagtcaacattttccgaaagctggttcggttcaataccaaaagccaaaaggaaattcctcctgattcactgttgttacttgttagtagaccttttgaccaaagaaagtcatgtgcttcccatggatcgattacatgagtggcatttctcctaaaatttaaagaacttatctattgaaatgattaatgttagattgccaaattctatattattctgttatgatttttctttttttttttaataaatataatgttattggttatcgtttataataaatattataaatattttaaaattttgtggtataagtaaggaaatatgcatttatttcaagctcccaaagtatataaaagttttagacccactaattcagaaaatatggtgtatcaaaatggttttaaggtcgatgtatttttgtgaataagccaagttcgattctctttcattttcaaaaataatttgtttttattaataactagtagataagattgactgaagtctcctagttttggtttctcatagctgtgcaaaactgtggccaattgttgtaggttaatgatatgcagtttcttctttctccaacaatgccacacagaaaaatagatgtctctgtccccaattgttgtgtaaaatccgacaatctccccttcataagcaatcagttccccttgaacgcatgacttatcaaacttgagcaaccaagtcgttaaaaacttgtcttgctcatgatgttggaagtgttcagttcctgtgacagcctcttcatataattcagtcttaaaagaatacagaaactgccaatagatgagcttgaaatgccatgacaacttataatgatgattgccataggacagaacatagatgattgcattgctggcctgaaccctttttaactccccaaaaatctcactcaccctcttgacaatcaagatatgccactgcaccttgcttccattttgaagccaccaccacaagatcgttatagtacccatttgtcggaagagattgtgttgttgcttatttccttctttcacctgtttgaatttaaatctccaagacttaaagcacttcctctgtttccttctacttagtagtcttgtaggtctgtgagaaaacatttggtgttcccaagaagactgcaatacatccgtctcatttagagatatcatgacagcttctccgtaagcaacaacttgcttattaatttcttccactctatggtcttgaatccatgtgactgactcacaatgtttttttgatttagagacattagcgccaatatcagattgcaacgctaccctatctacctctccaagtgtgtcacataattgttctagtacctgtttatgtcccttcgtaggaggaattgccatctcaagtggagcttgaaaaatttggtgtatggtaaccactcttacagtagattctcctaagcttacaagcagtctgcatttcctcttgcacaaaaccaaaaacttctcgattgtcccacaatgaattagcttcctttagttctgaagtaacctctagttttgcactcttgattttcctacaagttactcttctgctccaagtatgtaaccagccacgattgtgtcgtttctcaagtattctcttctcaaaattgtatttgaacatccacgatttcaaccctttaagcttcttcttcgtttccagccgttctttaaggtgatacatttgatcgaacacctggtgtgcggacatgtttgaggtgatacttgtcacttgttgaatcctcacaacataactgttaaccacatccattttactgctctcctgaatctttgccttcatcaccacagtttctaagttctccaccactgaagttattgccataagttcgttgttcctcaaattttcagaatcagaaacaagtagctgtggacttagcaatgtcgcatcatccttcgttccgttctcacctgagacttcattatcaacttgattcgaagattcgtcagtgacctccagagaattatgcaatttctccactggaatcgtttcttgagtcgtggccattgaaggagttgcttcttgtgggttaatcgttgttgtcttcatcctccggatctttgcctcgtctctcctttcccttaaaaattgatcttgttcggcaagcaatctgattagttccggatcttttctatcgccaaatctcagcatcaaacaatccctcaaatgttcccaagatcaaaaaagaatcatcttcgtcgtccgtgaaattctcccaaacaaagaaatcctccagccatgaaatccatgatcgcaattcatgagtcacaccaatgaaggtgggaaatccctcaagacacattgcgattgacaaaaatccccaacttttgaaaccctaatcttcttgcgttcgattcgatccgagcacactaacgcaccatttgataagaatgaaagtgtaatccttggtatttcttatctttgaatccaattacaatgatacaaaccctaaatcgataagcttggagttacagttctccaatcttatctcccaagaacagagcacataaagctctaatcctctttacacatcaatgatcacgcaggatgcttttctctctactctctcttactatttataagcttcttcacacgtgactccaatctctcacttcagttctcacacgtgccaacttctcatgaaccacagaaatatttagaggggcaaaaagaagacatataccttaagtgaagaagttagaaaaggccttcttatacagaaatcacatgagtcatggtatctatagatctggatttaataataagacgtaaagaacaatttgtcttacctttgtgagtcttattaaatgcagagtttagaaatattaggacggagtggaatttctctgtatccttttccttgctcaaacccaaagaccgttccaaggagatgctatcgcataggccatggatgaagtgaacgatgaacgggaaggtgatcgtatttttgaaggagaggcgactattagagagtcgatttggggagatgaattggaacgtaaaacctttgagagaggtatcagatgtatattatctaatagggaaaccaaaacgttgattacattattaagaggcccaaagccttaattattagtaataaattaggctgatgtggctgggtttagaaacatttcgagcaaaattaggctgatgtggcagcttagtggagaagattagaaagctgatgtggctagtctgagaagcctcaatgagcttcttttattagtagtagatgactaacttggttatttttgtttcttttgtttatattcaatttgttcattttcaaattgtaacctgcttcattgtttctaaatctttgttaactcacgttttatgctcaagacgtagaaaagacaaaaaatgatgtgtttgtgaaatcacaatcaagttctatgtttatgtttcttaaaaaatctgaaaattttactgattctgtgagaataaatgatgaaaatgttaacaaagaaaaggatgagaatgtcaacgattattgttttgtttataatagtttcgacgttccaaaattattttaacatgcatttattttgtatacaaaaaatatatattggaaaggcttctatcgttccaaaattatttttacatgcatttattttgtatacaaaaaatatatattggaaaggcttctatcgttccaaaattatttttacatgtatttattttgtatacaaaaaatatatattggaaaggccaccaattttgacctccctctaagtcctaataaacctgagcacgatactactctgactgtcttttgttgccaacaatttttgagacgatgatatgcatagtaatatgatcaaaacaattttttgaaaaacaaaaatggttatgtgttaacctaacagacatagacgcaaatttctattaaaaaaacaggggattaacgttttaggtattagccttactggtccaaaaccgaatatgttgtttggtacaaagattttaagtaaaatatctcatggaagagggatgaattgtaggaatctaagtgtaaagaaaacgaaaatgtaagacttctcatttattctagagagaaagttgatttttatgatggagtattggaagtgttatttagcaaagcgcagcaggaaggaagattctatggaattagtgtgggaaatgacagccccatgattaactatttgttgtttacagatgacacaatgtttttctgcaggtcagactccaaagcattctcagttctcatgagtattcttcgtcagtatgattctgtttctagacaaatgataaataaaaccaaatcagccatcacattttaagccaaaacctctgagcttaccaagacaaatgctcaaaaaatctttggtatacaaaggactacagaactgggaaaataccttggattacatgaaatgtgtggacacaagaaaaaggatcttttcaaccaaatcattgaccgtataagacagagatccctcagctggacttctaaattcttatctgcggcgcgaaagactaccatgctaaaatcagtgttggcaaccatgtcatcttacaccatgtcatgcttcaaactcctaggatctttttgtaaaagagttcagtcggttctaacacgtttctggtgggacaaaaaataaaaatgtgttggatcgcatggtaaagatgacaaaatcaaagagatgtggaggattggggtttaaggatattaatgtgtttaatgatgatcttacttgcaaaagtgagccgactaatcctttcaaaatcttcttgcctccttgcaaaaataatgttaggaaaattttgcaaaacaacccctttccttgattgctcagtcacgaccacaacctcacatggatgtagaggaatttgtataggtagagacctgatcaaatcccagttgggtaaatcaatcgaatcaagtactttgacaaaggtatggtcacaaccttggctttccttgtcggcgccattattccttataggtccaccaacagagtataaccaaagtatgactattgataactttatacgcccaatttccaagtcttgggacagggcaaatattctgcatcgcctcctcaacatgaatcagaaatcctcgcactttgacctggtactctggaagccaaagatcggtatgtctggttactcactaagacaagtgactaagcgctaaaacaagctatcaaactgcaaaaaagttgaaggaacaacaagggaatcaacacggaaatgcatttgcgaatggtttcaattaatttgaataaataaatttggctcaataattgctcacaaaaattcaaatttctcctttggaaagccatgaagaatgccttacccgttggatcgaatctgaaatcatgaggaattaaccctgaagctaagtgccctcactgtggtgaagaggaaacgtgtctccattcattcttccattgctccttcggcaaacagatatgggagcaaaccccgtttaaatcctcaatttgtctggaccttataaccagcctgaaattgggaatcgaagtatccaagcttcttacctgcctcctaccattaagaattgggcaatgccccctctttctttggattttgttgatgatctagactcaccataacaaaaaagacttttgagcagaaacacctttcaagccaggatgttctctttaaagccatcattcatgcaaaagaatggagcgcaacacatatccagatcagaacttccctttaagtatcgtagatctatccaatttctgttattggaccggatacatctagatgcttcacggatgcaacataatggcgagaggactctcaagatgaggtctgggatggctcttcattgaccactcatcacataccaaaatctcgtttagatctacagagtataatgtcagctctccacttatggcggaagcaattgccttcttccttgccatgcaaaaagccttagatcttagcatcacaaaactatcaattgctttagattcacagcagttgatcaaagcactcagtggggagtctccttcggtggagctccatgggattctccacgacatcctctactcatctctctcctttgatgaaattaggttttcttttgttaaaagactttaatcgtaaagcagatgatcttgcaaaatctgctctacattcaattcttattgtaccagttaccaactaatgagaaccaagcttttagacaaaaaaggtagataagaccaatcaactacatacaaagattgcatattcatgtctgttaagttaattcattagccacattctcctaaaaaagaacattataaagattcaataaatgttcagacaaagatttcaccaatattatatgcaatggtagacccacatggaagaaatagggagcatctcacaccctttaaaaataatatattaaagtgtttgtgaaatatttgttttgagcaagtggctcatttggttgaggtctctatgactatctacaatggcttattgaaaaaaattattcaatagttgaatgcttacaatgggatattgaataaagaaatgaatcctatgtggattaaatggtgttgaatagattcaacaatgttgaatctttaaaaatggacccctcattgtcacttgtcattaaataattggagacagaaattgtgggggagagttaaataaagataggacatgtgttgttcttttatttgctactgaaatttcttatattttcttttcctccgaattattggaggtcaattatcttataaaatatttatttgttttaaattatttttacattaaaattcatcattttttaaactctataaatagagatttgtttcatttgatttggacacataaaaaaatacatctattttcactaaaaaaatttcattagccgctaaactcgtatctatatatttttctgtttttttctagtgaaatagatcccaataataactcatttaacccccaaaattccattaattatccatttaaaacataaaagaaaagaaaaataatgaaatagaatttgtggggtagggtgttgaattttattaaacaaatcattgtaaagtataaaatttgagtgggtattgaattattatgtagaagaaagagaaaatgatgtggaagagagagaagcttatgtggaaggtgttgaatagaaaaaccattgttgatagcctaaaattgaccccccctaatatgcgtttgatgcataaagatgctcttattaattgtttctattaccgtttttttagatatatcccacataatttatatttttctattttcatctattcgttttttctttttattatttctttatgcccatttcatttaattatgtctataaatgaaaccaatatattttaaaataatatttaaaattgtctcaaaaccaatttaaaactgttatttggaaattttgttcaaatgtggtatattgtataaaccaatataagatccattatgtttataatataattttgatccaggtaaaaatatttttttgtctgtcactaattatatgtattgcgtacctgctcaaaattaaatatgtgaatacataaaaaataatatcgtaatcatcaattttaaattaaagatataatacttctttgagaatatattttatttacctttctattatctaacttatgatattttttgccacaaaaaaaaattatgatcgagttttgatgaggagccttatgcttgacgttgtccgtgtgcattttgtacaaccaaaaatcaaaattgcaacaattccactatccattccttccaagatctagtctaatgtcagcctagattttatagaaggattgcctatttctaagtgatatgatgtgatcctagtagtggtggatagattgagcaaatatggacattttgtaccacttaaacatttttttacagccaagatattagcttaagcattcaacaaagaaattgttaggttgcacggggttcccgaaagtatagtgtcaaacagagataagatctttgtaagtcacttcttgtatgaactttttaaggctccaggaacattgttgaataagagcaccgcttaccatcctcaaaccgacggtgagacagaggttttaaattgatgtttggagacttatttgaggtgttttgtgaatgggaaacccaagatgtgggcacattggttgatgtgggcacatgggaactgatggctcaaactactagacaatttcccgagtcttaccttgaggacaaggtggcttcgttacgggggagtattgataagataaggttgcagaaagaatattcagataaggcgatcaaagtttcaagaaagagaattcccaagaagatttatgattcaagtggctgaagcaaacttatgaggaaggtggagtaatactctgtagcatatagagtctttgatattattatcaaagtaataagaatgtttgtagtttttatatcaactttgtgtcatttgagctttgtgttatgagagagcttgtagttttcaatggaacaactatataaggtgaactctattttagggttgatctaactaagaaattaagtaatgtttcctatttccttgcctctctcttatttctccgatctcgatctaacttcttcttctatcttctttttatttcttttctcttcttcgtcgtgctattactctcttgataggcttcggtcatatcaaaaagcttttacagcagatgaagttcatgaattttcgagagactttcaatagtttttagaaaatatttattgtttttttttttgtattttgcaatatataaatgaaaaataaaacatcttctcgcttgaaaaatgaaaaactcaagtacaatagttattagttattagtgctctgtctattgaattcccaataattttgctattaccactataattctgcaacaaaaaattacacacattattactatcattgaactgaagtagaataactatcaaatactagtaattcattattgataaagttaaatatatttaaacagtccaatcatttattttagttttctgaaattttttagctaaggacaaaattgtttttttttgaaaatataaggtatactttcatatacttaaaatattttgtgtaaaatttaaacctgtaatcaaattttggggtatccaatcagattaatctttacctggtagacatggccagatgttttataatatatcgcttcatgaatcaagtatgccaagtataccgtgatttcaccctccttatgtcgttcaccaatttctttcgcaaaaaggatattaaaaaaatataatggaacttctgattgttaggtatttagcaacaagaatacaaaagtatgtatgatattcactccggaagtttccataacaaaatttcctaaacaatctacttcgctatttgaatgatatggctttcccaaatcattctttccagctttgttcacataagcttgaaccattatgggatcaacacgatcaacgtcacatccaaaaaaactttgacatattcgttaagtccttttcaactccataactgtttttaataaccgcaattgtctcttgatactgatcaatatcgtatgtcgacagatcaaaaccatacgtcaaccgttggatctaaaaaaaatgatgggtgtccacgatacaccctctgcaccataaaaaaggtaattgttagttaaaagtacaaaaacaaatatgatttattgcatcatcgatctcttggttgagctcttttcattttcatcattcatgatccgttcgaatcctttttatatcttcattttttggtggaatttggggtattgtgttccatcatttctaaattaaattagaacttatttgaatgtgtttgcttaaaatcttatactctttagtaatttttgaatcacatcatttattgttaacgtttgcgtagtttgtgcattattgaaaaattatctaagctgttcttcattgattttttagcttaagaattgttctaatttatatgatcatcatctgttcaatcatttttcttacttctacaaatttaggtgtaggcttgtagtgatgcagctcaaaactcagctagctaagttttattagattaaatttgtatttgtggtgtatgtgttgttgattcttcttctctacttatgttcattttaggagacaatcaataatttcgttattatcaccatcaatctgtaaccagaaaataaaattaaaaataaaacctccaaaaactagtttggtttttcaatttttaaggactctacgttgacaaaaaaaaattgattgaacaaatatgagttaaaaaaaaaaaaaaccacaaattagttttacaaactcagaataatcatgacctaaactatgttagtcttttctcaatgaagagaaagaaaagattacaaataaaactaaaataaaaaaaaactactataatttcaaattaatgatatagtatatcatatttcaatcatctatctttttggtaatcaaatatttacattatcgtataaaagaaaaaaaaatcaaatacttatgttttttaattatcttcattgcttctttctcttctttattttagatctgattcgtataagacatattgattgagtagaaatctgtaaaaatatgttgtggtttatatgttatgaagtatattaactgcttttacaatggctacgtatcatctataacatatgtgttttaatgtttgtatgtagtaaattatgctttctatttgtactgctcttggttgtgatgtaattatcttgtatttaaagaaaactattgtgttttattcttatgcttgaaaaatgattggccactttggagatgttcagcccgttaacatacagctcagcccagtagtaaatcaatcaacccgcttgacccatcaaagagctcatatccatgaaaacccacctcgaagtcatcctttggatcttaccagcggatccacttgaagccgaagtcacattttctttcatttgtacaaatatcaacactaaatatgtgaaggtggagatcatctaaactatcaacaacctctttccaggcctaacccatgaaaaatttctatgaaacatagttattgggcctcattttgtggaggaataaacaaaggtattgggcctcttggtccataaagctttggtgcacctttccacgctttattttacaaataccaaacttgccgtaattggatccaagtagctttacatcacaacacttttttcttgtcattgttgctacgttttgaagatcctcttatcagtgactagccaaaaagtctacttagtgatacgatggtacattaagcggtctacaatttaatcagatactttgtagtgaagacttttctaatacatgaatagattgatgctgattgagcttattgaaagagatatataaagattgaaatgcaatagctctaatgagctttaatgaaatgtaaaggagagaaaggaagctttagattgtcttgaagatcaaaatagatttagatttgatttcatacaatgaagaaaagaagagttgctcaatggcaactctctaggctacattcatcaatgtcatacaccacatatatatatgagaaactctaactacaaaacctaatgacatgagcttagatgggcttctctactctttatattttgggctttatgtggcctcttatgtagaagggttatgaagagaagaattattttgatggtggggaagtaagagctctccatctgcatcggcatgtgtggaccatgagggatccaagtaaaggtaaaaaatatttcccgctaaacatgagactggcattctctaagaggttgttgtaaccagttagggacttagggcgttacaaatatgaaagatttggtctctcatttaaacccatatgcgggttcattaagataaacgcttcccacagtggatcttgtggtgattccttctttttgcttgtcgaaattggagtttttttttttttgtgttggattgtggattatttgaatggaagatctttgacccaccaaaccgacctttcgcttcgtatggtggatcagtggatgtctttatagaatacgtgtcttgcgtttgttttcgagtcgggtcaatctgttggtttaatttttctacgtcttggaaactatctccggggtgattgagcatgcatggtacaactaactaaagcagccttttgtctacgtctatgtgttgtgtttttataggcaataatagcaaattcacttacaacaaagagagacaaaaaaactttcaactaatatataagggatttttacgttttaacataatatggtttggataactcatttgtattttcttttgatctatactattatttgggaagcattttgtgaactacaatattgtgagggtagtttaatactagggtaaattacaggccacacccgttgaccatgttttattttcatggattgtcaaagtcaaatgtggttttcaccatttgccttttcgcctgcaaaatgacgcttctgcccttgcgcttctctcttagtaactgttgaaatgtacggtttagtttagcaggtttagttacgtacactgttccggttcagttgaagattttttgtttcacgttgacgcgattcggttccgttacaagtgagattattttcattattccgaagtgacatcaacatttaatgcccccaaaaagtttagatgtgactattgtcacaattaatgcaaaatcatcattacatcaaataatataaaaaaaattattgataataattaataaaaaatttgttgagataaagaagatgaacccatgaacaaagaattattgagaacgtacattgctgctgaagaagtgttgatcttgtttttgtaccaagtttggagcattgctcgtgtaagtaatgaagttcttttaagaagttttttgttatgtcatattaggatcttgattgtgttcgaactccatttttttatcagaatatttgcaaaatctatatttgtttgtttaaaatagtcaaatgataattggtatttaggtttataaatgtgtagtatcgacattccattcgttttttatatgtatagtatttttcagttgcatttaatgtgtgtctcctgaatttatgatgcaggtgggttatggatattcccgtatttactatggtcggtgagtggaaatgcaaagaaggagaatggaaatttgaacctgaggaaggcatctttggttgttgtgtacgcgttcaggaaaccatgacgtacacagactttgtccgtacactccgagaggctttcagtttgaagtccaccgagatcaatcccataattagctactggatgccgggagaaatgtcagtgctgatagatactaaacgccctcctgtatacattgacagtcagatgggtctcgagacgttttttttggtttgtggtgggtatctttctctcaacttgttcgtctctttcaataatacagtgaatgcgttcgggaatactgtctctaggtctcatggtgaagtttctgaaagtgaccgtgtgtttgatagtgctacaaatgttgatgaaaataatgaggatgcagaggagcaagccgatgttgaagacgatacaacagaagaggatgaattggaggagggcaacgaagatgatgatgggtgtgatgattatcttggtgtggatggatctattgggggaagtaccctgtatcctactacagacggtagtgaaggtattggcgaagaatacggttagaacaagtggaacgatgtaatagtagaagaatatgtacaaggaaatcttgaggaagacgtcagtctcactcaacagactgctcaacatccaggggaattcagtcgtttattggaaacgtgtacgtacacgggtgttagtgtacctggcggagatacaggggaattcagtcgtctcttggaaacgtgtacgtacactggtcttagtgtacctggcgaagaaacaatttctccattgggttacggtacacgctgcaaagggcaaagggattccaatcttatttgtatagacgaagtcaccggggatgaagtgatcgacggtattggagcttcctcaacggggacacaaaatgataattgggtagttaccgcagctgaggcttaccaagtgtataatgaattttctaagttacatggtggcgagttggcgaatctcggtaacgatgctgctcctgtgttcgatgacttactcaatttttgagctgatgagacacaggttgaaatcagcaccacaggcgaaactttgtttgttggaagtgtttttaagaatagaaaagtcctgcaacaaacaatgtctcttcaagcgataaagcaatgcttttgcttcaagcaacctaagtcatgtcctaaaacattgaagatggtgtgcgttgatgagacttgtccatggcaattgactgctcgcgtcgtgaaggattcagaaagtttcaaaatcacttcgtatgctacgacacatacgtgtaacatcgactctcggaagaactacaataaacatgctaattataagctcctcggagaagttgtgaggagcagatacagttctacgcagggtgggccgcgagctgtcgacttaccacagctgctcctaaatgatctgaatgtgcgtatttcatattctaccgcttggagagcaaaagaggttgcagtggaaaatgtacgggggggatgagatagcaaattacaggtttttgccgacctatctgtatcttctccaattagctaatccgggtacaataacacacctacactatacagaagatgatggtaagcagcgcttcaagtatgtctttgtctctcttggcgcttctatcaaaggtctgatatatatgaggaaggtagttgtggtagatggaacgcagctagtcggaccttacaaaggatgtcttcttattgcatgtgcccaagatgggaacttccaaatattcccaatagcttttggtgttgttgatggtgagaccgatgcttcttgggcatggttttttgaaaagttagctgagattgttccagacagtgacgatttaatgattgtctcggacagacattcatctttatacaaaggcctaagtgttgtttacccgagagcgcatcatggagcatgtgctgttcaccttgagcgaaacctctccacctactatggtaagtttggtgtgtctgctttatttttcagcgctgccaaagcttatagggtcagggatttcgagaaatattttgaactgttaagggaaaagagtggtaaatgcgcaaaatacctagaggacataggatttgagcattggacaagagctcactgtagaggagaacgctacaatatcatgtctagcaacaactctgagtccatgaatcatgtgttaacaaaagcaaaaacttatccgattgtttacatgatcgagttcattcgggatgtcctaatgcgatggttcgcatcgaggaggaagaaagttgctaggtgcaaatcttctgtgacacctgaggttgatgagagatttctacaagagttgcctgcgtcaggtaaatacgctgtgaagatgtctggaccgtggagctatcaagtgacaagtaaatccggggagcattttcatgtcgttctggaccattgtacgtgtacgtgtcttaggtacaccaagctaagaatcccatgtgaacacgctctagcagctgcaatcgagcatggaattgatccgaagtcttgtgtcggatggtggtatggccttcaaacgttttctgattctttccaagaaccaattctacctatcccggatccgaaagatgttgtcatcccacaacatatagtggatttgatactcattcctccatacagtagacgaccaccaggaagaccactgtccaaaaggatcccatctagaggtgaaaaccgggtatgtactaacatcgttcattcatatacttgtattttgaagtattaccatgcggagatttgtaacttcctgtctttgtcacttcagaaaaagagacagaaaagacttttaccaaatcagtgctcacgctgtcgacaagcaggtcataacaagaagacgtgcaaaaaatccaatctagttccggtgacaagtttctgagccggccaatatagtgtacgcttctgtgttttctcggtgtacgtaagtttatatataatccacctgtaactatgtacgttgtgtacgtacgtttaaactctacgttcgtataactatgaacgtttttgtctgtgtacgtggtaaagttcatgtaataagggtacacagaggtggttgctcaatattttgagtaatttgaaataagttttttgaaattctaacttattccccctcttaaatgaatggagttggagacatggttgggtatattgtggttgtgttggtatttaatggaaaggacgtaactgttgctgtttattgtcaaatcaacgtaatgattaccctatatgacggttaccagactattaccaaaaaatttgaatcaagtgtagttgtaaccgcattaataactgtagccgttccagatttcctctatttaagtctcctcccttccttaattttatccacaatcctcattctaaacccatttcttgtgccggcagttatttcattcacaagaagaaatttagtctttcgatttgcttgttcttgctatccgtgagatggaggtgtttcatacggtctcagaattgtgtcctctgataactgggtggcgaatttatgtctttgtcgtgagagtcttcaagaaggttatatcgcccaacgtcttcgaactcggccttatcctggcagattacgaggtaatttccgttaaatcattatgtgtttttctcgttcattcgcttaacttatatattaaactctctactatcatgttctgtatgtaaagaataaccgtattgaggccaccgttgatcgtcgccttgctccgttttacgaagaccgattcgttgaaaatgagtggaagacgatcacctctttcttggtccgtaagtcaactgacttagtcagagcaacaaagcataaatacggcatactgtttatggatcggaccatcgtcgttcatgccccaccgagatcaccaccagttccagatttcgatttcactcccttcgactacattttggataaatctgcttacaagaacgttttagtcggtgaggaggaataactccgatgcttcatttattacatttttgaaaatgtttgtttattatctatgtttctccatcatctagatgtcattggagcgttggttgatgttggcgcattgactacagactattacggtctcaaactgagtttcaagttaaaagatagatagtaagtgttcttttcatttgttttatttacaatgtcactctaaacgctaactgtccttatttctaacgtagcaatgaagtcttggagtgcgaagcccgcaatcaacaggcggagtacttggatggttactttcagagtttgggtaagggaaattttgttgtcgcactcagcttttggcgtctagccgaactgtctaacccgaagcttgagagccatggtgctatttcaaaggtggttgccaatccggacagagcagaagttgcggatatctcgatggtggttttttagctagagggaatgaaccattattccccgttttaatataatataagactacatttcaattatgttttctttcccagttgttgttgttgtttccataagaaccaaactacatttcagtcgttgttgtttcttgtttccgttttaattttaatctaatttgttgttttatgtatgtgccttgttttattgttcaaatcctctcgcaatgtacgtatagtttctggtgtacgctatcgtgtacgtatattagttttggtgccttcaacatcaaaaactgttagatttatacttatgttgtgtacacaatttcccaatgtacgataaaccaagtttaatgtactatatagtgtacgtacacaaagacatctagtaatacttaaagtggtaattcattcaaaagtcagaaacataaaaaagtacaggcagtttatataaagggaaattcataagataagataaataaactggaacgattcaaaaaacatatttttttaaacgaagcatacacatgtgttgcaaaatatgtgtgcatccgtcataccaaaagactcgagagtagagcctagtagaatatagcaatctccctggcgtaccagtagaaaaaacaaaccctgcagccatgatggaacgtgcattgccctacgcaactcggcgggtggacaaacctccaagaccttttccagcggcgagcattttcagtgtgaagctggttgatgtgatacatcaccatctctgcaaccgcgtggccagcttcaagggtgggtgtcatttcccagaacttttcgctgatagggaggaaatccaagtgattaccggtacacgtaaggaacaaaccggttgcgaagcaagcaaagggatcagataaagcgaccgttgtcatgactgaaaggccctgagctactgtcacgaagttgctcgcttggcgaacaccttcaaggtaaaccgccgggatggatccacgttctacaagcagctcgaagtatggccggaagggagacccaggttggagtaacgacggccacgtcatgaattcatcgattgcaagggtgttgatgtcacaactgtagactaagttccttagcgtctctatgggagtctggctgacggggaggtagttgacaagtatgcttatggggtttggcaattggattcctaggtacaactcggttggagggttagcggaggtaggaaaggcattgtttttcaaacgaggaggtttagacggattagtgtattcaactaagtgtgtttgtcatgagttttaaagagaagaataaccatcaatgtaagtgggtgggtgacgtggatgtatatttagtgcatcatattagtaacttttaatttaaacaaattactgtgtacctctcataatcgcgccgtgtacgtctacaaaatactcattacattttctggcagaaggttgagttgacgtctgtttgtatggcatataaggggaacaatatggcttcatgtatagtgctatattaggggtcaacgcatttactaacaatcttttcaaataaacattaacttacttattttatctgccaaatcaattgagtacattgctcggtaaccgtgtacgtctaatagagatattaatgagagtgtgatggaggtcacttctagagtgtatttgacagcaagtaattaatatggagcgaaatcttctatatatgggttatacgacgtcaaatcaaatttcctttcgtcttcatttacaaactatatcgtcgttcactatgtaatctttatagttggaattaaactatgccacgtgtacattatcatttatcgtgtacgtagatatttattattttattattttaatgatgtctcatattagagtactttgagctagtatgtttgaatcaattacaaagtggtaattttattaaaaacaaacttccattactgataatcaacgtaaaaagctcacatattgttgcatggaaaacttataaatatgacaggatcgtggcgaatgtgagctctacaggatctggctaattcgtttagcacacaaccagatgtaacattggttgcaaagattattgaagagtctcgatctaatgtaacacacatccgcgcattcaggagtgcttacgtcaccacattccgggtacgaaaaactgttagcgtatgtgtattttaaagtattaccatatttctttatatcttctagcacctcctcacaaatgtcacgtgcctcctccgattccaaagcataatggttgcttccgaagagccgaaggtagacaccacccatgtgagcattaccagcacatatgtaaagaattgcgcatgcaagggttgcagcggcgttccttggggcgattcgctctaagtgtaggatagctccctggatgtcagactcatgtgtaacgagacgcagtccttcatggtaaatagccgtggggttaccagcttgtaagcaccgtttgaagaagggtctatagcgaccttcggagttgatgtcatttggatcgtggcctgccgcgtagaagtcatcgggatcgtcgcacatgctgaaaatgtttgcatctttgaggacatccggacggtagacaatgtctcgtccacgaggaccggatttcaacataggtccgaggtaccaccaacatttctcagccattttcttggctatcttcgcaagcaaatcgtcaggaatatttgggtttgtcatatttaggagtaaggtgtttcgacaaaataaaattcgaacacttaaataagcatcattgaagatatggttgggtaagttatggttgtatttattgcaaaggtattaagtgatgatgtgtattcatattgtcaaatcaaagtaatagtattccatatataatttgttattgttgttatgagcaacctctttttaataacagcttaaaactagacgtgtacgttttactgacggtttcagtgtacgtccacatttacatttctacatttactcaacaaacagtgtacgttgtagtgtacgtttcagtgtacgtccacatttacatttctacatttgcccaacaaacagtgtacgttgtagtgtacgttttactgacggtttcagtgtacgtccacatttacatttctacatttactcaacaaacagtgtacgttgtagtgtacgtttcagtgtacgtccacatttacatttctacatttgcccaacaaacagtgtacgttgtagtgtacgttttagtgtacgtccacatttacatttctacatttgcccaacaaacagtgtacgctgtagtgtactattagtgtacgtccattcataaatatcaccatttatgagacaaaccaaagacctcatatgtttgcatgtgttattttttagtgtacgttagagttgatatctcatgctagtgaacgtccatatctagttttccgagacaaagaaaaaacctctaagtattatttggtagatgcacgtgtacggagttgtggacgcttagattttaatatccaaatttacatttactgcagtgtctaaatatcatatgcgaatttggctgaaaaatattcaacttgagaaacataacacaccttgcaaatttcttaagcaataatataatttcaacataaacataaacaacatagtagaagccttatcataatttgaaacatgacatagcggataacataaacaaacatataaagtagaatggaataactatagcatttgactaacacgcctggcacacgaccagaggtaacagcggttgcaaacgttttggaaagctcctgataccatgtaacaatataaggcgcaaggaggcatactaattccatggctggtaggataagagaacgtaggaccatatgtattgctgtatggagggtcaaacttctttatttcctcgatgaactcatcacccaaaactcgagtggcaaccgagtccaatggataatggttgcgggtgaagagctgtagaaacaagccgcccatataatcatacccagcacatatgaatacaatggcgcatgcaagtgttgcatttgctcgtactggagcatgacgctgtaagagcctgatggctccattgatgtttcgttcatgcgttagaacacgaataccttcgtaatacacggccgtgggattattagctacaaaacaccgtaagaaaatgttcgatgtcggccttcatcagcggatccggagggattgtggccccctccagcttggaagtcatcgggcgagtcacacaaggtgagaatattggcatctttgaggacatccggacggtagacaatgtctcttccacgagtgccggatcgtaccagtggaccagcattggtcagccaggttcttagctatctttgagagtaaatcgttgggaagagtcgggttaaccatgtttgaaatgagatagtcagagatcgtcagtaatttcttcactttaataaccactactgtgaatttggttggggcaattacggttgaaatgaatgtcatacttgtgttggtaagcgttggctgtcaaatcaatttatcacttgagttatgttataaagttaatatgcagtgtacgagacatatagatatgtacgtacacatttacattatgtaattataagtgaacgatgtgtacgacaatatgatagaggacaataaattaacttctgacaatctccaaattaaatgtagttgatatataagacaggtttgttcataataattggttgcaaagaaccagaatattgttcttggacgattaaaccaagtgcacagtatcggcctcccgcttgccgtgctcgtagatgtcaacggagtatttctgacggtagaagaccatatctgcttctcgaatggttgtcagatccgaaaagggtgtccaaaggcaagcaactccaggaacttcatcgtgtatggcccgcaatctcttatagttgggttttgagcaacggtaggacaacgcacatactcaaaaggttcaactgagtacggagaaatcaatacatcctggcacatcgctctgtctaagtacggcatcatttcgcaaataggagtcattctcgccttcacagccgactcccgcgtgtgcgatattaaagcgtcatacacagttattagccgttcattaaggttgattcccaaagcaacccaatgttcactcttccagttcatcggagcatacacaacatcgacatccttcatccacttcatattgggttcacggtttatgtgaactccattagcaatgtcggacaataatttaccccatttgaacccgttcttattaatacacttcttgaagtcgcccacccgcttggtaagaagatgcgtcagcatcatgtccaatacaatatatctgtttgctatcatctgttccccgttcttgtgccacatcaacattgccatcatttctaaatgctgaaatgttcaaaaaatatatcagtgtacgtacacttccacgaaaaatttaatcatctatgtacaatttataacaaggaatgtacgtatataaatgcagcgtaccgtactttcgacccattcaccaggtgttagaaggttcgcaaaaaagtcgttgggcacttttcgaaatccgaaaagagtgtgaatcctgtaaaatccagaaaaatatttgataacaaccttaagacttggaaaaatgatgattgagatattaaataatccattttactataatgtacttacacagagggtcctttaatgatattgctgaattcctctacttttgaagggtcaagcatgtccagggggttgtatgagacatttccagccctgataacaacctctatctgttgagctggtacatcgggcaccaatactgtttttgccttaaaaccatgaggatgggcatcatcctgttcatagacaagttgcttcttcactttctttgggacctttggtgacgattttttttcttcttctgcttcgacagcagcagcattgtctgattcatcctgttaacaaatatgattgtcaacaacagtttcatacgtttttatatgtttaaaataggtacatacattatttttaggaatatcggtcttgtctgcttcatctgaccctgggttaggatcctcagtttctacagacccctcgacaatacacggctcttccatgactacctgtgcaagttaacgtacacaagtatatataatgtacacatataatcctatgtatgctattccgaaaataggaattgaaacacacaaattgttacctccaaatcagtggctgcagccaaatcaccaacggctttggtatccaactcccgtatgacctgcataatataaattttatacatttgaacagtaaatagtacattttatttgttgcaagagttagcttacattgttaactacttgaaatggtgacatcactgtgggtcttctcaggtatttcaacttccatcactgtcactaatttcgattctcctgccgcctcaacctgtagaatttagcatcggaaagaaactttttagtaatgtatgaaacaatatatatgtacacagaacatagtgacaaaaatgtacgtacacttgtgtcaggtacgtgagctgtgtctccatcagaaggctcataagtttcttctgactcgctgccattagcttcagtcgatgcactggcatctcttgcttcttcatgaaacaaaaataatttgcaaagtcttatgggcgtacacatatggaaaaaagaagaagtgactaacacatacctgtgcagatgtttaaggtaaacctgatggattgtctaccatctctatgtcagcatcagctatttcatcggcccctgtatgggtaccaactaagccaggttcagcaacatcctttggtccattatcctgaaaaataggctaccatagagttaagcgttagataagtgaagaaattaatgtaatatatatgcatatagtcatggaaatctgtatataacgattaccagaagatctacctctgaaactcttgcagacacattagatggaacttcttccatctgggtgtcaacagtagcttcttccacaggcctctcttcctgtgttacaaagacagtcccagacattgaacctaagaagacagtcttaccaacaacaacatttcctctatcctgaaacatagtttaactaacttcttaagcgaatatgtacgtacaccatttaaacagattgttaagagtattagtagacgacataccagatgggattgtgtggatccagcataaggaactattaaaaatccagtgtctaatatctcttcttcagcggcagaagaattcaatccatcatttgcagtaaaatcactttcattattagcgccatcctgtaccgaagcagacagtacagttatacatatggattataaaatatttagcaatgtacgtacatgacttacctgttcatcaatgaatccttgcatatcttccttattggaatcaggttcctcagtagtgtcaacagcaaaagaaacatttttcttcagctttgaaggttttcttcttccgccgaaagcagtggtatgtactccagggacatccaaatcttcctctttggaattacagccaacaaaaagtgcaggagtgtccacatcatgagaaacacgagtcagccttgaagactttctcgttccagtgcttccttttgtagacatccttctcgatggcttcttcgcagtaaccggtgccttatccatagaagtaggtggttcccgcgaatcatgggaaggtatggtttgttctggccttttgccttttggatcaagggcagcacgtatctggtcacggacaaagtctttcatatcttcatgcatttgatacatttggtcttccagctccttgaaagacctcctcatttcaacaataaacctctcaggcacaggctctccaaaacaatcctcagcagtcccttctttatcacagtccatttcagatttctgttttttcatagcaggttctttagggctcgggcccggtgcatttcgtttcctcttaagatctacaatagaccagttgctgctattaattggttttcttctgggtgcaataccaaaaaaatttgtaaaaacatttatacttatacttacgtgtctcttctagttgtggtgggcgcgactgctttggtactctagcatagcctccaacccattcatcctcctgccactggtgcccatctatcaacagtgcctcaatgtaatcaacccttggatcatcaacttcatcatcccatgaaagagatggaggacaaacattatcagctggtttcacaatatagttgacctcaacctacacaaataagtatgttaaccatagataatgtacatttacttattatgtacgtacatacacaatttaacacacctcatcagcagcctcacactccaaaatgcgagatgtccggattgctcgcagagaggcaagacgatggatagacctctcagtaaatgtcctgttaggtacatcatcaggtcctagcttagcaattgatgggattgtttcgaaagctaaaagctggagagctaatgggaagccatggagtgcataagaccctacaagtataccccttattagtttgtgagcatcgtaaggagtttggaaatttgctatcctccccaaagtacgggtaaaggacacccttccccatgggtatttgcagaaaaactccaggttcttagtcatctcgacagtcttcgaagtaggcctgttggggttactgtgagccgctaccacaccgtcaaccaaaataataagagatagtgccagttgcttccacccctccatgctttcctcctcctgcagccagctcaccaaatcagcaattgttggaaccgtctccccaaacctctcatcaaacagagtcttccaaacactctgacactcaggtttcacactgataacatcatcaacgtctttcttcttgggatacttcccacattccagcctagttaagatactaaattctcttaatccaaatctgattggatgaccgccgaatacaatccacatctcattcaccttctttgtcacaaactgacggcatattagtccaaggacaagcttagcattgaaagatgccttgtttttgggtattttaaaaagtttcccaaatgaagaatcgagaagaaactgcatctctggtttcccctttagtacttttgctatgtcagaaatgtactccggtttagagtacgcgttcatcttcgtctcggaagggtaccggtctagagcaaagagtcttggtggtaaatcttcaactgtaagatcttcagtcggagcaacacttggactacctgcaattaaaagtcatatactgttgagcaaacagaagtagtgtacgtacacagacattttccagattataactcaaaatcatatttttggcggaaacagagatttccaattctacttctcaatttttcatcctaaagatatgctaaattccgacaaattctaaccctttaatcaaacaagctttacaattctgatacacccaaagacaacaaacggtaaattagagattctaacccagttcctccgttgcctttgtcgcagagcgttttctccgcgggaaaactcttaatacccgcttctccttccctggaccatgctgcttcctcgggacttcgtcgttagctttattcccagccatagctaaagatgctatctcgccggaggttcaaatttcgccggaaaaaacagtaactttctcttggcttcgccgggaaaaacagtaactttcacttcaccggatgtgggagttcagtggctcaattcaactacccaacaattcgaagttatgtcgaattttgaagcaatggatactgaatttcgtttcgctttttgattctctctcaaatctctccgttattctctttttcgttttctcggtttcttcgtttcagttttttttttttgtctttttcaaaactgaaccgcatcaactaaaccgaaacaaactgctgtagggtttggtttacgccgtcaacttaaccgatacgaactgctgcacggtttggtttgtgccattattaagtttttccagggtaattttgtccgaaattgaatgaaaagacaaaacgtaaaaaccagttctcactttgacaaacggtgagtacaaatcttttttcgtccacttttgtgaaaatttcttttaatactaactaaatgattttttgcatggataatttaataaattaacaaatatatcaattaaatgaatatctttgattcggatccttcttttatttttttttgaaaaaacaaataacgagattaaataatctaatatattctcagatttgtttcgtcaatatttttggtatgatttgtctacaaaaataaaaaaaggaaataacattaaatattaaatgataactgaatattcaggatcaatatatttattttgaatataaatcgaaatattttgtatttttcaatttgttagagattaaacaaaaaaattcaacataaatcaaataccattaattgaaaaataccaaatattttaacaataaaatctataaatatattagaataatgttaaatatattttaacaataatattaatgttataaatatattagaatattctgatattttcttatttaccaactatatcaaattaagtacataaccaaaagacatacattctatccaatattttgtttttgatcaaatcgtaatatgtttagagatacacgatcttatttgttttttcctttaatatattatataaacgttaaattattagtaaaaaaaacacaaatccaaaattatatttaaaggaaaaaatatgaatttattccaatacatttctataaatatatgggaataaaataccaaatgtagtgattcggataaacaagcggatcttggaattaaaaaaaaaaaaaacaaatccgaaattaaatcaataaatgaataactacccaatatcgacaaaaaaaaaaaactacccaatactttttgtaaatcgtttaataaagtttccataacaaatcaaactacttaattcgaaatcgtatatacgtaaacttatttattttggtaataatttattagatatttttgaaaacaacaatacaatttaataacaaataacatttagtttagatttttaaaaatttccataataaaactaaactgattaattttgattggtacacattgaaaaaacgatttcttgattttccaaatatgaaaaaacatttattatatttatcatatataatctaaactaccatcatttaaatttaaaatatagcatattcaacaaatactttttggattttagatttttaaatatctagaaaataattctagcattaattcaaatatttctattttaattaaaatttaaagattgctatccttcaaaatgaagcatattatgcggatttgttaattgacataacaagaatcatttaaatcagagaattctaactatacatatgcataaaacaaattcaacatacaatgatagaaaacaggacttagctcagctttgcactcgaatccatacttacaaaacaatttacaaattctacatggaccaactatagataatatgtttactgatattagagttttctctttgccattatttgtttaagttactttggcaaaacacggatttacaagcagccaattaaatatagcccaaaacacatatacaaaaaatgcatcggtatttaaatattttaacatgctaacacaaattcttagttcacacataccattaaaattttgaaaaatcaacattatcaaaattaacttgtgtttcaccatcgataacacaaatttctattgcaattctctaaccataattttttatataaaaatacttgacatcattataacctagcataattttccatctaagatatttctaatctacttttcagtttaaactccagaatttgacttatagttcacaatattagctattatgtcataaacaaacataaataacaatcgataattttgtttatatatatatatatattataatatatatactacaatatatatgacaaaaacaaaaaaaactatattgaatataaattttatacaacacatttcttaaaatatgaaatctcgcacgaacgtgcgggtcagaatctagtaatctatgtaaaaaagaataatatttttttatacagaataaaatgattcagttttcatattttttttttgctattaaaacaaaattcaagtttaaaattttgagcctttaaaacattcacctttcaataattgttaataaaataaaataaaaaattatatgtcaaccatctctttccatcatacagtagagccaaattgttatatttgtattacatgtgacttcttcaaaaatttcctttaggttctctattatatatttttctactttgccacggaaagttaatattagtctcttcctattttccttaaagcatagtaattgtttaaatttagacatctttagagaaacttttttgttgatcataagaggagaattggggttgccaaatatgatattgtctttatactcctgattgcaaacttttcgagataattcttgtactagagacgatccttgcacgcacgacaaaatatgattacaaataaaataggaattaatatggatatatttatataaatatatatatatatatatatatatatagataattactagtacaatatatgtattgggttacatagctgtcaattttgatgcccccttacgctttaagatagccagaagacctctattttgtatttataatttaatcatctcattttaaaatatgatttttatttataggtttttttctctatctgttttgtaaattattcatagtgagtacttggtaggagattaaggtgccatgtgtgtctgatattcccaagcaacatttaaaaaaaaaaatgaaataacaatacatacaatatattgagcagacaagattagttaagcctaattccctcgacgctttcttggtcaaatttgtgtaacgtgagattctacctaggtcaaactctacattctcattttaacccctgagttcataggcttcacttatttaatgacaattccatgtcaatgctcatgaatctcgaaccaccaacgcactaatttcctacgagcccatgacaatacaaataaaactattttgctgcgaatatctcttagtctcttacattcccatgagatacattgtaatactttatttgggttttgtcgaagtaacaaatttttgtaactttacattccatattttaaaaatgcagagtaatccaactttaataatatatctcatttgaatttaagaggcatttgaaataaaatataagagaaagcattgaggataatttttttttttttttttgttgtttagtatattttacaacatatctcaaaaacatgttaaattccattgaggtatgttgtaaaacttttacacaagaatcatgactattgtttgttttgctatgtgtaaacaaatttcttgattgattacagattgttagatgtatacataaataaagtctggttgacatgtccataacctagtccattagagactagtggaataaaaacaaaaaaagattaaaaaggaatgaagtcatgagatgatgaccaataaaactctatgaatctttgttttggtggcctaagaagagcatctgaagcttgaaatatggctgcacaaatagttaaaccttacccatcatcggcgagtatataaatcagatgaccatggaaaggtgggaggtatatctgtggatctgtcacagagaaaccatccaatccagctgcccatgagctaagatcacacttccaacatgtcaaagagagggcatgatgtgtgtggttcttgcatacacactagctaatgtcggactctctccctacatgaaggctttgtttgaaagaggtacactccatactagatgaatttgatggcagcgatattcatcgaagtagaaaattggttggaacacttcataaacaaggttattgataatatataaagacgaatttggagttaacgaaagctaccaagtgcattttactcatctaggtcatattgttaggtttacaattaacacgcaaattattttaatatttgttatgtatttataatttctaagaataaatatatatatgtggtttagaaatttcactgaaaattagctacttgttaaattgaaaatttgtatatttttcgaatgttaatttttttataactacttaaaaaagaagaaggtttactttttttttattttggtataagaagaagaaggtttacttgcatattactacccgtttttttgatcaaaaaatacatgttttatgtcagatcaaatcttgtacaagatgaaaattttgactactcactaaaccgtatttgtttagttgtttaccattcaaatctgtcgcatcatttttacaaaatatggtaaccattttcattatccatatttaattactttgaaataaagtgtatatttgataagaatgggttatagcatttccacgcgcacgatcagccgtccgttcattgacttaaacttaatcaaatttgattggttttttttgtcagcttataatgagtcattagttatttaatttacatttgattaatgcataaaataattactaatatcaacaataactgtcacgttcaacaaccgagtctctcattctcatttctccccttcacacctctcattttcgttcccctgaaaacattagacttatttaaaaactcttgttcgaactcactcaaatttatggatggaacttattcaaagtggtagactatatattaagtatttacatgaacaaaatagtaatcatttttctctaattggaggattaatgacttcgatcctttttttttgtcaaacaactttcattcactattaaactttaaacgagagaagttcatacaaattaaaactaagataacataaagaaaataaagatagaggctccataaattttccaatgctcaccaacaagaagtttgcaaaatttgcaagtctatagactaatgacttcgatccttagtctatagacaagcacattaccttacattagctaaaaatccgaataaaattgcacatttccttatcttatcatacatgatgaccttggttaacatgtctattggattatagcttctcaagatatttgcatgcatcaacattccatctttcaaagttggtataatgaagggatatatattttcctcggccatgatccggctcttgcataccaatatagtcacttcgcacttgatagatcaacgatattctgtaattttaagtccgaacaaaatttaagactagcaaaagtgtaaagccaacaatataagattgtcttattgttttttttttttttttttatgttatcggattgttttttgtcaacttaattttctaactgctttcaccacaacgaccgtaactagtaagagaattgttttcttcttgtagacttgctcaaacaaatccttaaatgcaaaggtattctatatatacaccaattatgaattaaacatccgtataagtccatgcttttgggatcgatacatcacaatgataattctcctagttattttttttcttacattcataacaatatatactcacgtcacaacttgacaaatctatgatattttgttactttgaaacccaacaaatttttgtaccactaaaagtgtaaacatattttggtataagattatttttgttatttgagtcttctttgtcatgtttgtttttgatattatgttttatttttcaacttggtattctctaaccgtttcctccaaccactaaaacaaattgttaaccgtttttttaagaacttgaaccaatcatagcgactgtaactagaaagagattgtttttcatattttagacttgctcaaacaaatcctcaaatgcaaaggtcttctatacatcaattataaattaaacatatgtataagtccctggttttgggattgatacatcacaattatattttttcctagttgtaccttttccttacattcattattttcttcacaactctatattattaacataatagatacagttgaacctggatttatctcccctccaaggatttgtataggtctgatcctcttctttttgtattgaattaccaatgactaaatacagattttaactcatgcttaacagatatagagaaagacaaagctttctttaagctctataattagctgttcatatctatgggtatcaagacctggttacccaaaaaaatactttattctaaagatggttataatgttttattggttgacatttaattatatccattacttctcatgatcctatatataatacacacatcaaactcctctcaatcattccttcaatactctcacattacttatcggattttaattaagattaattagtctattgttaaagtcgcttagtgatcaaaaatggaagccatgggagaatggagcaccggcctaggcggaatatatacagaggaagctgactttatgaatcagctccttgcctcctatgagcaaccttgtggcggttcatcttcagagacaaccgccacactcacggcctaccaccaccagggttctcaatggaatggtggcttttgcttctctcaggagagcagtagttatagtggttactgcgcggcgatgccacggcaagaagaagataacaatgggatggaggacgcgacaatcaacacgaacttgtaccttgttggtgaagagacaagtgaatgtgatgcgacggaatactccggtaaaagcctcttgcctttggagactgtcgcagaaaaccacgaccatagtatgctacagcctgagaactccttgaccacgaccactgatgagaaaatgttcaaccaatgtgagagttcaaagaagaggacgcgtgccacaacaactgatgtaagttgtacaaacgttttttttttttttcagccgaaaccataattctaaatattttaatgttcttgaaaccaaatcagaagaacaagagagccaacaaggcacgaaggagccagaaatgcgtagagatgagtggcgaaaatgaaaatagcggcgaagaagaatatacggagaaggctgcggggaagagaaagaccaaaccacttaagccgcaaaagacttgttgttcggatgacgaatcaaacggtggagacactttcttgtccaaagaagatggcgaggactctaaggctctcaacctcaacggcaagactagggccagccgcggcgcggccacagatcctcaaagcctttacgcaagggtaatttacacataaactttaaaaattaaggcttcgatgttattcaaacatgtacacaaatgtgatgatgagtcttatgtatatgcattgtacaaacataacaaaatttattatgatagctgaaacaattaaacaaagtccattgtatgatggtgcagaaaagaagagagaggataaacgagaggctaaggattttgcaacatctcgtccctaatggaacaaaggtacatatgtctttcattcatgcaaacctttttttttccatgcaaacttatttattactacgtaaccacatcactttttactcatttcgtttcatgattactaagtaaattaaatgtgttaaatatgtatgtatcaggttgatattagcacgatgttggaagaagcagtacaatacgtcaaatttctacagctccaaattaaggtacgttaggttctcaatgcttataatataaattaaaccatagaaaatattgtatcaattaaagatagagaattaaatattggttataatgaataatgttatgttatacagttattgagctctgatgatctatggatgtatgcgcctattgcttacaacggaatggacattggccttgacctaaaactcaatgcactgaccagatgattcaagagacaccttcggattttaattctatttatttatatatatatatataatttaatactagagatatgaagagtcacattttgacgttttatactctaaatattattttatatttgtatgtcgagttatgtccaacaatttttttgattcttgagatatatattggtgtacgatcatcgttttgataatggattcgtttattttatctcttttttttgtttgaattatttgattcgtttacgtcatacacgtaaatgatgtaatcagaatttaaattaatactaagcgttcaatatctttggattgtatgcttgagaattttatactcataggatacaatttgggactttaattatatttctgatattgcgttcaaaaatcgaattttgttatatctaatttgatcttgcgttcaaagacgtgacaaggtcaaaagttgaaggcaggaagagccgacaggttggtcaatgatttgacattgtttcagaacttggtatataagatgaatgagttcccaaaccctaagattgattagtaaaatatcttttgaaattaaaacttatcaacaacataaaaactctaaaagtctctcatgcgctgacacatcagcttttttaagtgttctcagcatgacacctcattaaaatcaacaaccaatcagaacatttcgattaatacaccttatttacgttgaccaataaaagcttaccatttttctatgtcatctcatctacttaacaaaattaaaattagatatgggtctaacccaaccaaactactttcaaaactaaaatctatataaaaacatgggcctaaaatttcttatcaagaaaacttaagcctaggcaaataaactgaaccgaatgtaccaaaccgaaaccgatgcaaaaaaaactaaaccaaaccaaaaatttgaaaataaccaaacggatattaaattctataaccgaaagaaccaaaaccgaatagttacaaatcaaaatattttggataaccgaaaatatccgaaatataatataattatattttcaaaaatattaattatttataaactaaataattaaaagttatttaacagtagaaatactcgaaataccgaaaacatataaaaatatcaaaaataaccaaaatatgcgaaaatattcaaagaaaaataaatgaatgaattttaaattttaaaaccaaaagaaccggaacggaaccaaaaccgaaccaaaatttaaaaataattgaatggataataaactttataaccgaaagaaccgataaccgtatggatacgaatcaaaattgaatggataaccgaatgcccatgactaagaaaccttatctaaaggcctgactggttgaaacgcagcaattcggttgcgactgtaggagtttacggaatcggacggttgcagtttcaagcgttataaaacattttgaacgactggtttagtagttaaaaattggtgcgttttcgggagctttatgactggttaatggatttacgtttagggtaggaatattcgggtttctgtatttgtcagaaaaattacggatttacgtttttggtgggaaaattatggatttacgttttacagcgtttacggttatgaatacgggagtttgtgaaagcggacggttgtagtttcaagtgtcatgaaatattttgaaccactgatttaatggttaaaaattaaagcgtttgcaagagttttatgattggttaaccaggaggtgctattatggttaaactaaaaagaacaaaaaaattataattaaaatataaaataccaaaaatattatattattatgataaatgaaaatcttaaatataactaataataaaataaaattcttcctatttattcaaactaattaaattttatactcaaatatgcatttgcttcataaaaaaaaaacatcatcaagtaatatgcaaattacaaaattaatggttatgacaaattaaaaaaaaaaaaatttcaatttttgggtgttccggattaataatattattacaatacttagttagtatcttgtcattcttctgtttggtttcatactatgattttgatagagaaaataaataacattttaagaataaaaatcaccatcatatatttaagtttttgggagaagcttacactgaaaagatgacattgttgatgtaatatgtaaacaagcaaaaaattattacaactaagatgtcatttttgttctttaaggtctaattaaatttatctctgaggtatgattactctcaaatctccaatgatcaattcgatccatgtccctatttttcttttgaaagtgaatctattatctatgtttttggttcaagagcttattttctaactgaataaaatcttagcataagataacatcgaggaagaaggtcaatggaaaaagaatcttaaagaagagacattaaagatttttgagtttcttcctcaaaatattcaaggatcttatcagatttactaagtgtcattgtgtattttaatcaataactaataatcatgtgagtacgttctatactcctaataaaaaaaaaaatcaattttgaaattttgaaaagcaaacaaacgtaacttttagctttttatgtctcttcatcatatgaatcaaatatgcatgtggaacattaaaatcaaagatgataactccatataacatattcttaagaatctaaaatgactttaacctcaccagaattagcatattataatttttaactcttttcatttttttgttttttaatgactgttctaaatagatgttcgtaaagcaaaatattagcttccaaaacttataaagactatatagatcttactaaaaaaaattaacaaatgcattgtgttcccaatcactttttgtaatgaatctttttgttctacatatattatgaatcatgacaaataacatttaataaattatattaaagaaaaaagcccgcggcttggcgcgggtttcgccctagtatttgtaaaaacatgaacaagatggtgatcatatccctctgccaatctagaaacatttcttatctcatctttcattatgtgatttatgatgtcttcttccattctactagcttctccttccaatattaagcaagtgtgtagttttccaacttgggacttagggtagatttgttagtttggattgatgattttagggttaggatacttaagattcattcacttggataagattaatggcaaaaaaaaatcttagttatcttgtcctaaattattagataatttgtgcaccatgaatatcttatcaaaactgaatgagtaattcgacttatatcaatggaagaaatatcactatcttactggctttttaaaaatataaagttacgttctcctatgtttggtttggatcaagaaactttctggtatctgaagtccgatcctaaagcaagtggttcactacaaaataaagattctatcatttttgtattaatattttggtgaccaatccatactaatccacacttttggtgaaagaatagagtttccaaatgcttacctcaataatatatgctctaaagtaattataaaaaacaatttggaaacatttactatataaattataatttagttttatttttgatttaatagataggtaatattattgaatagccaaataaaatatataaattaagaaaatagcagagagaaagatttttgtggatatttaagtaattacacgtattttccaacatgtttccgacaagttaatctaacatatagttagggcttgattagttctccctctgccacccgcaaacgcagcgtttgcgggtggtagcggttgttagcgattggcaccaatcatagaaaccgctcgataccgctttggaccgctcgaaatcgccagatttcaaaagctcattcccgcaagcgtttgcggttgcgggcggtagcggttaggttaaatttttttattattttttaattaattaaaataatcatgtctttcacccaaaccctatatatcttattcttattagaaaaccctaatcaatatattgtaaccctattctctcaattatggcatccacccaaacagaggaaaattaaaatcaaaatcaagaatcaaacgtaagtatgatctatccattcattagctagtgtaattctctgagtatttcatggcatcgttgttttttttattttgtatttttttttagttttttaattgaatacatgtttcgatttgttttctcaattagaaaatcatttggtcagacgagatgacccgtttcttgttagaactgataaccctagagaaacaagctggaaattatagaggcaaaagtttgattgagaaaggaaaagaaaatgttcttgtgaaatttaaaaaacgatttccaataaccttaaattggaacaaagttaagaacagacttgatactttaaagaagcaatacgaaatctatcgtaaaatcattttttgggtcaactggtctcggaactaatcaaaggacaggaagtcttgatgcccctgatcattggtggaaagataaaattaaggtatgttatcacatatgtatatgttaatttcttattttatattcttattttgattggcttttgtttttggtttattgggcttatcctgaagctgctaaacttcggtcgcatccactgcggtttataccacttcttgatgtagtcttccgagatgaaactgttgtcgttgaagagtcatggcaaccaagacgtggtgtacatcgtcgtgctccagtactggacttaagcgacagtgaatgtccaaacaataatggagatgagagagaagatctgatgcaaaatcgtgaacgtgatcatatgagaccaccaaccccagattggatgtcacaaaccccgatggaaaattctccaacttcagctaactcggatccgccatttgcatcacaagagagatcttccacacacactcaagtgaaaaatgtaagcaggaacagaaagcgtaaacaaaatccagcagactcgacgctcgaccgtattgctgcgactatgaaaaaaatttgagttggagatgtgttaaaaatcgtttggatatcttgaagaaactttatcatatgtatagaggcaatccggaaaacccgcgagttcaacgttatttacagtttatcacactacttgatgcaatttttggtgatgtaccaaatgcataaagtattaagttttttcttacaaaatttatttatttttgaatttaatattttatttatggttttaattattaagcatgtttaatttttctaatattatcaatttatcataataatatattgtatttttctttcttttaatagtaatatattatatttattttggttttttatttaattactatcgcacctgctggtttaccagtcataaaactcccgcaaacgcactcattatcaaacgctcaaccagtcgttcaaaacgcttgataacgcttaaaaccgcaaccgtccgtttccgcaaactcccgcaaccgcaaccgcacccactgcgtttaaaccagtcaggccctaagtttgttcattgtctttaaaaatttggctattttgtgcatattcacttttatttttcagtatttttttttttttttacgattctggatacccacgaatatcatgatgttttgtgtggaatcatagagagtataagtatttggacggatcggaatcttgattgggacatccaataattctagggtatcctgttgttgtccatcatccctaattctcgagagtaatgacttgaaaaaactattagaaatcaagtaacaatttcttagttgaaatgactagaaacaaatccataaaaagctctaaaacgtgtttgacctggctatgttagtagtggtccaacctggttaaggtcaaatcattgagactgaataaaaaacattgagatgttgccgtcttccgtaagaagaatgactctatgtacagccagaaaaaacaaaatgtgtttgacttgcaaaaagcactccaacgacccccaaaacgtacacgctacatgaacatcacaaccattttgtccctaattttggataagccatgaagtcttggtttcattagtgcatacaaagtatattgtattatagatcatataaaatggttagtaggcttaaccttatttcacacatattatatacagaaccataacatcaagatttatgatacaaaaaaaaagggacaagaaaaattatgagatttatatttattttgtcgaacttgtgattccataaaacagccatggatttgcttacttttatactttggctcgtaaaatagaactaagaccgtgagataacaaatttgtgtatctagaagtatgttatgcttgaagataacccttgttatctaagtatccgacgaccttttccgccatttcgataggagaagttcctccttcacgtcctagagaaatcttcacatgacaaaaagaaaatagaacaaaaggtaagacaagtgaatgacaccaaaaaagctcagcatcaagatcaaaaaccaaagcatccaattctgttttccaatattattgacatttacctcgcagttcaatggtggctcgtaagggtcatcgatcccggtaaaacctgaagaaacacatcaaactataatgtcatttggggttgtctcattgataggtcatacaattaccaaccgcatttctagagatacctttgatctttcctgcacgagcaagcttgtaaagaccctttggatccctcgcctcgcaaacactaagcggtacatccatgaacacctatttgatcaaaacaaacttttactcaaatcttgaaaacttcagtattataaagagacaacaaaaccaagctcttagttgtcaatacctcaacaaaatctccctcggggagcaaacttcgacaagcgtccctatctgttctataaggagatatcaaactcgcaatgcagattattccagcatccgcaaaaagcttagcaacctctcctaaacagagcaattaacaacacattgtcaaaaagataaagctaacaacaacaaccaatattggattaaagagattaaagctcaccaactctacgaatattctctgcacgatcctcagctttaaagctaagatcacggtttaagccatgcctaacattatcaccatcaagaatataacaaagcttccccttttgatacaacatctgattcaaagcacaagccaaagtactcttccctacaaatttataaatccatagaaacattagatagatttcacatagacacagaaaccaaacttgaagcttgtttcaacacaaacctgaaccactaagaccggtgacccaaatcacacatcctttctgatcaagcaatctctgtctatcaactttctcaacagaacattcatgccactttatatttgtcgagtttccgaccgtagacaaaggtccttgcttttgtcctaattagacaattaaaaccataaaaaattggcaaaaaaatcaaaggttctgggaaaaatcaggaagaacgatacatacccgtgtgaccgttaatggatttaacctcaggaatagatccatttttgttatgactcagagtttgagatccatccatagaaacacaagcacgaacaacaacaacagatcttgaattactcattgaattgctatcgaaaatcccttttggagaagccatcgaaagccctaatagcgatttagctccggcggcgatcatatctcacggtggtggaggaaataaaatataagaaaattggattcagacagaaccaaaagaagaagaaactaaatttgtgtctgaatgtttttaattaggcaatgaggaaaatgtgaccgttaaataaaattggaaaattggatttttttttttttgagagaggggcgattaggttggtgaacataaatggttgttggccacgtttttatgaacatcttattatttgtgggaattatcaaaaccggtaacattggttttagaaactaaatgtatttaatgttgatttgcatccacattcctaaaaatagaaagtgatatggtttgattggtttaaggctttaagcttgaacttgattggtttttcggtaacaaactccaaactcacattcctaaaaacataaaagtgtaagtattcgatagtctatatgcagttgtggaactaatcacgccataaattgcattatacaagtagtgattgcctaataaattgatatttttttggctcgagtttaatcattttagtacaaaaaaaaatatgggttcaaaagatgtaattccaaccgtttatagaaaaagaaaacagaaaaaaatatttgtgggaatttattaggcccaccaatgtcggagagctgtggtagagttttggtgtctggtctagattagaaaaatggttcaatagtcaatttgagttgtttttgacctgactcgtccgagtggtagagttttggtcttggcaccattttcatcagtccgagtcaaatcatctttctattaagctaaatgtacttaacctggatttgcatccagattcctaaaattagaagaaaatgaaagtggaacataatcaggagatgcactaactaaattcaagaatcaagagctaatagattgtacaataataatgttctccggaaagataagctttccaagctatccattaacacaagctttagagattcaaacttaaatgtagtttaaattttagtattaatattgattttttaaaggcgacaaaaacatagaaattatagttttatgcttataaataaatagtgactaagattacaacattaaagtactttaaaaaacatagcctattaataaaaaaactgtgatataagcgaaatgcgcgatctatgaaactagaatttataaatattaaaacaaaaatctttgtaaaaaatttaatcaatatatatttagttacatagtattgcataatttattatattaataccaaattattcaataaatattaactaaatatatatgcaatatatttatccaatatattgttttttgaaatttgtttttgcataatttattatattaatttaaacttgtaaagttaggaatataaaacgtataagtacattttcaaaagtcaaaaatataattcttactttaataactaaaaagaagatgacttacacaaagaatcggaccttcttttgtttagggataaatgaaatgagaatcacacttttccaagataaaaggaaacaattagtcgacaaaaaaaaaaaaaggaaacaattaacaacatgaactctaaaacaagtaactctctcttgtcttgttagccgaagctacttacatcagagttttcctattacagaagtcccatggacacaagtgagaaaaaaaagcacaaagtcactcgaacctcttttgtatgcaaatacactgtaatggtaaaaaaaaaaaaaagagttacaaagatacagaggcgagaaaacatcgtcgttaagggccacatcagttaaaagaacgtgtcaccttgggtccttcccggggaataaatagatggactgttttgctttctcaggcgcgttcatcattcacgtggttcgggatctcgggttggctgtccaatggcatgtactgtgccattatggctctgatctctgagtccatgtattgctgtaaaaccaggggcataggaatgttaaaacaattttccccaagtaacggatatggcaaatacaagattaatcttcgctattaacacaacagaaaacaaaagagcagaagagattaaaaaagcttacccttagcctatatttgtaaacgaggtatgcaccagcagctgcaagtcccaatgataacattataagccaaacggccgcccatgctgatctcacttgtgcacccgtcttgcctagatttcgacaaatagaaccaataacaattggaaaacaggtgggagaaacactatttgaataatcaaactttagacttccatattcaaaaaaaaatactcactgatgcaagtgtcatgatctctgatgtagagaaggtccccgctacaagagcactcatagcttccccatgtgttcttgcagctacactctgggcactggcatgctttcttctctttgcactcattaatgtctggtgcaggaagcacgaaaatccttataagatgattagaactagaacaaagtagtactgtaattcaagttttttcagagggtctaaccttcacacttcttagtaccatctcctttaaatcctggaggacactcgcacttaacactgtccttgtcctgaaggcattacaagttgagacagaagtatcttactaaactgtgagattatacacttaagcgcagaagacaccactaaccacacaagcagagaacgcatgtccatctcgctcttcatgccaacaacctccattgttgattgtgcatctccctggcccgcttgctgcaatgcaaacaccagttcagtatggaattttgacatcaaacgaaagcacagcaaagagacaacataaaattatcaatctctaatgggaaatgatggcatataagtgttcaaagttttagtgagcatgaaataacaattatatcttgaatttcaccaggaagatgtgcgctctcaaaaatctaagagggtaaaccgaaaattttctttacaatgtactgacaatgggttatatgagagctgctagaagaagatcagaatgtcggtctataagtatctaaactattatctttccatacttagattgctactgaataatacaagtctgataaatttataagagctaatcaaagatgacatgaacacttacgttcacagtgactgtaaccatcccctttgaattgcacaccatcaactgtaggacactcgcatactcttccacgaaaagtatcctgcggattaagcagatttaataaagatagcacagaatttattccaagcaatttcacattataccttgcaagcagttatgttggctgatttatcttgccaacaaccaccattgttatctaagcactcgtttgactccacatctgtaaattgtaaaagaagtttacaatacattccaaacatttatttgataagctaggataaggtggttcaggtatgagcacaggcagctgtgggcatcaatcgttaataccccaaatatatccaaatttagatttatgattcttgctcgggtatgggtcagctatttcaggttttggtgaggacccaaattttggatactcaaacccaaattttggatacttaacaacacaagttcacccgatacaccaaaacgtattccaatgtgtatacaggtaaagcttattcagacgagtttgagtgaattccgaaatgcccacaattaggcaagaccaacaatatatacctgtgctgaggcatatcgctggttcagtggtctcctcaaaaccagagcataaagccttgagtactgcactcttctccaactttcctgcaaggaaacatttatttaacaaaggtaaactacaagtattgaagtcttaagttaactatgtaagacaaacctcggtactgtctgttgttgacaaccaaggtaggcaatatggtaacatcaccccttgaacccttgccaacctacataatataatatgtcaatcacaaacgaacggattattcaaagattataactatgaaacgccggaggaaaatacagatgaaaatgactaatatttacttgagcatcttgttcttccttaagaactggattgtccaagtcagcatcagggtctcccatacacttgtcaagttttttactatcaattcctgtaaagacatagtaactatgcatcattctccccaaaattgtctttctttaatttgcatataacagacacactcaccaagagatttgataacggaatcagcacactccttattgtatttcttctccttcatgggacatctgatctggaaatcagtaacataatcccaccagacccaaggtttgccggtttcattcgccaccttgtaaacacaaagctgtctcaagttttccacgaccacatcttttccatcgtatcccgagctaaagtcctgctctggatcaggagcacagtaccttcctttattgatacactgagacttacactgtcgactcaacgtgaaagcatgaggacaataccaagtaatataatgaggtctaaactgcgtaaacccgcctttctcaagaatctgcgccgctcccttaaaatctttcacaaactccatcaacatatcacacttaaccccacattcatcattactattagtccacaactcatactcaacacggtcatcaggatgcggaacagcctctctccagtcaagattcaagttaaccatatctcctccactaatagctttcttcagcttttcaccaaaacctttagtaacaagagcagaaggtatagtaatattctcaatatactttgcagaagaaacatcttcttcaggtgtatccattgtaatcaaaggttcatcaacattatcagctacaagaacagcagaagcacctgctttctgtgcgttccataccttcaaagcgaagaaacaatctacacaacaacaacaacaacaacaacaacacttataaaccctaaggaatcgaatcgaatcgaatcaaatcgattgagtaagagattgaagtacctccacgatcaactaagaggaaagtaggtaaagcaccaggctgagacttgaacgaaatcgagaaatcgctaaattccttacacgatttctgattctctttcggataaaccaccgtaccagccatacttccaccgtattgaggaatcccgaagttaccaattgcactatcatgagttccttttatactctccggcgacgtcacggacaaactgttcttctccaccacgaatcgagcgtcgtttaaaggggaaaccagaagagtgaggagaagcagccatggaaggtaacacagaagctgcttcatcttcaagactccgccacaacaaagaacaaattcgaaggacaaggaaaatgatcaaagatgatatgatagaatttgaaatatattctcggaaggtaaaagacttgaagagtgttttccagagaaaataaatctggtttttcttgttgagcggtttgggtgtgactgggaagactatagatgacccattcaagtcaaacaaaatattttatataacgctatcaagccacgtgttgcacgggttaaatttaaaaccagtaaaaaaattttttaacaattagttgatatcagaaataaatacatgaggaattttaatattttggttacagattgaaaaagagcaaagagaagatatatttatcaatctatcgatttactttgttatttttaagtttttgttctaaaaatatattcttagttttttaaatacggaaatatatttaattctagagtatgtaatactttagaattatccacgaaatttgttttaatactgttctgaaataatgttttttaaaaaaggtgtaaattgatgtaatacacattcatggaatgcatgtgaggatcgaaatgaagatcttattgtgatgatatatacttttctttttgcctctttccatgtgacaaaacaattaatttaattattaataataaaatatgttattgaaaattttagcattagttaatttttctgtgaatttataattagaatgttgtcaaaggagattaaagattagaatatagatatctaattttaaaaaaaagtaaaaaaaaatatagtttcaaaacatgttgttttgaaacctacccaatgaaaattataaccaattgagaaaataagttttggcgaaagttttggattttagtaacaattgagcttgaatggagtatttttgttaaaagactttgaatagagttgttatcctaaaaattttaaaattgttaatgcataaaaaaagaagacaattatcccaaaagcaagttcataatcaactttgcatatcctaaacatagatacataaacatgcaatctcagagcaacaccaatggtaagagaccattaggggctcttcatatttttttaatcataattttgaaatttaaaagtttaagagatttttttggttctttaattttttgtttgtccaatggtaggtctttaagcgggtttcttaaaaaataaaatattattattaaattaaaaattacaaatattttatttcataaaatttaattattaatgtaaatacttaaatattaaacatacatgatataaatattgaaaaccaaaataacgattagtggttagcttgattcccgccaaatttgtgccataaatgctcaattaaattatttttcaattgttgatgcatagtccgagcacgaaccaggctccagacgccataatattaccgagatttgaagccatatctgtaaaatagttgaaatccacttgtgaagaagcggttgattccggttgtgtgaattcggatgcatcaaaataagtatactcatctcgttcatcctcaactatcatattgtaaagtattatacatgctcgcatgatcattcctaccttttctttatctcaaataagagttggatttgtgacaatggcaaaccgagcttgcaaaactccaaaagcacgctctacatctttacgacaaacttcttgatttgtagcaaataaagaatctttgtcaccttgaggaagtgaaatagattggataatgtaggtcatttaggataaataccatatgtgagctagtaagccaaatgatttagtcgtttccgttgatgacgtatttcacttttggagctcggccttatattatatcatcaaaaactagtgagagattaagtatattgatatcatttaaggtacctagaggtccaaaacatatgtgccatatccaaagattttgggaagcaacagcctgtagttcgattgttggttttccagatccacgtgtatattgttctttccaagcggtcgggcaattctttcactcccaatgcatacaatcgatgcttcctgtcatcccgagaaatccacggagctctccaatacgcagtagtcgtttaagatcttgtcgcgtaggtcttcttagatactctttcccgaacaaatatatgattgcttcaaccgaatgtatcatacaagacatcaaagtgttttcaccaatccggaggtatttgtcaaccgcatctgtcgcacaatacaaattgttgcttgtggtgtcttcttgtacaagtgatgtcggcaccactcaaatcttcaggatcctgcaactcaaaactcatttgataagaccaaccacaagttagagaacttaaagcatagaacacaactgaaacacttaaattatataacacacaaactcaaaactcatttcattcatgatcaaaactaaaacacttaaagtatataatacaacctatcataaagaccaaacttattagccgaaacacaaagcaataactaaagtccaaactattagccggaaaagaaagtaataactaaagtccaaactcatttgataaagtccaaactcattatccgaaacacaaagtaataactaaagtccaaactgatttcataaagagcaaactcataagcagaaacacaaagtaataactaaagtacaaactcatttcttaaagaccaaactcattagtcgtaataactaaagtccaaactcatttcataaaaccaaactcatttcattcaagaacacaactgaaataattaaatccacgtattgcaatagacgagtgtttatgtttcaattcatacacaaaccaaatcaaattcatatcaatctaaaaggcaaaaatcaaaagtaataacgactgattatgtgaacacaaaaccctaatttcgtttacatataaaagccctaattatcaatcataaaaccacaattcacgaaaccctaatttcaacaatttctattaaaccctaaataatgaagatctaaacactcaaatcaaatgaatcataccttcagaagagattggagatgagtatcaataaattctccgatttcgaaccttaaactctccgatttggatcaatgacgaatcgacacactatcgccgtcgattgagacggatcgacacactatcgccgttgatcgagacggatcgccacacaattgccgtcttgttctctttgagctaatgatcgagacagatcgatatcggagagatacaatcgccgtaaaaagtcgccgctgcagagagaaaccaaacacgtgaatgcccaaaaaaaactaaacacttgtaaaagattacgtttatcgaaaaacttcatggaccaataatatttagccacgtatgggtccatgaagtatcccttcgatagggaacggcccagatctatttttgcattttctatttaattttgggttttctggaagaacctactatattaagaactctataagaccatccttattgcaagtctcttactataaatcttaggcataatataatcaaaagagtatgtgaatagttaagaagagtttcttagctaaaagataaaagaaagtttaagagcatcattatggttgtctctttgattagttcttaggataagaacatctcattttaactcttatataagagacaaatgacaaaatgtctcttatataagagtcaaaatgagatgttcttagtaattaatgatcaaaaaaaattctaagaactaacctaagaaactaccattaatgaagctctaagagcttcaaaccattacaaaagttcttagttacaattttttcaataaaacaattcattaagattcaaaattaagagcctatcattaaggttactctaagggacttccattgaacgtgctctaagacttattaattctaagtctagtcatgtttgagttttgtctataaagtctatatagatgtgagaagtgtcttttagtaagataatcataagaataatttcaattacaaacttcaattcaagataccataaaaagaaaattaaataaaacatagcacgatttactaaatctaacactcctcagttttctatttatttgatattttaggaggaaaactttattctaaatcaaaatatatggacaaattaaatgaatttacactaattacttcaaataaaaaaagatttgacatgtgaaaaattcccaaatctaaatgctaagaaaagcttgacaagtaacataacttataacccatttaattaatatatacaatgcatataatatatttttttaataaaagactttaatttatatttattctcaatatataaaagtaaaaatccataaaacaaattactcttaattttttttctattataatagagatttagaaaatagttataaacacacaattacattatacagtatactttatgtatttgttgtcacaaatcctttttatatatttatttatttgtttttacattgtctcaatagaattttataatgagtttcgtcgtcgatatctgtttgactttgaataagcgtcgtctatagtcttccactccaatctaagacgttaaacaaaccatctctcgattctctcgggaaaacactccaactacgaatctacaatcatcgagcacatacaaagaggaagatttcaaatccaatcatcaatcatctcttttgaatgatccgattccatctacttgctccttaaatttattgttgatccgtttgaatttggtgtttgttgaggcggagatctcgaagatgaagcagcttctatgttatcttccatggcttcttcttctctctcttgtggtttccccttttaacgaggctcgattcgttgtggagaagaatagtttgtcggtgacttcgccggagagtataaaaggaactcatgatagtgcaattggtaacttcgggattcctcagtacggtggaagtatggctggtacggtggtttatcctaaagagaatcagaaatcgtgtaaggaatttagcgatttctcgatttcgttcaagtctcagcctggtgctttacctactttcctcttagttgatcgtggaggtactttcatcttttcttcaatcgatttcgttagattcgattccttagggtttttatacttgtggttgttattgtgtagattgtttcttcgctttgaaggtatggaacgcacagaaagcaggtgcttctgctgttcttgtagctgataatgttgatgagcctttgattacaatggatacacctgaagaagatgtttcttctgcaaagtatatcgagaatattactataccttctgctcttgttactaaaggttttggtgaaaagctgaagaaagctattagtggaggtgatatggttaacttgaatcttgactggagagaggctgttccacatcctgatgaccgtgttgagtatgagttgtggactaatagtaatgatgaatgtggggttaagtgtgatatgttgatggagtttgtgaaggattttaagggagcggcgcagattcttgagaaaggcggttttacgcagtttaggcctcattatattacttggtattgtcctcatgctttcacgttgagtcgacagtgtaagtctcagtgtatcaataaaggaaggtactgtgctcctgatccagagcaggactttagctcgggatacgatggaaaagacgtggttgtggaaaatttgagacagctttgtgtttacaaggtggcgaatgaaaccggcaaaccttgggtctggtgggattatgttactgatttccagatcagatgtccaatgaaggagaaaaaatacaacaaagattgtgctgagtctgtaatcaaatctcttggtgagtgtttcttcttacaggtctcgatagttgaaagaaaagcaatttttgggagaatgaggtcatattttctatgtatgtccctacaggaatcgatagcagaaaaattgacaagtgtatgggagaccctgatgctgacttggacaatccagttttaaaggaagaacaagatgctcaagtaaattactgttcccacatctgaatttgactcttctgtacgtaacctgttttgggtttgacatattatattatgtaggttggcaagggtacaaggggtgatgttaccatattgcctaccttagttgtcaacaacagacagtaccgaggtttgttccgcagtgttcaacttgagacttcaatatatgtagtttagcttattttataatcgttccattgcaggcaagttggagaagagtgcagtactcaaggctctatgctctggttttgaggagtcaactgaaccagctatatgcctcagcacaggtatgttttacatacccttacccagacccagtggtcggtcatcaaattaatggctggactgtagactatacactagtattacacttaaaacaattattgtgaaagttttgaatttgcaagtttctcttgcatttgacagatatggagacaaacgagtgcttagataacaatggcggttgttggcaagataaatcagccaacataactgcttgcaaggtacttttgatattcctgggaagaatttctattatatctattatctattaatctgattaatttgcaggatacgtttcgtggaaaagtatgcgtgtgtcctatagttgatggtgtgcgattcaaaggagatggttacagccactgtgagcgtaagtgctcgggtcatcttttgaataatttttatgattatgtcgacttatgttatacagtagcaattaagaatggcaaaatattagtcaagtttcttacaaagtaatatgttgtggtcttacagtatggcaagatacaatataatttattgtcagtgaatcgtaaacggatgttttgtttcacatgtctctggtgaaattcaaaatacgatcttcgtgctgatcacaagaactttcatagcaaaatatactcttagatgacttcgatactgtgttctttgccgttgttgttgttgttgtgcttcgctcgttcacattttcatacgtatatggtggttgcattgcagcaagcgggccagggagatgtacaatcaacaatggaggttgttggcatgaagagagagatggacatgcgttctctgcttgtgtggttagtggtttctcctgcgccttgcttcacttttaagcgtataatctcacagtttagtaagatacttctgtctgaacttgtaatgccttcaggacaaggacagtgtgaaatgcgagtgtcctccaggatttaaaggagacggtgttaagaaatgtgaaggttagacctctgtcaaaactttggttaccctattttttttgtcttacttcataaacatcttcttaaggatttttcatacttccttcactagacatcaatgagtgcaaagagaagaaagcatgtcagtgcccggaatgtagctgtaagaacacctggggaagctatgagtgctcttgtagcggggaccttctctacatgagagaccatgacacttgcatcagtgagttttcatcatcttaagatttctagatttctataaatatgcatgtacgagtatgtcacacacgaaaagagtactcgcgcatacaaatagcctctgaatttagaaaagttctctctctctttatcaactgaaattggttcttttgtctggaatttaggcaagacgggttcacaagtgaaatcagcgtgggcggccgtttggcttataatgttatcattgggacttgcagctgctggtgcatacctcgtttacaaatatagattgagggtaagctttttattcatccttctgctatttctgttagaagcaaaagattaatgttttatgttttggttgcctgagatgtctcttaaaacattgttttatgtaacccgatatcgtcttggaattgtatcgattacttgggaaaattgttatgaacttgctatgttcatggatttacagcaatacatggactcagagatcagagccataatggcacagtacatgccactggacagccaacctgaggtcccgaaccacacgaatgatgaacgtgcctaagagaacgaaatggtccatctatttattcccccggaaaggaatcaatgcgaagcgttcttttaattgatgtggcccttgataccggtgttctttttcgcatctgtatctctgtaactctttgtaccaaacagtgtatcctatgttcttgtcaattgtgtccatgtgacttctgtaatagggaaacttcgatgtagctacggagaactggacaagctagtcaatagaatcaaaacatcaaagtgttaaagttaaatcttttagtcttggacaagttagacgactctctctttgtagtttacacataatgtcttaagatttatggtaaattaagacaacatcagatcgatatttgtatttatcaaaccctggagttgggttaaacctcaaacacacatttaggttccgcatagttttgcttagatgtttcatgatagtcaaaattattaaaaattaatagtcgataaggtaatacacatgttttgtaactcttttcctttgttgttggtccaatggcacagtatctttgtaactcagttaacaaacggtggggatgcaaatagagattttaaagttgcttagtttcgtattacttgcagatcaaatagagatttcttaaccaaattcttcaaatgagtattacttgcagatcaaagttaaggaaccgagagtcaaagttaagattcaatctagtttgattaaaataaaaaaaaatctgtaagaatttattgtaagggaaaaatagtaaaatctctagtttaagcaaagaaaatggtagtgaatagaaacaccaaaattcaaatcgagttcagctttctctataacataccaaacaagaagcaaaaatgtaataaaactaaacttgtaattctgcttgttcttctcttcggcatggagcaggaaccggtaccaaactgggaacaaaggtacagtgcaaaggccaaggatcaaccacacactctatacgagttttactgatcaacttactatcccccagtatatagatccaagcgtgaccagtgttgtcacgagagcacaccacaagccttttaccttcgatgaagtaacttggattagagaattttaccgtctctactaaatcaggcaagttaggacttgaaaaagtcatgaaattcttccaaaccacgtcatcaccattctcatggttaatcttgttctcggtcacaaaaacctcaatcttctttgtcaccatgcattgctttagcaacgaaaaccgatctcctctaaagacaccaaggacaagagcatccccatcatggtttctcccaaaaggtaggttacaaaatctcacccatatgctgttcgagaaaccgaatttatgaatgtggtagcacaagggatcagtcttttcacgaaaacaaacccaatacaaatttccattcaagcatacagcagtttgaacattaatcacgtttgtgttactattagtagattttgacttgtggtctatccacacatcggaggaaaagtcatagattttccacaagccagaaaaagcaaccatcttgtacttcttattgtcgtatacaatgccgtcgaataccataggagaatggtttaaactcggctggatccatctactctgtcccaaccaagggttccaaacaaccgcaccattgttcttaacacataccaacaactcattgcaatcaaccaagttattaagttccaaagattctaaacctggaatacctaagggtaactcacgtaccactatcacgggatcgatgcttaccgaataaatcttggatttggttgctaagataaaacgaaacgtcatcttgtggttgttgatgaacgtcttgtcgtcgaaaagagcgttccattgtttcgatacggttctgaagcgaacgagagatttaggtgggacacgagagagtatctcttcaatcaactcccatggaaggtttttcagatgcgccatctctttacctttttttctcaggtgcgctatctgtttctcctgaattagggttttgcttagtttcttctctcatatattaaaaggagtaaaaaccaacatttaatttgttaagtagtattatatcatatgtcagtggatataatgaacaaacaaaaataaattcatctacgcaaaaatgtctaggtgatcattagacacgtactatccctattgtacaagacgtcctctatttccaatttcattaatttttacacgtacgttatcaatattttgaataatactaaggaaaaccaagaattatattattatttttgttttctataccatttcgattttttttcaagataaatctcctaattaagatattcaaatagtttttgttttcttttataataattaaaaatgaaaaataataaaatatgaaaacaatagatttgagagataagcatcaaaactctcttttaatgtatagatgatattttgttgcatagattataagttctaaatccagttacttggaattc

SEQ ID NO: 226 - DNA, 85214 bp, Arabidopsis thaliana
aagctttacaaactttgcatatttctcttcccgcatcagcctcccaaaataacatgcaatcatttggacatgcatgaattgactcagaagtcaatcctaatttgcgaacaactttttcatgtcattaaatgaacctggcaatctcgcatgtgtaaaagcttctttcagtaaatcaagtaccatagatattcccttgtcgctaattccacacatacattcagtggcggatctagaaaccaaatttatatggggcacatattatatttaaaaatattatttatataataataaaatattaaataaatatgatatttacccttaatgtgtttaactttgaaatctaaagacactaaatcaaaatgcatttaaatatacttaggtacatatattattggatatgtttaatatatataaatatgtatatttatttatttatttttaaaaaatttgttaattagaaaagtattgttacaactcatgatagaaaatgtaaactattaataaaaatatacattacagtagaaattgatgatttaaaatttgttaaaagtttaatttaattagaaagataaatataactgaaagaaaatagtttcatataagaaaaataataaaataaataaaagaaatgcagctaatgataaaggagaattaaaacatgtaattatagaaagttaccaaaaaagtgaacacattttatttataaaaaataaaatgtaaaagaagaaataaaagcaaaaagaaagtgtaaggagagacgtcgaactcgtttacataaggctttgaatgaggcactaagtgccaaatgaactaaaagaatccaaatggtaagcttaaatgttaagttttttatcgattagtgtggggcacatgccccacctcctgccaaggtatgtccgcctctgcatacatttgatatggtacaacttcaatataaaggacatcttcgtgaacttagtgcatcctgtatatagctctagattaaaatcagcaagtaactcatcaaaatcttctcctttttcacaacttccacttgcagttgatggtctatcagtgtctatagggttctcagatgatccagcttcatatccaccatcattatttgtactaatatcaagaaaaatatcatccaagagagtcctagttgaatctaattcaactgaagcaatatcagaaggcggtacttttgtattactcgtgacacatatatcctctccatgtattactcaatttgtgtaagaatttaaaaatccataacacatcaaatcaccattaatatcttctcttgaattagttttgaggagacaacaacggtaacatggattaaccaaatgcaaaatccaataaaattttcacccccaatatgtaatcttgagataaacatagtttgtttatccatgatctatccatcaaaatcttaaaagcaaaaagatttgtatttgtaagctttagaatttgacatataaacactaaaatttcaaaaccttaagaatttaaaaataaatctatctaccatgatcatgatctccatcgtttattctgcttttagttgaaatctaattaaaagtaaatgtatgaacgtgtgatgtgaagaaaaaacttaattgtgaattgtgattctatgattaaagaattccaataattgacctgaataaataataaaccattcaattgaaaaatctaggattagaagagacgattatcaagccacaattgacctgaataaatatataattgattctatgattcgcgaatagatgccacaatttgcacaaaacttccgtgtaatgattatcaatctaatttttgtctaaaaccagaagaagaacaaataagctagcagctaggtcgtatgtagtcttcttctacactacttctttcttttcttttttttattattgttatttatattaataattttaacatcagtttatattgatataaattttgaatcatttaaaaaatgatcttaccaaaaattaagaaatacatcagttatccaaatgatgaaaatcataaattttatatcaattaaacttaaatgatacaaactgataaaaattgaatcaattttatttaatcgatgccaaacaaataattataacatcatttagtctaattgatgctaagacatatatatttacttcagttataaataaatgatttaaaataatatcatttaattttgtgatacaatttaagtgatttaatatgatcttttttttgtagtgcgtagtatcaaaatgttgttacaaaaaacaaaataaaataccaactttgcaagttgatctagttggacgtggccataatcatattctaaccgtattttggaccatactaaaactctaaccatacaagatagtaaaaaactgtaaccagtaactagaaaatattttagttatggtaactataacagttaattaactttaaaattcaatacgtattatttttaactatccgttaatttaccgtttatttttaaatatatatatatatatcatacagtgaaaaaaaactgcatatcgcaagaaatcagaatattgatttatgttgtcggcaagactatgtcactattcggattctaactcattatatgttattcactaaaaaaatagattacatcaattttctaattatatatagtccatttaaatatccaaatttgaatccttctaactttgactacactttaatattgtatagctaaatagatatatttcttctaattgtttatttactttccaaatcattttatttataatcaatctttgaatattttcacttgtatatttctaacactactccatctatatatatagctttatgaaccttaaacacttcaaaatcaaatcgcaaacagttttaaagaaaaataaataaaaattataatagaatcaaagaagtctctaaagctataagacatgaagttaattacattagtattcatcgcttttgttttgtcgtctttggctccgaccaaagcagtggtggttagagtcgaggaggaggagaaagtggtgtgcatagtaacagatcttcgagtatgtctgccggcggtggaagccggaagccaaccatctgtgcaatgttgtggaaaactgaaagaacaattgtcgtgtttgtgtggttatcttaaaatcccatcatttactcaatatgtatcatctggaaaagctcaaaaagttttaacagcttgtgctataccaattcctaaatgttaaagttttaaattattactagatcataacccgtgttatagacattaatattttgtataaattaaattgtatactttgttatgtttgctatgtttgtcaaaattatttgttatatttgtaaaaatttagtaaaatatattcaaatataattaaatttattaaaacttaataaatttaaaagttttttttgtttggagacgcactatctacatacaaaatacccgtttctatttttagggcctgaaactttttatccaaactgacccaaacccaactggacccgacccgaaccgaatatttagaattattctattaggtagtaaatcatatacccattaatcccaaacccgaatgggttctacccgaactcgaatgggttactcatatgcccagccctattctctgatttaattatctaaaaaatttcaataaaacatatgttttgctgactactttttattcaaaaaaatttacatcctcttctgccaaaatcatttcataagacatcccaaaacccttggaataatgattccataaatgaagaatcctaatttgaatataccaagaggttttgaaaggttttaagtttttgataggtgtgtatgtgagaggtacatccatcgtgatggtaatctgcttatttataattttaacttgcattatacagcaggtaggcttatattttacttaaactaaaaacttttattgtaaagttgattataaatatatgatattattttattttattttaaatgtatagtaaactgcgagttgtatatgttttgttgatattatttatattgtttagtgtttaaaattatatacttgtattttgattgttaattttatagtttcacctgtagtataccatcttgtattaatattgatttaaacccgtcaattctaggaattttcaccttgtattaaaaattgaatcacatcatacacattaaaaaatctaatatgataattcaaattgtggcatatgcgaaaaaactctaattatttttttataacgatgatattattttttcacaaaaatagaatcatataaagatgagaggtgaactataagaattaataaaaaattaatatgataatttagatatcaaatctaatttgttgattttaattggttacttttttggaaattaataatgtatttcgtttttgagttaaatttaattaattagtatttgactttttaatttttaaagaaatgaattaatttactctttaaaattttatttctaatggtatacctatgtaattacttacaaaaaataaggttatatttaaaatgtacttcccaaataatatagtaggatattagagctattagtgttaaaattatcaaattaatatatcttctaatgttgcatataaagttataatgctgatcattgggattttattaatttgtcttggtttaaccacatttatttgctttcttacaaatattgctttagatcaaaagaacagtggaaaaaaaatcacgtacaaagaaaatatcttcaaatttatgttatagctatacacctaaattgttcgttatttttttaatgcgtaatttattatatatagttctcatgttatttggtcttcgcatgtaattttagaagttttgcctacttatatatatttatttaaaaaaaacataacaaattgattctcatgtttctatttgatttgggtatctaattttactgttatttagtttctcctatttcttttttctttcaaaaattttgaagaatttattctcttatttgtttttagaattaattttgcgttgtaccatatatttttttacttcaagcaccacccaattgccaacccttctaggacctggatcctactctcccatgcagatttagattgtcctaaggaagatcgagagccattaagatgtttcttggaaccataagcacccgctttatgacctttatattccgtaacagatctataatgtttttttactaggacaaaaatataaccaaaaaaatcacattaaaatattaaataaaacataaaaaattcataaggaaacattaaaacatatgcaaaaataaaacaccaaaacatcttacaaatacatcttacgctcacttatcattttgaattttttttcaaattttttaatgatagatttaaacaattcatttttaatatagcaaacgagacaagatatcgatataaaaaactaaaatcaaaactgaaaccttcaaaattttacatttacaatacgacaataattattaaaaatatataattcactcaacgatttttgttttaacttttaaaatataagaagaaacgagagaacaaaccaagacttggattctaaattaaatttttagttttaattgggagtcaaataatctatttcaatttggaaaacctataaatgagctactaacaaaataaagtaatatgagctttagagtttgaaagtaatctcacttggaagatgagggaaatttttgaatttcttatagggatataatataaattctataaaagttaccttcaaattaaaataaaatcaaaaagttagtggtggcggctgtctccttaatcagtgtgggtctacccctgtttgcactacttcatgtacctcttttctcgtgttggagctaattatggctatgattttttcatcaacgtcatttcatcttttgatagtaaccaccatatcggctattaatctgttcgtaggagatctttcgactaactggaattttacatatgtcaaaccgttttctaactttagtctcaaaactctcataaaatttatatttatttatttagttatctttttttatggcattggagagtacctctctatattttgttttaaactttgagacttttaaatcctactctttgtaatacattcatctaattttaaaaacatatttttaaaaaaatttaagaaattgaaaagaactgaaaaacaagaaaaataaaataaaaaaaattcgcacgtgtgtgactgtccgaactactaacggaaaagagttaacgaggtttatttcttccgtcaactcttgtttggtcatcacaattcgcacgtacgaaaacacaaaacacaagcgaacactttcgataaacaaaaaggaaaaacaaaaaatccctttagggcacaaaacaaagcgaagaaaaaacacttcttcttcttcttcaacaacaacaaaacccaatttcgcggctaaatcaatcgcttcttctactggtacgtacttactctcttaattcatccttcaatcttcgatttacctttctgggtttcgttttcctcaagtcaatttcgattgatttcactgtttcttcgataaagcttcttaatactttataaacctcggatcttctcaaatctctcttccttcttcctagaatttgtccgaaattacgattcttcaccgactctttcagaaatttatgtttgattttactttcttagttagtcaatttgttcaacgtatttgctctagctcgctcaggttatctacctgaacttcttcttctcttacttcgatctcaagaattaatgtatgtctttgattttgaattggggttttttaggtcttggaattgagagaagagaccagtttcgctggatctttgaatgaagctggatttggattaagttcaggtgtaaatttgttggaagatggggtcagatcaatgtttttcgagattgaattcacttgagattaaagccctaatttatcagaaaattgggcatcagagagctgacacttacttcgaccagctcggaaaattccttacctcgaggataagcaagtccgagttcgataagctatgtagcaagacggttggtagagagaacatttctctacacaaccgtcttgtacgttcgattctgaagaatgcaagtgttgctaagtctccaccgccgaggtatccgaagaaatctctttacggggatcccgtgtttcctccttcgccgaggaaatgcaggtcgaggaagtttagagaccggcctagtcctcttggtccacttgggaagcctcaaagtctcactactacgaatgatgagtcaatgtcaaaggctcaaagacttcctatggaagttgtctctgttgaagatggagaagaagttgagcaaatgacgggtagtccgagtgtgcaaagcagaagccccttaaccgctccactcggtgtttctttccatcttaagagcaaagctagatttagtacgtacaatggtatcaaccgtgagacgtgtcaaagcagcggggagttacctgatatgataacattgagagctcggttagagaagaaattggagatggaagggataaagttatctatggactctgctaatcttcttaatcgtgggttgaatgcatatatgagaaggctgatcgagccttgtttgagtttagcaagtcaacaaaagcgagcggtgtctaatgtatcgatgttggatttccatgccgccatggaggttaatccccgggttcttggagaggaatggcctatacagctagaaaagatctgttgccgtgcttctgaagagtaaagttgtagaaaaaacgccgtaatttagcgatacaccgattatcatatttgattgacagatttggttcctttgcctgagattctttcctttggatttgagtggaattgcaattagaaatttcttgaggaagctttgaatgggaaacaaaggttcttgggattgtacaagttctgatagatataatatagtttaaataccatttgtttaggtgatatctttacttttttctgtattttttcctcacgtctaatgtaacaaattttccatgaaagcaaaagaaagttttagcagttgcatagactctttcctcttacatttcagtgaagcagaacataacttagacaaataagaggaaacaaaacttcattacttcgtgatatacatgtctgacatgagaagttcttccaagctcttacattgtaacaacctaattctacagacagtacagaataattttgaagaatgctcattgcagtttgatgtggcgataactgagcactaagggaggcattgcccgagtcgatgtagaagatatgtgagtgtttcaggttgaaattgcgactggtttttcacggtttgccatgtaagtcatgtagatagtccatacatacgaaaatgagttgcttacaagaggctgcatggaaataaaagcaagagcagagtgagtgcatcctgagataagcagcaagaacacaaaaagtaatggagaacgtaaaaggattgtcttttttgttttgtgtcttgaacacaagaatggcgagtcaaaaggattacctgtaaatgaacagggaagaatctgaatgtgataaaatcacatagaggccaatacatgacaccgttaaagagcgcggggagtaagtcccttttcaatctggcaagtataactgaaccgcgttcccctgaacaaatatcggaaaagcagaatagcttagaacatgtccaagatcaaacaaatctgacatcaagaaatgaattcaagaagcagagaggcgacttgttataaaacctatgtaattcagagtaaaactaagagcagaaactacattctctcagttttgttaattcgagattgcgggtttcttcttatctaaataaccaatcaatcaccacttatcattctcaccattgacacatactagccacgagcaaaactgattaagagttgagtaaaactgtaatggcaagcaacagttcacaatagataaacttcagagttggacgatatcacaattttgtgaagaattttcaactgaattgagacaatagaagaacgaaaagatatgttaaacgggttagtctgtttcttcctatcctaacacaatcctgttcttagatatatacaaggagctttaccttgtagggatgcattcaatgagaagaaaataacagtcataataggcccgtagatcgtctgtcccatagccattttcttaaacgttgtgatcaaatcttgtttaggaaagagtcttgacatgaaattgaaccagtagtgaagtgttggacccaagacaaataaaccatatcctcccatccttgctgttctcaccaagtcataagactcagaagaagttttcgcaatcgtctatacaaagatcaaaaacaaaatgaaccaaccaacgtcagctcttaagagcaagtactcacactgtagaaagctccaaaaaaccaacacactacaaggaaacgtaaccgtagctaatagaactcctcaaaattcacattgcacagagctaattaaatcaccatttcaagaagtctcattcctccaataaaaaaccaaactttacttctcctactgtttgatattagtatcaaagacctagaaacatctcccaaacaaaacttaagccattttatatttgtgaatctcatagctaaagagtacaaatttcacaaaaagacgtaatttttagctaccataattggaaaaggaaactcctttttccagtaaaagccaattgctaagttagtacctgagaagacaagtcggcggcaatgtaaataagagaggaagtgacacttttggtcacaactgggtgtgatttaaccataccaagataccatccaacgaacccaatcctcgacggagatgaagaagaagagaaacccaaagaaggagaaggtgagactcctgtttcttttgctctttcgagaagctgacgtgaccggaaataaggtctcgattgagcaactccggtcttaccatattggtctgttgacgccgccgcgttccgccgtatgagccgagcggtgtcgacggctacgttcctgaacaatgctctgctcattatggcttccgagattttaggggttgttgttgttgttcaggtatcagaaagctttgatgatgactgcaaaaaattgatagatttttccaatttaagtagtttcagtcggtttagctaaaccgtacatataccgagttacccaaaatatccggtataaatggccaaaaaactcaaccactttatggaattagttggggtgggcatttaggtttaacttcggattcggtttgagtttggttccgttcggttttttgggttttgtaaaattctaaccaaactcaaccgaaagtagttgaagttagtatggtttggtttgggtttgggtcaatctatgttcggtttggtttgtttttagttcgtttgattttaattcggttctgaaagacgaatcaatataacgaaacaaaactatttcgttcattattgtttgaacgttgaatttgatcatagttaagttaagcaacaagttcaagttgcaaaatttaagttgaataattcaaataagggaaatttgtacataacattaaaaaaactttaattaggtaactaaccaaaaacaaaatgtatgtaatattctttgtatattctgtaatttggactattgtaccctttatgtaaacatcaaacatacttttcatgtatcttctgtgttttctatagtctctcatctccttcttttttctatatatctcatgattccttcatatttattttgttatggccactatttcttcttcttaaccaaaccctagccttagtattaatactgattgtagatctgcttcagagagatcgaaggacccaaacgattttatcttattgttgccttcactaccgaacgattcttcaccaatttttttttttcccatcttttcatcatttaatgtgcaatttcttagattgtgaattggtggagaatcgttcggtagtgaagacaacaataagatattgaattatcctcacgagcatagaagacaacggacttacgagtaggaaggagtgtgttgtatttttacacctcacatgtgctattcaatgaattatgcatattatagtgttagatatttaataactttatttagaatggtttttcacctaattcacccttcaaataaaccaaaaaaaaaattaaactacaaataattacatatgtactaatatacaatattactaattaattaattaaataaacatataaggttattggttcggtttggtttaaaacaaaccaaaccgaaccatttcagttgagtgagaagaaacataactgaatagtttgagtctaagattggatttggtttgggtcggttctgtttggttcggttcggtttggttaaaatgtccattcctcaattagcagtgccatcaaactagttacaaattataggttcggtaggttcctttgggtagttgggtttaatgatttacacaacaccgtcaataatttctcctttgcctatgatcaattaatgacggtttaatatctttttcctttttttccctataaaaaaattctcacgtgcgtctatcgaaatcacactaaaattttcttttttccatgagaagttttttttctctccggctaaaggaagaagagaaggtaccacaatgcctcctcgcacgggaaaggataaacaaaaccccaggctcccaccggaggtgactcgcctactctacatttgtaaccttccctttagcataacaagcgaagatacgtacgatcttttcggaaggtacagtacgattcgtcaggttcgaatcggttgtgaaaagggcacaaaaggtacggctttcgtcgtatacgaggatatctacgatgctaagaaagctgtcgaccatctctggcttcaacatagcgaaccggtaccttatcgtgcactattaccaacatgcgaagatgagcaagaagtttgacttgaaacatctgttagtcaacgctaactactgatgactcagctgacccgtgagtatcaacgaggcatattcttcaactaaaacgaccttgttttgctattttgaatttattttaaaaaaaattgtgaaaatatatattcgaaccagagacccgttgcttttgttcgttaccattgaacaacaaccatatttccaataaaactgcaactctcatattttttatatattaataaaacataggagaaaatcaataaacctaggaattttgttttcttcttcttcttcaatttttttcattcgaaacacaaacaagaaattgaaaaacagagactgtgatcgagagaaagaagacacaatataacattaagacattagttgaaatccaaggacacaacaattaaatccgaagacacaacatatccatcttaaaggttatacgaatttaaatccgaaaacacaacatctttatagttttacaacgggtttccagttcgaataccatttttacatttaaaaaataaagaaattgatttcaaaatagcaaaccgatgtcattttagttgaagaatatgctacttcaatatatatgtatcaactgagtcaacaatcactagcgttgactgacatcttttaacattgacttgtagttaaacactatattaatagttcatgtagttttcttttaaattacttgtttacgtataaatcggtatttgtcgttagttcacgttgaaaaacacactttttaccagaccaagggcttctctctcttaacacacctctatcctttagagagagagggagatttccggttcaccggaattatcgccgccgcttttgttctgtaatatagaagttttccgactgcagtcagattgttgtttttccgcttcgtcggaccaatctccggttaatccggatctaataagatccaatttggttacttaagattggatcaagttttttttgtttcctctttctacaaggctttcaatccattatcctcttgcgatctctggatctcttcctcctaccgtcggcttgcctcctctctttgatcggagtaacatcttcgccgcttcatatgactctgttgtagtcgaggactttcttttggtctcaggcggagcttccaatttaggagattgggttaagggataaagatttcttcaagtcttctttgagcttctttcagacggaaccggtgattgttcatcagatctgcaagacgaaaactgtagaaggagtacggtggtggttgcttgaagccaacggaggtgctgagtcaactcgcagatttgcccggcgccgactgcttctccttctccttcttatgtgttaacacgtggtgttacacgtggtgttacacgtggtggctccttattttcttaatcttttactttatttagtttaagattaagcagttgttaacctaatcaaggatgtatatgttggagaatgggcttatgtaattttcacttctttgtactgcccattgggcttccgttttaatggaatttggccgactaaaaacaaaaaaagccttctactttacagatgagaaggagagacagacaagtttcaatgggccgaacctaaaacccatatttagatattttgattcctagtttcacatatctataggctaaacccaaattaatactaaattatttgatatttgtaaatggtaaaatggttaattttctagacaaaacgagattcaatctatccagaggtaatatgagttcgtaatatagcgagtgaagtgaaaaatgtaaattttctcgctcttttgtcaaccgtttctaagtatatacgtcattagtatcataccacaaatccctgagcctagtagatatgtcttccaaaccttacctcaatctcttctcaacggagtatgtacatgattataaaacgtaactaacatgtgtgaatttcgaaaactaaataaacggaaaaacatgttgtcaaaagccgtttaccgttagtcaaacaagaaaaatagaatctgaaatcgaaacgaaaacgcaaacaacattaggaagcaacgactacataacatccattgaattgaagcaaccaaaaaaaaacctaatttactaatctaagtcttcctcaacttcaaatacccttctcttttcatggccataacaggtcaacaacaaaacatagacaatcatccaaataaagttccgcggaaacaatccatcagaggaagtgaggaccgatgagctttgcaatctctaggaacccaacccgatctcttccttcgaatatcttcttcagcttctcatcacacagtatttctctcttgttttgtgggtcctaaagaacaaaattagtcatttagtaaaactttgatgcaagtaaaacatcttgaagtaccgtagctaaattggttctttaaactttgaaacctcaagacatgtcaatgagaataatacagagctttctactagagtaaagttttggctacttggttgctatagactataaatcttgcagagaaacagcatccacatttaaacactatagaactagaatttcaagagctgaaaaaagttccatttcatacttagagaacctgaaccaaacagcaacaataccaagaagcagagatcaaaacatcagagatacaaagccaatgacagaacatattaggattttggtcaaactaggcaacaaggttcaagaacatagcccagagaagattattagttatctctaaggatacacatagccaagcaagtaaacgagacgcaatcaaagaatcaaatttgcttatacaaaacgttataaacaactacccccaaaatcatatgaagcaattagtcaccaaaatattttcagcttcctaatctaaagaaaacttacaagttacataactaacaagaagacaacctaattcaatttctgtcttcttgaatccagaccgttcaattttcctacagaaaccctaaaatatcaaaccaccggattgaagaaagcgaaacaaaaccataagagaaaccaaaaccagagtgtttctgagagagattcttggttgttaagttacctgaaggtcatgttctttgatgtaagcccaaatacgcttaagagcttgtgtgcgagcgatttcaggaagttcgacgatgtcttgcatctctggtgaaactggtctaggtttcatgataccgcgtggcactctcttattggttgcggttggctctgaagattccgtcgcagatgttaccgctcgaaccaagcgtagtttagccgccgggtgagaggcgaaccggagagaggacagaggagttgatgggttgcggaaagatgtcgttttgatgcagaggaaagtggagaatgttccagaagaaaccgccattttcggtgtgctttgtctgtgtggtggtggaattgggaaggtgaaaggggttttgtgttatcccttttgctttttggtttttattttttttattcttagtattggagttttgtcttcatcgaggagaaacactatttattgtcttttattttttctaatggacaaattgttaaaagaaaaccttagggaaatttttggttaaatacaaaatttatgcgggttaaaaatataaatatttttagaatctaaaactttatgataaaaaaaataattgacggtcaaaaagaactgaaaatataaaattagaagtgaaaacttcaaaaaatttaaaataaaatcgataaaatggagacatatcaaactaactaaagaaatcagaatttttttaaaaaattgatagaatgtatcgaagatgtctttggccaacaatcatacaaatccttctcttaagaagccaaactttataagcgtagtacaactttttaaactatgcttcataacctggcaagaaaaactacttagagttccaagctaaaccatagaaccacaccaatacaccatagaagcagatttcgatcatatataaaatatagagacgagaagcaacagatcaaaactagataacatcaatcttgaatgatcaagaaaactaaatgattgaacctatgtaaaccctagtgaacaatagaatatccaaagatatagcagcggccggcctgaacatctcgaccatcaaaccaactatcaatatcacatagtaaaagataaaaccgatattcttattgaaaatacctagaaaattacgacaactaatcttctaaaatccgagaccttgcctgatcaaactcctcaaccgtggaagtagatgaaatgctattcgataaacatcactgaaattgttagcctcgtcagaaactatgttttcctcagaaaaattatagtcggaggttttttttgccctcaactgttgtcgctaaccaaacgaaaaaaaaaaaaaaaaaataggttttctttaatttaatattttctgttttttctttcatttttaattcaaaatggcaataatagtgaatatacaaatttttatggctataagatctttttcaaaacatatatatgtgctattatagttaccaacatcttgactaagcttttggagtcattactttacttgtatgtgctattagacataatgtctccaaaaaatgggttataataatcttaatacccaaaaaacttaaacataagaacatatctattttttgtataattagttctctctcaacaatttgtataagttggaaaaatacatactttcacaaatcacaaattgtttagcaatagaaacaaatagatatcgacgttttaatctgattctggatatattggttattaaatacaagagtaaaaacatattgtgagttagatgattatctatcgggttatcatgataacaaagtatatatcaataagtttataatttatgtgctaaatttatatttatcgagttaactcatttatcatatcatatgaagaacaaaataacgagttatataaggtataatatttgtgtggcagataactatttgattaatatgttaactagtatagtaatataataaatttaatttatcaaaaaaaattaaagaaaaaagattgttagatacttgaagtataacgcaacacatgactacacatgtcaagtaaattaaagaatattcagcttcttgatgtatatagattgcatggccacatatagaaagtatatagcgttatgtggtcaacatcataaatatagcatttcagattaaccggtcgactaactccagcgttgaccaacaaaatattcaaaattattttttattattattaaaaaactttagtttttttggtattgcataataactgaacacaatatatatctaatataaatatttttgcattcataagtaatgcattgattcttatactagttagtttttcaatttcaaaactaaactaagaatgtaaaaaaaaaattgaataaaggaatcatttttgttatcaattaaaagaatattaaattcttatttcattaggagataaatcattagaatcaaacccaatacatatgactataagagtttctttttattttttgaaaaagagtttcattaaaacaataatatgcaaaaaatttgattaaataactttttagtctaaattttgcatagtaattttttaaattcaaaattgaaattttataaaatatttaatcaaataagaagttaatatttttaattgataatataaaaccaattacctattaattaaaaaaatttatcaattaaataattaaattctaaaaacactaacaattaatattatgaatagttcatatcttaaaaaaattactcttaatttagatttgaaattgaaaaaaactaactattatcagattcatgcattaaatatatatatatacaaaatatatttatattagatatagaatgtgtttttgattatataataccaaataaaattatctattttttaatattaaaaataaactaaaaattatttctgaatattttcgctggtcaatgtcggttaactagaactagttgactggtgaacttgagattctcggtttataatattatctacatgacgctatatacttcatttatgtggtcatacaatctatatacgtcgagaagctgaatatcctttagtttatttggcatatatgaccatgttttcggttatacatcacataactgataatcttttttcataaattcaattattatgtaataaatgaatattatcatattaaataaattattatatcataaacatcaccacaaccgatagaatcatcaccactaccctctgaaccatcacggcatacaatcatttttgcacaaaaagttaaccatcggtccgtcagaaaacttaacaatgtacaatcatctccatcctccagccttcttctcttccacgatcaccatctttttctgccataacaacgtggatctaacttcaattcctccaaaaagaaaaccttagcggcgatgttttgttttaataatagttgtattcactcaccaaatagttaagatttttgtttatacactcaccaaatacacgtttgtcaacctttttcttctctttgccaaaaaaaaatcatttgctacacttttaaatacttccaaatttgaggatagccacctatttttttttattttttttttaaaattattaatcaattacttcaaatgaaaacaattaaaagctcaaaattttctattattgctgagcatatataacattcaagagaacaaaatgaaaaatacgagaatcaaactattggccacagttcacctgctccaaatctgttgtagtgatgattgtgtctagacattaaagcaggagttccaactctgttgtcgtcctctgtgacactatcatcggaccggtatcatcggaccggtaacacgggctaaagcatcagtgtacctctcgaatggagtcctttccaaatcattaggcataaaccaaattcatccatcatctcattcatacctaaaaatgcatatatctcggatctcacatcatctagagactaataatgagtacaattaacgttgcattcagtgattgaaatttcttattcattttgttgtacgctgatcaaaacttcttatctttttttccgttgaaattaaaaacttttataaaacgttaaaattaaaaatctttataaagaatttgatagaaaaaaatcgcaacgaacaacaaatgcgcgaaaaaatggcggcaagctttttgaagaatgagagtaaacaacggctatacatttggttgattttacagctatatatatatgatgaaatgccagtaatattgccctgtggcacatgaacaataatagcactaacaaagtaagaatccaaaacttatcaaataattgaaattaatattattcgatctgttcaaaagcatccatcgtaaaacacataacgcccaccataccccacattcgacatgctatcacccaaatcactccatcactcgctctcctttactcatttcataaggaacaacaaacttttttttttgtttttttttttcctaaatcgttgttttcaaataaggaaaaagctttgtaactttgtttgtaaggcaatcttatcttatcttttacacattcttactccaaattttctttctttttattcaacaactttgataaacctttctccctccctctattgactttgaaggtttgttttgttttttccatagttgtgtatttagtggtaaattatgatgaaacagacaaattctagtgttacaatagattataatgttcgaatatccgttgaaatctagatatttgatatgatataaaaaacggatacgtaaacttatttgaaaacaaaagaagacactaagaaaactataaacaaataaaggtaacaaaaagtaaatagttacattcatttcaaaatcttttgttattacatgtttggaattagagtaacttaaaagctttatagtttatattgattaatacaactcatacacatcccacatcccatcataattttgataaaatgaagactcgccaacgtgtcaacagatctagcaccgccaacttctcacatggcatcatgggttattattattatacacacttactaaaaccaacttcaatacgacgccatgtatccgcgttttgataataatgctcactttttcctatttaaataaatccttcattttcctccttttacatttcctcactcaactctctcattctcactaacagagagaaaaagcaaaagcaaaaatggctcgatctttcgctattgctgtgatctgtatcgtcctcatcgccggcgttactggtcaagctccgacttcaccaccaaccgctacaccagctccaccaactccaacaactcctccaccagcagcaactcctcctcctgtctcagcaccaccaccagtcacaacatctcctcctccagtcaccactgctcctcctccagcaaatccaccaccaccagtctcttctcctcctcctgcttctcctccaccagctactcctcctccagtcgcttctcctcctcctcccgttgcttctcctccaccagcaactcctcctcccgtcgctactcctcccccagctcctctagcttcccctcctgctcaagttccagctccagcaccgaccacgaagccagattctccatctccatctccgtcatctagcccacctcttccatcaagcgacgctcctggacctagcaccgattctatctctcctgctcctagccccactgatgtgaacgaccaggttagtaaccttttcttctagatcttgtacaatgtgtttcagatctgagatgttttgtctgaacttgaatagatctaaaacggtatgatttagaaaaaagtgaaaaacataattagcgcaatttagcaagaaaatgctagtctttgctaacgtgcaaccgtatcgtgatttgatgattttggcttgtctgcctcgagatcttcgaatcctagccgtgagcgcgtgagtgctgtagtcacgtgactttgtcagtctgcacgtgaataatttaatactgccgcgtggcaatattctttcggaccaaagtagatctagtttagtttagtaataaaaaaacagtccaaagcgtgatggacggattctctaagatctgctgtccaaattatttaactttccacccctaaattttaggatcttttcaaatgtaaccccggattaagtaattgaactgtgaagtcccttggctattgaaatgctgattggaaaccttttgttttgcagaatggagctagcaagatggtttcgagcttagtatttggatctgttctcgtctggtttatgatctaagtggaatcttttgtgactgtgttacttgcatttatttttatgtcgtctttgtttgttccactgtattgcttgggactgaattcttttgggatttattatctttcggagaggatactattgagagcttgagatggagatagcaggatattttgattgcagatacttttgtggcttcatttctcattccatttgattattagtgtactacattccttttctccatgccttatttctttcttttgtctcatcttcttttgtctggccaaaccataactggcggtttcatatgcaataataacatactaatctagatgccaataacacgtagaagtagaagaaaattctaacataaagcagtcaaaaattaacaaatggacatttttcttgttaagctctatatatgtggctcttaggttttatgaagaaataagtaaacaattattgtatcctttgagagtgaaatattagccaggatattagttggttcaaaaccagaaactgagattcgtttaaggactctatatctgcaagtcaaaacactacaacattttgtgtttggaaaaagttgagaagtttgcatgtaccgaccaaccaaaccaaatgttgaacaatagaaatgattgcgaatgtgagaaagagaaacagagcatggcagaatagagaaggaagaatatgatagcacaaagatgtatgagtttaggattattgatatgaaattcccttattttggacaaattcactttcaacaattcactacaaatagactttaaaaagaacattcctagatactctgacatgccatgagtttgttttaaagcttgttaaaactagtaaaatacatgtccttgtaatgtacaacataaatacgtaacaaatttttatcattgatatacattattttaaaaacctttaatttctgttaaggattaatacattttggctttttacataagtgatattgactggaattagaagcgaattaaaagaaaaaaaatccaagtcacacaaatactatactcaaagcaattattaactactatcaaattaatttattttaaaacaaaacataccacataaaaagagaaaaagcttaacgtgtgaagatagatgttttagtggattttcttagttaggaataccaaaatccaaatctcatgggtttctagtgagattgttagagaattttaatgatataacaactttcctaattcaacaaaaatcatcttacaacttaataaatatcaattcttccaaatatttgattcaagggttaatatacatacaccccctaaatattattgcaatatcggcatgcataaacttgacaaggtactaaattcttattgatatcataatgaaccatccaatgggcctgactagtatatcactttaattgatgtagtaaaaaattctttgtgttaattgatgtagtatatatcatttatatttgattatgaagaaagaaagatataaatattaattttgtttgaaaatccctaccaaaaaaaaagaaatttgtttcaaaatagttgaagacagcaatgttttagctacaagcctataactgaaaaatgaatgtgcattagtgtctcactctcatcatccgtggccccgaagctgtctcttttctttggatggtaaaaagtgagaacgagaaagaggataagggcaatggaatgttgaagttgattccttgtcgtcctgggcaatagaatgtatgatctcgatagatattacgagagttgctcatttgcttccgactgtgccgatcttatatctctttttgaaagaccttagaagtggccaaattttttagctgagatggcgacatttggttcccttctttgttttttttctttcttttagtattacttttctttccagccgttttaatgtgcggaccgatagtcttgcaaaaaaggcacaagctcataatagtcttttttcatgtaagcacgtcggttcctaaatggttctctttagaagagagtttctttccgattacttaatagaaatggagttcgacgaaaaaaaaagattatatataacgtaggattctatcactttgaaatccaagtttctacgatatagaaactcaatgaaatccactttagattatatatatatatatatatatatatatatatataaatggttttagcttggttaaaatcaatttggacaagttaactaaatcaaatcaaactcattaaataggatttagtttacaattgtccatggatgtctaaattgaactaaactactcaaagaaaaatgaactttagagtagccagtgaattcttaatcaaagctcacaacaagttcaatgtttttggaagaaatatatcttatgtattaatatccaactatccattacaaaattagagaaatcgaacaatgttactacataaacaatgttgcagtcttttataactagacttgtatctaattttaagatggcaaaaggatatatctattttaaggccgcaaggccaagccttggaattatggccggctctgttattaaggccgatcaagattatattaagttaccaccttggacattttaaatgattttcccaaattacatcttgatgaacttcgtagagtcgtagttgtgcaaactatggaaaatactctaaaacatctgatcttacctggagggatgttgaaaaatgggccatttggaaatagaacaaacaaacaaataaatgagtcctagaatgagagaacaaaagagtcatgtgctagaagtagaaaccgcgttgaattaggcctcaaggagaccatctcgttccccatattcgtctgtttttctttctctatgactgtcaccagcctggttccctctttttcttcatttaaaaaaaaacatataaagaaaaaaaaaagaacatataaaggagaaattctacttcgttatatagattacttacatatttatttttaaacatataactaacaatggttgagtggagatgtgcttttagtcaagtggttaaatatatttgacttcgtttttttcattggagtttgactctactaagttgtgtttcctcgcgtagtaagaattggttatggattagaccgtatcgatctaaagatgtcaaagaaaaaaaaatgtggttgtgtaaagtaaatatgtagattgtggcggattaaagtatgttttgattcacatcattattgttattttttcatgaattctaaatgtaaagttcttataatcttatgttactttttacaaattgtaaggattactctgaaatttggtatcgaattctaagacaaatacaaaataacaatgactgaacaagttgataaaacataatggaaggaataatactgcagttctattaaatactaaagaagttggtagattggcctataaaaggagaataaagagaccacaagaaggtctattattcggggactaaagaaagccaaagaaaacatgaaaataatagtctccatcttagtgttagcctctcttcttctaatcagttcatctcttgcttcggctactatatcaggttggttctaatctcttcaagaatcttcttctctctattttttttttcttcataaagttagttatgttatgattggtttaggtcacaattgtttctttatgctttcgtttccataagaaaaatattacaaatattaactagaacaacataacatgcaaacgagtaatacaaaattcattattatgatcaaaacaatcatgaattagttggacttatttgttaaattccgaaaatctcactaaaataaagtgaacttcatctacatggctttagacgcaaaatctttaagggtatctacacaagtttggaatgaataatttcttgcgatggtagtgtagaaggatctagaagatccacaagatcattagtgtatcttctagatccttttacattgagaagtgaggagatatttgttgtattagaaagaattatagtgaagtaaattttttaactatgtacgatcatttatatacgatacttttattaaggatcttgtggatcttctagatgcttttggtagtggcgcggtagctccggcaccgcagagcaaagatggaccggcgttagagaaatggtgtggacagaaatgtgaagggagatgcaaagaagcggggatgaaagatcggtgtttgaagtattgtgggatatgttgcaaagactgtcagtgtgttccttcaggcacttatgggaataagcatgaatgtgcttgctatcgtgacaagctcagtagcaaaggcactcctaaatgtccttgattctatttctttccaaccaaaaatttaaataaatgaataagagagatccagtaaactaatataaaactataaatggatcttttgtttatgattttttttttttcatttctatttttacgaatttgtcttggtctttttgaagtaagtttttaaatattgaaaagtgctaaaattatgtggaaatcgataatgttaatgaatgatataatatataagtcctcagtttttgtaagaaacttgaatataaataatatttcatcaaacataataaataaatatattgtataattagattggctcaaccgatataaacaattgaatcgaattttttcttctaaatatttaatcatccaaatttgtattgtaccaatgaatgagatggttatgaggactagaagatagagaggagaagaacgtgtttggtaaaataattatgatggagttgagacaacttttaagagattttaaaaagactgactaacgtgttaggttcatcacgtgcttcaactacttcattgtctgcgttttctatttacgctattttgtttgggcataggaaagaaccaaattctataaataatttaggataggtaactctttatcagaattcatttaataaaaatatatatgggactttttcggcatatttggtgtcgacaatcaaaatgttgcttttctcatagactgttcagacctggtgaatatggtgtttttcccaaccgattggccgactttttcagcatatttgacggattttcaaagcgatgggaagaattcttggctttttctttattattagtttcttgcagtgcaaatgtaaaagcggattctttatcgaaaaattcgtaccgaactgcatcatatcacctatgtaaacaacattccacaagaatgactcaattgagctctctttaataaatcggttgacaaaaaattatgtatatatttgggaaggtaaaatttaatgtttaacctttttttgtagcaaaaacttacttgaacagttgaactcatctaacagaaatttgaacaatttttggcacaaaacccgacccactcgtaagttgagtagtgggagaagctgaaggtcttaagaagaagagattgttgcttgatcactacaagtctacaacttacaagcataacacttagttatagcatccacacttcgaaaaagatcacctatctctctaatctctatacaagggagtttcatatgttccggttgcaatgtgccgatgtgatggtgaaaattctatagaaaccgaagaagcgacaaatatatgctgatcgaagaaaacccttgtgctgcaagtgagaataagagaagagaatattgatgaaccctaaacaaaactttaaaagctcctcgacagtgactgagaagttgttcaaattgatacacttttaagaaggcatacattcttgttttaaaattgcttgtttatcgaataacggaagtgttggattttgtttacggtatccaacaagcgtaaactggcgaaaaataaaactaaggcttgactaaggtaaactcttgagccaagcctaaaagggacgggccaggccaaacgaacccgctcgagattgctatttctgagccaataattgtaggacaaactatacttaatgaccaaacgagtatattcctgaatacaattacacttagctttattgctttgcagatccatcacacgataatgcaacgaaaaataattttagtagaagtgatttcttatgttacactttacctcgcccatgaattttcaggccagcacaaagctgcatatatgtgcaagagctaaagctcaaaggctggcctgtctcctagtcacttgcccactttgttggtttaagagtgtcaaggccgctgatacgcatgtaagacaatgttgagatgtataaagatagcttcaagcgacgttctcagacccattggcatcgcatgtcaaagacaggacctccatcagttccattcgatattccaaacctctgagataatgtcccaatagcatgcacctagcaatagaaagcagacactgtggtataagatgtctttggtaatacaaccaaagaaacactaaagtttcttttgagaggatctatttgtgtttgtagtttatacgtaaatatacgatatccatctaaatcctagcaagcaagagaaagagaggtagagctaggcagttcttctaaccagaagagaagacgagcaaggtagtctcgagtcagtgagataagaggctgaaactgcaacgaagtgttctctacaagttcagcacaatcttcatcactttttgctttcaccgtttcagtaggtggaacttctgatgctggaaacttagagtgcatcttcggtgatagagttgccaaaagaccgtgaacaacagaatgaatagtctctttcacctcaggagccgcaggttctgacaactcagctacctgttaagaatataatttagatggtcagagagaaacggaaagataagcaaaaatatcccacaagctcgaatatgtcttcagcgatttttacacaaaccttctcaggttgcaaagatcgtaaatagtccaacaaatcattcttctcttcgccaacaaattgttgcatttgtagggcagcgttctttcgtctcatttcttgtaattcctataatgcagcgacatcatgtcaatggaaaatatggattacagcagtaagaactcattaacctatccacaaaaccaaacaagagatgttcctagccagaataaacaattacattagaaactgcacctttttcacagaagacaattgtgactgcaaacgtaagatatattcttgagcttcagaggatactctgcccaaaccttcttcatcaatcgtttcagaaaggttctgagttctgctatcccttttggatgaaacatgatcttcatcaggaaacgtcccttccatatcatattcagtgttttccgaagcgtggctgtccaagcctccaccactcatatcaaggtttttttcaagaaaaagccgatattcagcattcctcaatgtatacctgtagggtaccaaaacatcagaaagatgcactaatccagaagacatactactattaagtactaaaagctaatttagtagaaaagaacctatcgacaccaaatgaagaggagtataattacaacagctgactagtgaactaagccaactatgtgatatcataatagcagatacacaatttgattctacagagaccattctttgatataagcttcaggacagttgaattaaaagcttagattcagccccacaaaacgaattgactttcatgagaatcataattcagtatgtttcattcaaatgatcataaatttcaagtttcaacacggattatcaaaaccctctttgataaatctcccaactatcataatccaccaactctatgtaattcaagcttccagtttccactatacctaaaggctaaaactaagctagttcaacatcacagtgttcaaagagaaggtatcctaatgaataagtattgatgagagagcatacccagtcatcattgaagataccaaaagcttagacaaaggttcccaaagtgactcaatatgaacctgaaacctatcagatggaagaagacccaacatgcctgagattgttcttttcattgcatccaaagtagtaactggaacatccttctgaatcaaactcacatctaatggctcaatctcttgtataagatcagaaaggacacattttttaggtgatcgagaatcagaatggagagtgaaatcgtcaagagagaagccatcatcgccacaattactactgaaattgtttgaagaagttgtagaagaagaagtgatagtgagacttcgaaatctccgattgaatcgaggaagaaggaagaggaaaggaagaggctttgtgggtttatggagaagttgaggaagagaaagagagaaggaagaaagagtcgttgtcgccattaaaggttgaagctttaatggcggaattgtacgaattttctcttcttcttctttctcttcctcttagtctcaaacaaaccctagatttttcttcttttgtgctctgttttatcgtcagccacaaaacaatccggaacgtgacaaaaacgatgaatacaacaacatcgtcaacgaacacggcttattagtggtgaccggttattgtggtcggtacgagcccggttttgtaattccatgtccggttcagtggtcaatcctttgtgcatgaaattaatttttttttaacaaaactggatagcaaccacttcggctttaaacttttaagattttaactcttacaaaaaaaaacaatcgaaatgatcaatttgcaactttaaaaaatttaaggccatgtttgtttcatcatttagcattttcattcaaattaatcatataaatgattaatttgaatgatgcatttgaatgatatttgtagtgtttgtttcatcatttgatatttaatttaaatgatgcgtttgaataggaaaatatgatagtacgattttggcaaaaaaacatgattttgaagttttggcggaaaaacatgattttacggtttttggcaggaaaacatgattttgcgatttttagcgagaaaacatgaatttgcagttttggcgagaaaacatgattttgcagttttggcgggaaaaaatgattttacggtttttggcgggaaaacatgattttacgattttggcgggaaacatgattttacggttttaacggaaaaatatgattttgcggttttggaggaaaaaaatgatttggcggttttggaggaaaacatgattttatggtgttggcggaaaaatatgatttttgcggttttggcgggaaaatgaatataattttgacgtaaaataatagtccgtgatttcccaatttttatttttttggtgcaatatgtcatttaaaaaaatattaaataaaaaatttataaaaaaatattattattacaaatgttatatttgtcatttattctttttgactaaactatctccggccaaatggttcaaccaagtccatttaaatgagttttaaaaatttgcctaaacttataaagtcatttagattgattatccaagtgattcatacaaatggtatgttaaattgtcaaaaacaaacatcatttttcatttccatctagatgatccatttggatggagaaacaaacaggacctaagtaactttcgtgttcgcattcagtgggcaaattgattccatcaacgaaactattcaattttgttacaaatactaacatgactttagacggaaaaaaataatactaacatggctttaataattgtttttaactccgtaaaaaaaagaattaagtcttctatctattattaattatttatataaataaaacgtatttgttcaaaattttgtttaattttacaaaacaagtatatatatatatatatatatatatatatattcttaaaactatatgagaatcaattacctgacagaaagttctaatattggcaaatgaatcttctgaaaacaatgaaaaataatgatggccaaatttctctcttggttgggtgtagataagacgtgtcggtatctttaattcctatcatttcaattttgggtttatggaccggtgaagactgaagacatagccaagaattctcggattagaaataaaaaactaatcaaagaagaaacgaattaacaattaggtatcaccaaaatctaaccgtaaccgtatttcgtaccgtttattaactgtaaccgtaaccattaaccgtgaaaatagttcagttacggttaaaaaagtatattaacagtaacggttaattaaccgtaaccatatcaaaaccgttggttaacagtacggttaattgtacggttaaccgtatagttaaaattttaaaaataaaattgtaactatgtataattctaattaataattattttactaaaatagtaccttaaatgcccactactatgttctaagttactctactacttttttccctaaatcaaatcataagtaattcatataattattatttatacttttaaaattgtttcttaatgctcccaacatcttcccttcagtattgtttttgtttgtaaatctacatatacatttttgcagccattttgtgaaataaatcctggagttgagacttatttacaatggctgccactcacatttattatttagttttacaaaattttaaaagatattaaccaaacgatatcttgcttaatttgtttctaaaaatctctacacaatcttttcatatattttcaaaaacaaaattccgtgaattttactccacaaatatgcataaattcgatttatagcaaatatttatattaacattttgcatagcaataaaaatactaatttataataatgaaaatattcacataaaaaatcatatacacatacagaaaaagaattatatatatcatcatttaagccgttgctttatttaaataaaaaaaaatacaaaaaattgaaatcatatactttctatgataaatttaaaatctatattagtagtagaaatttaaaatcattcaagaaacggtataacacgggtgagatcctaaaattattgtatttataacaaaaataatttattttcttggattttataatactaatatttagctaacgagataatatagacgagtttatatgggatgacgggttttgatcgatatcaataaagaaaggtatatcacggatgaattcttaaaatttacaattaaaatacaattatacaaccgtaaacacaaaaaaccatataatattaacaaaacgaatataacttgaaacttaaaaaatttagctataaaaaatcgacccacggtatactgcagataaaatattcaaaattttaaaatccaccatacatcattacttaaaaaaatatgtgttttcatatcaatacttcaaaaattgaaacctaaacaatagtactcatatactaaataatacagagattgatatctacattgaaaaatacaaattaatatgatatattttcagttaatcttttaaaaaagtaacattatatttttgtaaacaatatagccccgcggtacaccgcgggttaaattctagttgtaatacatattgttattaattcaatcattataattatgactactaatttatttattagttggtttatttaagaaaaatagtaaactgatttaatatagatatttgaagcacataatcatgtcaaataaatattatttgatatataactatgtatttattttattttattatgaaggttaaaaaatataatattttgcctcatatattaactatatcataattatcgaataaccgtatccatatttaactataatcatatttaaccgtaactgtatttaaccgtaaccgtatttaaccgtatccgttttaaccgtatatataatagttaaagttaagattaaagaaaatctataaccataactggtggttaaaaaaccgtaaccgtaataaccgcaaccgtggtcatacctactaacaacaaacaaattaaaaaaaaagtttatcccgtgaagagagaaacgggcggaaaaagataaatgcccaaaaagaaaataagtagaagaattttaacttttaaccaaaagaaaaaaatcgcctcggaaatggtgagaagtatagtagttttccgtcttaatagtaaaaaattcaaaaactaataggtgcacacataaggtcaatcaaataattaggatcccaaatccgaggtacacaaggctaagacataaacgtaattcaataagaattgaaaggatacatccacatttattacatgaattggggctgttgtaaggcctggatcccacacctaggatgtattacgcagaagagacaaacatgtgacctttacgtcatacaaataagaggggaagaagtccggagaagcgcaacgttgcgccgaagtgatcaagccatgcgagccacaagcaagtccaagaggaaaaaaccaacgaaagagtttgtttgaattcaaaccaagactttgtgacattgaagacacaatcgaaacagaagcatttaatgttaattatgggattaattagcaatatttaatcactattatgtataaatataggacctcatagctttgtaaaggagattattttctgtgatgtcctgttgaggcattatgcagaattttcaataacttggatattattatttactaaagtcaaacgtagtttcacttaggatatctaacttttatcttttaatgcattttcctctgttttcccatgtcttatgtcctgttgaggcatcatcaaatgtattgaaaagggaatgccattatagtctccatgtcttcttctataggcaacaataagaaggaaagagactttggatcatacaatactacatcctcaaacattatcaaaggcataatagattacgtatattatatgctagggtgctggtacaatcttcacattgatcagaatgagtataatgtttattagagtctatgcccatcactttagattggttaatggcttactatggagtagatttcactagaatcattgagaaattggttcccaataaaaataatatttgattccataacgctgttacttgtttttactggagacaatcttttgaaaatctactttttaacatgtctttcatatatgcacacgcattgtttgtattgtggaggcctaattatgttgcttacctggtttgttattttcttgaatctaaaataatacaagttactttaaattttgatgtaaagttaattaagagtttaaaattttgagtgatatgtggtttttttgtttccttgatgcttaataaagctactttaatttctctactgcttcggtcatttggtgtatgactaataaacctatttatcgcattcaataccgtgtctttctttaaaacagtttttgttttttgcatgcaaattaaattatttaaaatcagtcgattcttttaagcatcttgagaccttttagggacaatgtcttgagagctattggagaaggagcttgaacgatatggagaatgttcttttcattaagtacgaatatataaagattaaagagccttgtgcatgcatgctcacctgaagaagcttgctaagttcttgaaatttgttcatctaccttggaagaagaagaagagagatacgaggttttatacttttgttctttttgaaatctgagcgtttaggaggtcgacaagataatgaatggaatggttcacaagattatcacttttgtcgttatcacataatgtgtatattagtataaattcataactttacaaaatatatgctgagacacactagttaaattcatcttgattcctgaacatccaggttcaatatctaatttgtgtttttgttgaccgatattagttatgttccaaagagctatccgtgaggattgttgtttacatagataatattatgcaatttggtacgaatttttcgtgccaaagaatctgctttaacatttgcactgcaagatattaaagatagtgaaaaatttgtgaattcttttttctcgttccgtagttcctccaaataccctgagaaggtcggtcattcggttggagaagacatcatcttcaccagatttgagcagtctaaaaagctaaattttggttgtcggtgccaatcatacgattcatcgtccagttttgttctgttttttttttctttttaatatttattaatctaatatgttttgggattgcacgttagttttcgaaattaataacctatactccaaatttagtattttttgtgtcctatgtcttttaaaaaatatttattagtctacttggttttgggagtatatcgtattcaactattcaatactttttttttagtttgcatcttagaaccttagtttgtatcttagaaccttaataattcgtattcaatcggccaatccatttgcttttattttaataattgagaagttcgagaccaatagaccttaatttcataaaacatgccatgtgccggtttaatagcatttgctagactcttagttgaacggaaaagccataatcctaagccaattatcgttaaaaacaaaaacaatggtttcagtaaagaaccttttaaaagactccatgttcgtttatcaaaaaaagaaagtaaagaatggtcaaatctttttaacaatatactattagaagacactgaatgcgatcataccagcactaatgcaccggatctcatcagaactccgcagttaagcgtatcaagtgtcgttaaagactctaggcgaagcttagaggtcgccggttcgagtgacgcttgagacgaaactaatattacatgctgtagtttcgggcctggagggattacgggattcggcccaaaacctcctagtattcagaaaaaaaaaactattagaagacactatctcaacattaagactccatgtgatcgtagtcgtaggtgaggaagtgttgatgtttacaatatactagatccgtacgtgcgggattttatatttttaattcaatgtagattattttcttattttgtgatatatattatagtacaatgtattagatatctgaactcgcatatacgtacaaaatataattttttaatagattattaaaatatataatattttgttataagtaaactttgtaatagtatagatattataaagttaagagtaataatcaaaattcaattgtgttcctgtatagttatattttaagatccggactcacacagagaaataacccaaactaaaatcaaatttatatcctattttacactagtaattaaactgttataatgttttgattagtttagaaaataaaaacgtatacttgacttatatttcttggaatggaaaacctgtgatgtatctatcataaattcttcgtcacataacccgtctgtatatgtgaaataaaaatactaccaacctgtaaccatcacaaatagaatttgtgtcacaaaatacgtacatgcagggttatgtgtgtaaacaaatttattttatatagtgctcataacccaaactcataccagttagatatttaatttgatgtccagttggatttcaaattattttatatagtacttccgtttcttttcatgtcgtttgtgtctcataattcctattttcatttcgttccattaaaaatacgttccagaattcttatttgcttcctttaaataccaatgtatatatgactgagttttgcggattaacatataggatgttaaagtttacaaatatatcataaataaaaacacacaaatatattttcttgattttttttccttcttcaaactcaaaaatatgaatagcattataacatataattttgtaaaaaaaatatattttaacaaatgtaataatgtttatttccttagctacattttagatattcttctttcccttgtttaatcataattaattggagttttggaatataattaaaattttgaaatacacctataaaagcaatttattttgctggataattttttttgaatgaaaaatgtataattagtttacattatttctcaagtttgtttaataatatattatggatttatttaaaaaaagatctggttgaaaaaaataaaaaataaaacccaaaatatttggaaattagtatgtacaatttattgcttagatatttctaaatgtaaggcataatgataattacttgaaattaattatttttgttttatttatagtaaatataaatctttgtaacatataatctcgtttttagaaattttgaaataaattttcgttttatatttcaaaatacttaacccaaaattctaaaattaaatttatttatctatcacaaattatgattttttattcatggtatcaagcaagtgttatgatttaaaaaaattttaaaataaaaattaacttccaaaatgttagtttaataatatagtataatttgatatgaaatcttagtttttcaatttttattggttaagaaattttaagaaataaattttaatttttcgtccataattaataggaaatagaaagtgagtttaattttggaaaactaataattgcttaaaagaatattaccattttttatatttaaatctattaattttgtgattactattgtatctttaatgaatttatttaaaaacacttaaagtcaatagcattctatgtaatattttacccttcataaggttgtttattttcaatgattccgaattaatagtatagatacaatggactagatatatgtatacttgtctatacaatatttattcgtgacatgattggttgatatttgttagaaagttcaaatatcatgttataaaatacagtacgaaagccttcaaatattaagtctttgtttttcattttgggctaaaatccaataattgcaattttttaattttttttctgctggtgtacagtataaataaagactttgcggttgcaatatatcaaaatatatgaagcaaagcaaaacaaaacaacaacaaaaaaatgatagatgagaaagatattccaaagaacttgagggaagaagaagttagagacgataatgtagaatctttgaaaatagtggggcatgtagaaaatcaattatcgagtctaaaatttttcaaaaaatttggatgcatatcgagaagacgccactagaaatttttgatgcaataagaaaaattagagatgaatttcaacgagattcgagctttaagaaaagacaaacaatactatagttatattatattatattagcgtagaatgtatgcttaaaaattataattattaatttatgatattattgagatcatatttttatataagaatttcaaaaaaattataatcttattattttaacaatttcggttaatttttacattgaccccagcttgaaaccgataagatttattaatttatcatgtttattaatttatcgactattaatttatagagttgctacggtagtacgaaagcttcatatcttaagtctttgtttttcattttgggctaaaattaataattccaattttttttttttttttttgctggtgtgcagtatatataaagacattgcggttgcaatatatcaaaacatatgaagcaaagcaaaagaaaacaacaacaacaaaaataatggatgaaaaagatagaccaaagaacttgagggaagaagaagaaaaaccgagtgaagaaaccaaaattctgatatcttcacttccttgggagatagattaccttgggaacaagctgttcaactacgaaggatattggtacagcgaagacattctccaatcaatccccaatatacacactggttttcagccacaagaaactgatataattcttgcttctttctacaaatcgggcacgacttggctcaaggcactcacatttgcactcgttcaacgatctaaacactctttggaagatcatcaacatcctttgctacatcataatcctcatgagatagtgcccaatcttgagctagatctgtatcttaaaagctcaaaaccggacttgaccaagttcttatcatcatcatcatcatctccaagattgttctcaactcacatgtcgctggacccgcttcaagtacccttgaaggagaacctttgcaagatcgtgtacgtttgcaggaacgtgaaagacgtgatggtgtcagtttggtgtttcctaaatgccaacaagggagtagactggggagattttaggcaaagcaaaaagatcactcgagcggaggattactctttggaggctatatttgagtcattctgcaacggagttaccctacacggtcccttttgggaccatgcactgagctattggcgaggcagcttggaagatcccaagcattttcttttcatgaggtacgaggatttgaaagcggagcctcgtactcaggtcaagagacttgcagagttcttggattgtccattcactaaggaagaggaagatagcggatctgtagacaagatcttggaactttgctctttaagtaatctaagaagtgtggagatcaacaaaaccagaacgtcgagtagagtggatttcaagagttatttccgtaaaggacaagttggtgactggaagagttatatgacccctgaaatggtagacaaaattgatatgattatagaggaaaaactcaaaggttccggtttgaaattctaaaaattatgtgtgcactatttaatctattaagaaaatgttatattgtcatgtttattgttactttgatgtgtgtgatttttgttctctttgatgttcaataaagttaccttctttttacttttgtttcatccgttcatgactaaattggtgacttgaagaatcaaatgaatcctaaattggagaaatatataaattgatcaaatcgatctcaagatcatctctagtttaccctattttttgcctctataatagagttgagttttactgatcaaatggataattctattttttcttctaaaaagtttaactaaattattgaggaaaaaagagagattctctatatatataaaagaaaaaaatagagatttctaaaaagatttagaggtcaaaatagaagtggattgaaaagaattttactctaaaatagaatataaagacaaaaataaaagtgggttgaagatgattgaacatcaaagagaaacttaaaagtttgggttcaaactatatcactggataacaatgcgggttaggtcccttttatgcaaggtttagattttaaattatgagtcatgtgtaattatgttcacttcatttatgattactaactaaactatcgtattatcacatgccataacatgccactattgaaaataagagtttttattaatttaaaaagttggcatgcaaataaaatatttaaatcaattaatttacaaacaggtcacccaaatgaaggaatctgtctcagcaactttggattttaaacgaagatgattgattagtctagagtgagctaatgtgactagtagaagaaccattttggtcattagtattttttatagagagaactagctagaagaaccgttttggttgagaagctgacgtacaagaccaatgaccatagttgcattaaaagaaagaaaaacgagaagtggacgtgccatgttacagttgcatgggtttgaggtagcacgagaaaccataacctaaaactcagttaacataaaaaccaaaacaaagatttcagtaaatataataaagcaggaaagcaaaaacgaaagaaataaaaaaactgtcacacgagtctttctcaacattgagactgcgtgttttcaccttatttatattttcgtctattctactttcttaatttaatattattcatatttttccaaaattctttcttttattaaaactctacgagaacttgttttaaaaatgatctcataaatagttgaaaactttttcttaaacgtaactaaaaaagagtttaaaaatataagaaaataacaataaagccaaataacacgaggtttctgaaatataccataagcgagaagaacttgtacgactactcaggattttcaacgtgacctggaaaaaaagagaaaagaggtgagtaaaaaattattcagtgagaggatttttttcgcccactataaatatgatacaagatttaacttataaaaaataattaacaattacatagaaaaagacacaacattcatataatttacatcactatgcaaaactataatttcgaaagatttggatgtgttaaggctaacctcccaaaactcactaaaaagtatgttgcttcccaaaatccttttctcgccaatctaggtctcatggtttgttctgtcgaaatgtgttttttgtattttcctacttctctaattggtcccgatcggcccgactttcccgaatgtcgtccaccaccggcctttctcctttccgggtctagttttttcacgtcgtcagaaagcacattaacaactatgatataggagccctctcgcctgatacccactattatcaaaactcattcttgccttagaaaaatctccacatcataattaggttcaatcatctcccctgaactttgtcaccactacaatatatgttaggttgtttgcttatatcgtactattttctttatgaactttaatacattaagcttttatatatttttttttgttttattaattcaattaataataaagagatgttttggatttttcaaatctatgtttttttcgaaacaccaatggatgaaattgtcacaagagagttttggaaatgtctaatttgatggtccatcatgctccaggtgtggtcttgtggtagtttccaccaattcttcaattaataagacattcattctttaagagtaggtgactcttaacaagctcaatgtttttgcaacaaaaacaaaatcatacatatgaggctatctctctccatctgcttgacacgtcagcatataagaggctgacaggtggctatacaccatttgctgaaaacttaaaaacgtgaagagccgattcatcttctgtagcgaagggttcaaacgttagatctcaagcagttaacctaggggctaggcttttgctggacaattacaccgtcatggtgatatgaatgagttgtcttctttctaataacaatcatcaatcgttatgaaacccttaggttgttcagttgttgtatcccattcctcaattttgtcaataatgcatatttgttgattcattttcatatataaacttttgtgcttcatttgagatctttccacatttgtctgatattcttagggcccggatggtgcgacaaggcatccaaatatccggtggtcatctctaggtatagtttttttgttctcatattgactatcatcttttattattaccttcattcttgagtaggttgttgttgttgtggtgttaccatagaatttcttttcattgcaaatctcaagaaaattcgtaagggtgtggagagaagccgaagtccgtcaaccgattttgctcctatattcatcataaggacattaatagcaatcgctcaccacctgatttagaatcaacaagcaggtactaagatgaccccggtttagaaaccaaatgtttcctttggttgggtgcttaatttaaatagctagtccatagtatttgcagcgattccctatttgttgtttttctgcttgtacgtgaaagagataatatgaaatcgaaagtttatgtttttattttgctttcgccttaacctttgtgattacaagctatgtctatttatacatctagattgatttaacctagtgtcttcttggtttgcatagctgtcacttggctgttatgtggcgtcattgtcttcacatgattcaagagcttcatagcgattcctcgtcgttacttccgtactgcttggagataatgaccgctctgcaacttctctgcttttgtcctttgttgttgcaggtttccgttgagctatgttgggcttggcttttggattgagcatttgtttcggattgggctttagtggttttgagcccaattccaaaactgtgtcgtttggagctgttgtgttgatactcccccctcaaacttggagaaggtgggaaatcgacaccaagtttgaatcggagagattcgaaaggagccttggcgagagacttcgtaaatatgtcagcgagctgtagataacccggtatatgatggacgatgagctcaccaaaagctacctgctcacggacataatgatagtgagttgcaaagtgctttgtccgagcatgaaaagatggattcgctgtaaggtaaacggcagagagattgtcgtagaagagttcgggaagctgtaattgaggaacgccaagatcgcgaagtaaattaactagccatgtgatctccgaggctgtaacagacatagagcggtattcagcttcagttgagctttttgcgacggagtcctgtttccgtgaagaccaggagattagattgttgccaaggaatgtacagaagccaccggtggagcgacgtgtaccgtgacaaccggcgtgatcactgtcactgtaagctcgtagttgacaatccgtgtccttgttgaatgaaattcccatggttgttgttcctctgatgtaccggagaatccgtttgaggtgatgaaaatcagatactgtaggggcgtgcatcttttggcacacgtaattaaccgagaattggaggtccggtctagtaagtgtgaggtactacagcttaccagccaggcttctgaagtaagatggattgtcgaagagctcggtttgattaggggttctctcaggttgaagtggtaacggtgttgcaacaggagaacagttggacattgcggctgtggctagaagatcttctgcatatttttgttgagagagaaaaagaccttgagaatgaaactgagcctggataccgagaaaatagcttagtctgcccaaatccttcattttgaactgcttatttagctcactgagaagacttgagagaagctttgagctgtttcctgtgataaccatatcatcaacatagaggagaagcatgatcacatctttgttctttacacaaacaaagagagaagggtcagacatactgcaaacaaaaccaaagctgagcaaaaatttgctgaacttgtcaaaccaggcccttggagcttgtttgagcccataaagagctttatgtaataagcacacatgatcaggatgagctttgtcaatgaatccagctggttgtttcatgtaaaccgtttcagtaagatctccatggagaaaaccgtttttgacatccatttgtttgagttcccagttcatgatggtagaaaggtgaagcacagctctaacggttgcagatcgcacaacaggactgtatgtctcaagatagtcaatgccttcttcttgtttgaagccttgagcaactagtcgagctttgtacttgtctaatgagccatcaacattaagtttgaccctgaaaacccatttagagcctagtacatgcatatttggttgtagaggaacaagcgtccaagtatgtgtctaagagcagtttcccatttcctctatcatagcagcagtccattttggatcttttaatgctgcagttactgtctttggcataggatatgagactttgtgtgtgagaagagcataccgttgatttagtttgataattcctttctttagccttgtagtcatagggtgagtagattctgtagccgcacgaggaatgctggaagttaattgatcatgcctaggggatgaagagagagcgttgttcccaataggatcaagatcgaagcttgccgtacactcagaacactcctcacttcccatagacagtgtctcagaacttttagcattatcttctgaagaaagcgtttggagcggtgtgacacagattggttcatcttctatgtcttgattgttgctactaactgttatctccccctctggaaggagaatgttagggccatcttttaatgacagaatcggttgtgtttgttgtgctgtgatcacaggaacacttgcacccgagttgaagcctgcagtttggtcattttccagcggagatgaagagcttggaaaactttttaaccaagcatcaaacataggagttggagaaggatgctgcaaactggtgtaagtatcaatgaaaggaaaggagctctcatcaaataagacatggcgactgagatatactcggttagtgggaggaaagaagcagcgataacccttgtatttttctgtataaccaagaaaaatgcacttgagagacctcggatcgaacttattacgagcatatgcacggagtgtggggaagcaggcacatccgaatgttctcaaggcagagtagtcaggtgcttttccaaatagaacctgataaggtgtagtagagctgtcaagagctgatgttggaagaagattgctgaggaagttggcagtaaagaatgcttcaacccaaaatctctgtggtgctttgctttgaaacattaatgtaagacccctttctgtaagttgtcgatgctttctttctgccaaaccattctgttgtggtgtgtgagggcaagagatataatgttgtataccagattcttgaagatgttgtaagaacctattacttgtgaattctcctcctccatcactctgaaaagttccaatttttgtttgcaagagattttcaacaaaactctgaaacttcatgaagagtgaacaaaaatctgatttgtgctttaatggatagaaccaacagaatctggatcgattatcaatgaagattacatagtactgaaaaccttgaatagatgaaacaggagctggaccccagagatcacaatgaactctctctagaggtcttgaagcaataaaatctgaagcaataaatggcaatctcgaactcttcccaagcctacatgattcacacatcttgctggtacttttatttatttggatcgccttcttgttagctaagagttgaagaacttgaggattcggatgacctaatcgcatatgccaaacttcatcagttgccttaacttgtcgggtggaatagaacatctgaaattttgggttctccaacttataaagtccctcacttgtgctgcttccctttgtcagaactttgcaagttgccttgtccttaacaagaacaccatcagcatcaaaggtaaaggagcagggatagtctttagtcagttttgacactgataatagggacttagcaatattagggcataccaatacatcttttaatgggagattacctgatgtagaagggagattagctgagccaatgtgagtgataggcagaaaattaccatcactagccattactgtgtcattgccaagataaggttgcatttgttgcagacgagagctgttgttggtaatgtgagctgttgcagcagaatcaggaacccaaccactgtcgtcactaacgtcggttatgtgaagagctgagaaggcagcagctgcagcttcagagtgttggtaagagtcatcaaatcgatgccagcactgaagagcatagtgacctctttttccacaaatctgacacattggtttctcactcgcagagacagaagaacttgaggaggagaactgttgttgaaatccacgacctcgagttgagaagtttcctttgcctctgttgtttcttcctccacggcctctgtttgaagatcggaaagtgttgaaagccagatggggagaaacgtcagtgacagtgtagccttggagacgatcgtcaaagttcttgagacgataaacaacatcttcataagatggaccaggaaacgcatctaaggttccctcaagagaagtgattaacggttcatactctcgagtaagaccatgaaccatggcaaaaatcttcatcttttcagcaactggacttcccacagaggcgagttggtcacatatagtcttgagataccgcagatactcctccatggtcttcccttcttttgataaactatgaaggcggcgttgaagctcaaagatccgagaggaagaaatgcgattgaagtgttttgcgagattcatccatacctcatgagatgttttggaaccaacaacaacactgagaatatcctcagacataacaacttgatcggagcgaaaccaagcttgataatccggatttgggatagcttcagtgacgccggcgtcttgtggaccagaaactgtgcctgttggagcagcataggcgccattaacgaaaccaagaaggccttgcccagagagaaatgattcaaattgagatttccacaaaatgtagttacggtctgtgagtttcaccgtaacacagtttgagatgttcaaagatggaagagtatagagatccatggattgatccatggctctgataccatgaaagagataatatgaaatcgaaagtttatgtttttattttgctttcggcttaacctttgtgattacaagctatgtctatttatacatctagattgatttaacctagtgtcttcttggtttgcatagctgtcacttggctgttatgtggcgtcattgtcttcacatgatttaagagcttcatagcgattcctcgtcgttacttccgtactgcttggagataatgaccgctctgcaacttctttgcttttgtcctttgttgttgcaggtttccgttgagctatgttgggcttggcttttggattgagcatttgtttcggattgggctttagtggttttgagcccaattccaaaactgtgtcgtttggagctgttgtgttgatagtacgtagatatcagaggggtcaacagtcacaccaaggttcactacctttagctacaattttttctgcatcgctaagctttcattcttttataacccacgttttccgagaggaagaacctccatttcttgagatgtatgtcattcacaacatctttcttctttatccgaaaagtttgtttgcatacccctcatttttagaactttcccatttaaatattttataaagattttaattatgcctatatatattttttcaatttttttagatgtttcgcaagagacacaaaagtcggattttcatcgtgagtaatataaaatgataaccgttcatattttttcagattaaagtaatttagaatatatatttatcacaaagaatgaggagtcttgatatgcatttttaaaaaattaatgtttagtaatttggtttgaactttgaacttatcaatttagactgtttttttcttttatgaatacatatatttgcgatggcaaaaaaaagaatacatatatatgctttaaaattttaacctttctaatatttatatttgtcaatttttgataattttagaacaatataaaattaatatttagttctaaataatatattaaatgaaaaaactatttatctaatgtttgaaactcttcattaggatgaataacaaatgacaaggagaaaatggtgagaagaaagatgagtctattcttcttcctaaacttttgcattcagtaatgtctcgccttatagtgaaagataacattcaagcttccacaattttcaaaacatggtataaagctagtgtttcggttcagataaaagagcatcatttatggtatatgaaatacccttcatctgtaggtttctttatttatggtatagaattatcatttcggaaggtcttctctattttcttggtggaatagacaccttagcggttttcaaaccatcaagacaaacatggacctgatggaacattcatcagttaaaaacaacgttttccaacctcgtggtttggaacctagttggtagatattgaaggagacatacttctcctaaaagtatctaatgataattcacgagtgtttgcactaaactgtagtggtgattggatttgggaagacaaggataaatttgatgaggggttgacaatttttggggatttccgtgcatgcaagtggagatcaggtctcatgagcaacatgagaaacaaactattcttgtcgaagtttcttcacccggtgattcaacttatgtttttgatgaaggaagaggtatctcccaagtaactcatgtcctctgttgtcttgggatgagaaaaaaaatgttctgagtgatgaacgtaactttccaacactcttggactacaaaagctgttcttttagtttcatttttcattatcatgtcttttttgtgtttgggtttactgtttaaaagttaatttccttagttcaacatatatttcgtgtgatatattatggatgtctggtttgtgtaatcaataaaagtattggagtttgctatacatttaattttattatagttatattttttcataatccaaaacaaatatcttgatgatatacaaaaaaaatcattgctaaatttgattctaaaaaaataacatttgttttttttatcatcacaaatagaaaaagggtaatattacgcagtcgccaaatttgacacataaattaagtaagtaaccatgatgcagaaaaactttggtaactaacattttttgggatgcgaaataaccattttagcttttagagatgggtgagagttgttcttttctcacaatagatgtaggtgtagggaacaaaacaaatagaggtaatgattaaactgctatttataaaaaacatactcaataacagaccgcgatttattaaaatcacatgcaatatctatatggaagcaaaccacatccatgttatgtatatattacattctgattgtacgaatttgcatgcagttataaaaaaaactatgaatcataagtctgcaacttgcgtgtcattttagtaaaaaacatagattattagtaaacacatataatcttaaaaaatattgttttattggaaaatacacaaatgttaagaaaatatgcatgtcaaatataaaaatagcatgaattatttaaaaaaattcatgttattgttggcaaaaaatggtcacaattcttttgtaagaatattcattgttttgtagtgaatatagtaaagttgagggagttttatctctcaagctcaaggagagatgatgattatctttaaatttatcaattatgaaagcctatcaaaaactctaaaaggtaatctcttctcttatactgaattgaagagatgagatgatgaataagagaaatttatgaataattactaagaatgccttttcaacactaccctttttcaattttaccatttcttatttgtcattttcatttatactctctttaaatttttaatgaccattttactcctatttggaaattgttttaggttaacaaaataaaatatttatttttttcccgtttaaaatattccaaaataaattttccgcccatattttcccgccaaaaagtttctaaaacatttcccgcccaaattgtttttcaaaactttttggcgggaaatagatatacaagggattttaaaagaaatttaaagggattaaaaggattttaaaagatttacaagggttttaaaaagatttttaaagagttttaaaagatttacaagagagttttaaaggttttaaaaatatttaaaatggatttttaaagtgtttaaaagggttttaaaagatttacaagagtttttaaaagatttttaaagaatttacaaaaagaccctttaaaaactcatgtaaattttttaaaaaccttttgtaaaggttcacaagaggtttaaaatggttcaaaaattattggaggtttactaggttttaataagatttttaaatgttttacaatgcttttaaaggatttataaggatttttaaaagatttacaataaagttttaaaaaccttttgttagggttcacaagagttttcaaatgattcaaaaagagtttcaaatattttaacatatttacagttttttttctaagagttaaaaaatgattgtaaagactttataagaattaaaaaaatattttaaaaggatttccaaaggtttaaaaatctttgtaaattattttaaaactcctaaaaaaactcttgtaaatcttgttaaactattgcaaaaggttttaaaatgatttacaaaagtttaaaaggggttttaaagtatttacatatgtatttaaacattttattaagattttaagaggttttaaaatgatttacaagggtttttaacaacttatcaaagcttttaaaaaatttacaaggattttaaaatgcatttttttgcggaaaaagttttggcgccaaaatttccgtttccaattgtattttctcattagatgagggttatttgtgcattttgttcaagagaagggatatttttaaaaatggacaacataaaagtatatttttgcaaaaaaataataataaatgctagttttgcaaatctcccaaaattcatccctaaattttttatatttattaattaagagaatgaatatagaaattacacctaaaattaaacccaagaattatgcgcaaataaaagtctcttactagtggttggttggattattctctaaatctcgattattgactttcttaattcagttttaaatgttttcaatgaaagtctattaattatcgactttttgaattgagttataagtacttaaaatgtttaataaaataaaagtagtataaaattttgagttttataaacgaaattatagttaaagtataaaaaagaagtggtgtattgaaattttggattttgttttcaatgtctaaaatctagaagtgataaagtaattatataaactttatgttttatatttattttctaaacataaactaaagtacaaagtaaaatttagaacctgacgtttcttatttaacgaggttgattttttctaacttcatttaatacacttagattcaatacctttatcaaatggattcaactatttaatcctttgttcaacacccattgtaactagttttaaaatcctacttttcaatattcacaaaccaggaaaaaatgatgaagaactcttctattatattggtactagttttctttttcttcatttcttcttcaggtatttttaataaaaattattcttattgtttgatatattagttttggttatttaacttgcaaaaatggcatgcaaatcttgttgttgtgttcttgtagtaaataatttttatattttcattttgatagtaggagaagcaaaaacgtgttctgatggatggacttgtgtaggagaagacaaatgcaaagtaaactgcatggctaaacacaaaggagttggaacatgtactttgtatattattccttctttccctgctccgataacttcttatatttgcgattgcatgtttgattgctaacctttctgttcaaactatctttgtaaactattaaatcttatgataaaggaataaattaaaaatattttttttaatcaccttttttgtatcatttatcttttatatattcaaggtgctattatataaaacttgatatttctcaaaagaattagacataaatcaagattataattaacaagattatcaagatacatgatttacttaagttgcatcatccttgatggagcaccggtcatcctccatgctaaaggtctttgaaattcaaagaaaattaagagtttttttattattattaaaatctcatattaatcaatataatattggaggattttcaaaagtaccatttttctattgttcttttgcaacaatatatatcttttcttgttggtcattttttgaaatatctcttttcttgaacaaaatgatcaaattacttatcattttatgagaacatgtgagtagaaactaaattttttagcgcaaaaaaattatttcctcgccaaaagaaattgcatttaaaagctcttgtaaatcctttaacaactcttaaaaaaatctttgctaagttttttaaaccaatttaaaagctttgtaaagttgtaaaaaatgcttgtaaatcatttgaaaacctattaaaaattttataaattctttaaatacacatgtaaaatacttgaaaaccccttctaaaacctttataaatatttaaaatccttgtaagtgttttaacaccattgtaaatgttttttaagggtttaaaaggctttaaaaaaatattaagactttaatagatatttacaagaactttttaagacttttttaaaggatttacaagagttttttaaagggttttaaaagaaactaggggaaaatccggactacgcccggtaaatgtttaaatattttttatatcttcatttatttaaactttttatatatttttatattaatataatgaaatactttacattaacaccatttacccttgtttttatatattacaatttacataatttcactttcaaaaatctaatttaagaagatgttaaaaaaatttctctttttttccaatccgtaattaatgtatactaacttgaatagttctaacttctaaactttgtatgtaacagtaaaagaaaaattaaaaaaatataagaaaagttgaagaagcattgtaactttgtacgataaattttaaaacttatctttttaaaacattgggagaatatgtatactatatacgttactaaatctcttagactaaataatttgattttttaacattttttgacagtatagtttatgaatcaaacatgacatgacaaccgaatacgaaggaggaaatattatttcaattgcttctttatttttttaccttcatttcattaaattttgtatcattctcaaatagatttttttaaagagatgtttaggtttttagaagggttaaatctaattcggcctaaaaattgttttttttaatctaaaacaatttatattttagatgtaatctaaaaggaaggacgactttctctcccaggcacggttttcgaagttctattttcggttaagagtttttgaaaactagatctaaaccacttcctcttaccaaaacagcaaaaaacaaccatccttatttccaaaactagacttttcggttgacttacagatctagattacaagcaaagtgttccctcaggggagaccggcataggggagaccgacataggagatgcccctcaccctgagcacttgatggttcttatctcaaatcttgtggttaaatctttcgaagaagtttcaagtgtttactaaggccagaacattaaattcaacctaccaaaggtacacttcgattctctctttatgacaacaattattaacctcttgaatgctctcacttttaagtgaagaatcttgttaaacttgtaaagagagatcttggtccacctcttaaaggacagatcttggtcaacgtataaaacctctcaccttgtgtgaagaacttttgaaacttttcgtcacaagcttctacttcaagccctccactccactcagctatggccaaccgcatcccgtactctgcaaaaggaaaaggcttagcagactaccataaagagtcaccatcagatctcaagagaaacgatgagagagtggtggaagaaagaagaggatcttaccacaaacaagagaacgtcaaacgatctgcagatgatttttcagccccagcccccaagagaatcagagccccagatatggatatttcagatctgatagaagaaaatcacctcactctcatgggaagactgacaaatcctgctgctcaaagactatggtctctaatatcaggctctcgaaccgttggaattttaaagggaaagctataggctcagatctaggcaatggttgcttctagttcatctttgagattgaagaaaaccttgaaaaagtactggctaacagaccatatcacttcgaccaatggatggtcattctccaaagatgggagccaatcatctcttctactttcccgtctttgattcccttctaggttgagctccaaggtctcccaaagcactactaaaacaacaattgatatacaagataggagaggaaattggagaggtgctggaccatgagattaccccttcagctgcaaagataagacttcagatcaatggccttgaaccactaacaaaagaaacagtagtggagttcactgatggtcaagaagctttagtaaccttggattacaaaaacttaaagaagcattgcacacactgtcataggctctcacatggaatggataattgccctggtctagaacaagaaaaagttgtctccgctacaaaaggaaatatccctccagcaagagtacctgcaaaatcatttcaggatcatgagtacaaatcttcaaggcctggatcccactccagaaactcctcttcggcacaagccagatcctcctaccctcaaagagatcaggaccttcgcagtagaagaattgataacaaagatctcaggaatagcaactacctaaaccgtagttcctctactcacaggactccaagctatagaagatctccccctcgatttcttgactattctaggagggaatttacaagagaacgtcacagatatcaagctcctagtcaaaactatagcctgcaatggagagagaaatcttacctacagactgtggcttacacagaccactcaacctcctctagagctaggaggccgcctctagagagaacatcttgtgcaggtgaatcttcccattaaccacttcccataccaactactgaggaagttatggacgaattaagggagatcacagttcaatatactagctgcgctgatccgacagagagtttagcccgcaaacagagagtcctgcaaggggaaaatcgtgggttaatggcagaaactgcagaacaaataattgctacagcagcaagactaaaccaactctctgagctaccaaaccaagacaaatcgggggctaccttactagagccattaacagagaacaatctaccagaacagcaactagaagaaccatccctggaaggccccctcttgcaaaaccaatcaacaaaagccccattcatctctcaggggccaaatctagcaaaagaaacaaagttctgattcaaaattcaccaagaagaagagtgattgtagcaagcgctgctctacagaatattacaaagagaaaaccagctaagcaaagacttacattgatagaataggaggctggtccgtccaatagcagagcaccaaaccaggctgttattattcctgcaatagtgaagaatagagtggattttcagaatccacagtcttctcttccttaaaagcggtaagctggaactgttggggtcttgggaaccccatgacagttcggcggctggtggagatacaaaagactatctcccctgatttactgttcctcatggagacaaaaaactctgatgactttgtacttcagaagctccatgatctgcaattcacatcccacaaactggtgtcaccacaaggtcgaggaggaggtctagctttactgtggaagcagaatgtggatcttgaggtgctccaggataatctaaactttatagatacccgcataacggcagaaggccacagtttctttgcaacctttatctatggataaccggaaagagcaaaaagaaaagaagtttggaatcaactttcaacaataggccaaaatagatcagacccttggtggctaactggggacttcaatgatattgtagactcttctgaaaagcaaggatgcataattagaccggaaggtacctttgtagacctgagaactttaatgtcagaatgtgacctctatgatctccaacatgctggtaattttctctcttggaggggcaaacgtcatgatcacctagtcttctgccgcctagatagatcgatgtcaaacagcagctggggtgaagaatacccctctggaagaagtgaatacctcctgtttgaagcttcagatcataggccacttgttacttattttgacctgcaaaagaaaagaaagaaaggacttttcaggtacgatagaaggtataagaagaataaagagataacacaattaattgtgcaaaactggagaggtaatgtgtatgaggaggtggatattaaaatcagtaaatgcagaagggctattattgaatggagtaaagagaaacagattaatagctagaaaagagtaagggattaccaagagcagctggaatcaacaatgatagacccaacctcatctacagaaactattgctagaataaacaatgagttaagcagtgcctacaaggaagaagaagagttctggaaacaacacaacaggcagctttggctaactcttggagacaggaacaccggttatttccatgcaataacataaagcagaaaggcaattaacaaattctcggtcattgagaatgaagagggacatagtgtgtttacagaagacaagatcctaggagttatcttagactattatcagcaattgttcacaaaacaagagactcatgaagacacgtgctggtccatagttcaagaggctctatcaccgtgtatatgagaggacacgaataacaagctgataacagtaccttctgcagaggagatcaaactagcttgcttctccatccacccagataaggcacctggtcctgacgggttttcggctagcttctatcaaacaaactgggatacagtcaaagaacaggttactagagagatccaagagttcttttcctctagggtcctgccctgcaacatcaataatacacatgttagacttattcccaaaatcaaaagccctaaaagaatgttagaatacagaccaatagcgctctgctcagtgtattacaagatcattgctaaactcctcactaagagactccaacctattcttgctgcagtcatctcggagaatcaaagtgcctttgttgctcaaagagcaattgcagacaatgtgctaatcacccacgaggttctccattatctacatacatccggagctaaaaaacaatgctacatggccgtaaagacggacatgagtaaacatatgacagaatagaatgggtttttgttagaatagtgctggaaaagctgggtttccaccacgtttggattgggtggattatgcaggtatcacttcagtctcttattcttaccagctcaatggatctgctcaaggacttattactccacagagaggtctgcgccaaggagacccactgtctccatatgtcttcatcctttgtagcgaagtcctgtcaggtctatgtatcaaagctcaacgtgaaaacaaccttacaggaattaaagtgggaaagaagagccccagattgaatcacatgctgtttgcagacgacactatgttcttctgcaaatctgatgcaaaagagtgcactgcattgctagacattctgcacaagtatgaggttgcttcgggccaaaagatcaattcacaaaagtctgcagtgactttctctgcaaaaacacaagctactgagaaagatagggtcaaaatgcatatgggaattccaaatgaaggaggttcaggcaagtatctaggattacatgaattgtttggtcgaaaaaagaaggacttgtttaacatgatagtggaccggataaggcaacgtgcatgcagttggtcctccaaattcctctctgcagcaggaaaggtcatcatgttaaaatcagttcttgcatcaatgccagcatatactatgtcatgctttaaactcactggatcattatataagagaattcaatctgccttgacaagattttggtgggatgactcaatggaaaagaagaaaatgtgttgggttttttggaagaccctaataaaagcaaaattagcaggaggtttaggcttcagagactttcagagttttaatgacgccgtccttgccaagttgagctggcggatccttacaaagcctgattgccttttgacaaaaaccttccttggtaagtagtgtcatactaaccaattcctagacagtagacctccagcatcttgttcacatggttggagagggatttgcataggcaaagagttgctcaaatctcaactgggaagaattataggagatggcacctcttctaacttgtggactgacccttggctgtctctaaactttcccgcaactcctatgggtccaccaacagaaagtactcagaatctatcggtggcacatctcatatcccatgtttcattagactgggacagggagaaaatttcacaaatcttaccggagctggagaatgatatccttgagatcaagttgagtgcttttggggccaaggatcgttacgcctggttgccagcaaaggatggatcctacaacacaaaatccggttactatgaaagcctcaacaggatccgaatgctagaaaaaaatcccacacaagaagcaaaccttggttttgcatgaacaaaggatatttggaatattaaaacttccccgaaaaccaagttcttcctctggaagctgatgaaaggggctctccctttaggtgagcacctaagaactagacacataaatgacacagctttgtgtaccttatgtggaaacgaggaatcagtcctgcacttattcttcaagtgtccctttgccaagcaagtctgggacctggctcctttcaaaaattctttatccggcgatcgtattccatctctgagagcaggaatcgaagcctccaaactcttgatttgtcttcctccaacgggcttaaacgcagggcctctgctgccttggattgtttgggcgatctggatagccagaaaccaaaagatttttaacaacaaaagctattctcagatggacactctatctcatgcaattaccctggctagggaatcgcaaaaagcacagggccaattggatcccacaaagaagaagagcatccggaaaactcgaagaagtcaggaaacagaatctcacctctgtttcacagatgctctatggtctgaaagctccaaatctgcaggtttcggttggatcatcaaattccgtcgatctggttttcgcagcaaaggatcagcatcggattcccatatcagatccctggttgttgctgaggcaatcgccattcaactggcactgaagcagagccttcgactagggatcacgtatcttgcaatcgtctcagatgccaaacaggttatcgagaccatcaattcggagactccatcgatggaactccatgagattcttcatgatatcctaattttatctttaaatttagtaaaatttcctttaattttattccaagatctgagaatcaagaggcatatgccattgctaaacattctctccgaaacttggctataatgccttagaggctttaatgaaagagtttcctttgccaaaaaaaaagaagggttaaatcaatatggggtgatatgatacattgaatgtatgtgatattttttttaatttgtgggctgtgttgtttttttgccaaaaaataataatttaaatttttaattaatgaaatcttaatattaattaagcggatgacaaataaataagttaatgaaatctcaagatgacgtggcgtatggagagaatgttttaaaaatgatgatgcggacacatggaaaagcctcaatgaacttcttttattagtagtagattttttttcctagatcccgtcgctcaaaaatgcattctaacaccaaggatcttgtaaacgcagagtctagatctactctctttctccatcgtcgcagccgcctcagcttcaacggctatttcatccttctccttgctatcgctctctcttccattgatgaaagctcaagctcttttccaacaaatgacagttttgacgtttgagctcttcgatgtctcttccactactcccctcttcaatctcagttaacgctgtttgaaaccctaatcctacatccataaaggatattgtctcttagatccgttaccaagcttttgaagattctcgatctgcaagacgtcaagtaaaaaatgcgggtgagatcaaacccaaagattcatctcttctcactttcgtttacagatggtcatacacaaccctttgcttctccaaatgtcgattttaggcactagacgatttttgtatttgattgcaatttctttgtttgggttattttcaacgaagtcttgttaatttcctgatttttatcattttcgaagtttgattgttaggataaagattctgaagattggcgaaggattgaagccttgaagagaacgcaggtggtcgtgagagagagagaggagactttgttttttttttaattgtttttttggtgtattttaattgttatttctcattgtaaatataattataaattattattttaatactgataaattaaattggagcttttagaaattgaaaatcaaaattgaaaattgaaaattgaaaattgaaaatttattattcaaatttcaaaattaaattcaggtatttatagaatatatgattgcatataagaaagcgctataataattaaaagtacaatagcacaaagaaaatccgttatattatgtctttgacctattatgacagacgatgatagagcgcttcttaaaacactatagtatcgttacatagctttattcgaatgctacaaaaggtcaatattctcgtagtgtatacttttcaaattttgtcttcaattccaaaatacaaaagaaccaatatttttattataaaaataaaaatatataactatagattaagaatcttcacattctgcaaaacaactttaactcttcaaaaagtatttggtggcacccatgggttaataaacacttggtagatgagttcatttggcactaagggtgtgaatggttgcggtggttgaggtggacaaattcgtctgcgaattagaccgcttttgatttaccattcatcaattagagtctgtagtagtacgaatcaagaaaaataaaagaaaatcgatgccgaccaactacaaaccgcttttacatacaaatagagcttgtacgtggtggtttattatccgccctaaaaatagagccgactaaacagccgacggatttgtccaccctgaccacggtaaccattcaaaccctaaataaaagttgaataaaattatatgagaattccaatctttatatttttatttaattaggtagataattaagtcctcaaaattataataaaactatatatgttttaatatatttggcataagtacctttcacattccaaaacattatgcattgctttatgatgtagcatttcttttcaattatttatcgaaccacaatttgcaattaatcaactcaccaagaatacacacaattgcttaatctaagctaataaggtgattttgagtgttctaaatcttagtaacaatgcaatacaaaggtaaaagaaagcaagggacaaaagactaacaagtttcgaaagtaaataaagcggaaactaacaaattactaagtgataattaaagacaaattctcgggttaaggcaatcgattagaaatgataaagagatggattatggagcatcaaacaacttctaaaaagcaatgatccttaagccatagaacactaagcaagactaacacatttccatgatattaatctctttactaatcaatcaatcatcaacaatttccaaaggcaatcaaatgatcaataagcataaataacaagtctatctagccactaatcaccctaatcaacaatttccaaaggtaatgtatgaaaagcacttaaagattttggttcgggaatttcatcgaacaccttccgggcatgaaattcctagtgtctaaatcaacatgatcaatgttgatctagccttaatagcaaccaataagtaaggatcttaagtaacctagccctaaactccataacccaacatttaaaccatcctaatcttccctaaccaaagaactttaaaagactattcactcatgattatgaaagcacaaagcaatgggtttgttctttgtgtaatgataattagagaaggtagatgagagatttataagaagtaattgatatagaaacttaagaacgcaatattcatacaaaaacttaagataaagaaccctaagaaaagttttgatctctcaaacaaaagctttttttctaaaactaggttaagagtatttacagtaatgagaaaataaaccagatcaaccagaaaaaacccgggttttaacccggtttagaaaagcaatcgaccaagcaatagatcacttggtagattcgaatatcgtccacaacattaatccttgaccaatcgaccacgcaatcgaccactttggtagattcagatttcctctatagctctagtcatgaccaatcgaccacacaatcgaccactttgctagattcaaatttcctccgtaactctggtcctgaccaatagaccaagcaatcggccgcttggtctattgtcctgcacttttcttctttggtcactttacattctcttaactcctttgttttctccaaaactctaaactccattcatgtacctaagaaaaccaaatgcaaatgcaacactatatgccaaaatatgaatgcaaagcaacaaaaactaagagaaaaggggttttaaaacaaccaaaaacactagatatcactttaccgataaagcggataagttggccctagccaagctagctagctactttgatgcctacgtgcattcctcctcaagaaatagatagcagtttgggaacacatacaaatacagataaaatcaagttgaggatgattggctataagataagatgtgtgattctgtccaactaatttggagtagtagcatatccaagaaaggcttccactaaagacgtaactataatattacggtgtaagttccgtctctaggagacgtaaagtctgcgagtttaaatttttagatattaaaaaaaaacgtaactataatatctctaacatttgaaattatgaacttgtattattttcaaaaaggtagttcaatgtgtgctattaacatccattctattgcgagaaccaaagttcttaattataggttcaatttatttatgtaattttcacaaatttattgatttaaatttatttatattctttgatataacatcatttaagaggaaatttttgaatattgtaaactaaaataatatcttctacgaattactatatattcttttatcgattaattaatatttctataattaataatatttaaaccccaaaatgttattatcttatataaaattttactatatttagatgtttggtggtgtaggacgcatgggcctctgagctactgtccacactacaaaagcatccacattgtatatttagtttaaatgttttctcacataaatttaattaataaaataaataaaaagtttttaaatgaaagacatccttccaaaaatgtttcaaagaagacattgtgaaacttattgagaaatggatcttccatttaaaatactatttatatttatttataatatttatatgggaagacacacaaaaaatgtggatagtatcatgtactaaaccataaacatgtacttcatttatagcattttattatatagatatatatcgtatgttttttttaagaaaagacaaaaacaagttgtatctatttcgtcagtgggccaaacatggaaacaataaggtggctgtgaccaaattgttggtgtttataagggtttgtgggttcgtcaagaagtacatgttctatgaaacaattagtgttatgctttttttctttagcatatttacaacaaagaaacataattagtatgaacactgttgggtttgtaccaaagcaaactgacatttctagaacatgttctctatctaaattattatatgtcttcaacattatgtaacacgacaggcaaattaacctctatcgatgtgcattttcttaatattctaatcaaatcgtattgtgataaaattcttgtggattttgatatgagtagccctacttgactcttttgactttaaattataaatgaaataatattcacgtagatttattctatccatactaatgcatgtagcaactttgtatatttttttcattagctaggctaaggtgtgtatatatatgagttaaatctatttaacacgtcggctctggaccattgtaaaccataatcagtacggatcaatgctaagtcacaaattcatctttggcttttgagccataaaaattatatttagctgatatgagttaaattacctcaagtttaccgctacaaataaagagattgtcatttataattaaaaataggatttacaaagttattttattcacacataaatctaacagtttcgaaattaagctaaacagattaattgtgaattaaaacaagaagacgattaaagtttttgtcaattcagatggataaagagttaggtttaaaaaatttctaaaacaataccagaatcatagaaatagcaacattgttaggaattctattttaactgttctaaaactccattcacaaaacaatatttaatcaatctcatctgtactgattatctatgcttaataatcggaatcccaacttacgtatgtaaatttctaatactaaacaagcattaatgttcaagtttgatatattcacaaaagtatctaaacaaaacctatttgagaatagctactttttcctacttaagatagttcaagtactaataagcacactctcgtgtcaaacttattatcgtaagatcaaatattagttagctacactagaattagtattaagaaaaatcaaaagtgaagaactctatgtattttatcataacaggttatcgatctataaattcatctaaatctctatcgagaatccctaaacctaacaagaaaacgactcagacatgatcatgaaagcacaaaaaggatttgaatagaatcgcataaagaacataagaaataatagattttaaacagtttttttctatattgaaggttttgaagtctctgaaaagattcttcaaaactcttagagaattgcaaagtagaagaaaacttgataaaaaaaaagtgatatttgtaaacaatgacctgaaaaatctatttataagcaataaaacgttcagggactaagtggcaaataaggatattttcttggagcaaatttgttaatcttcaaaacttgtgctttacgtgtggcggtctatggttgcaaagagtgtcgaccaacattaatgagtgtcgatcaacacggatgtcatggtatgactccaaattcatttttttacctaaacttctttggtttcactctaaaatgctccataatctccaatctattccagatcgtgtaaacatctgaaaagactaaaaattaactctagaaataattaaaaaaaaaaactctaaaaataatatatataccatggttaaaaactgtaaaaaccataatatattacctttctaccctattaccttgatcattctaccaaatccatattcctagcaaatcacatcaaatcccaactaccatataattctctctaagtattcacaacattccaaattccaaaccaaattccacaactatatccaatcagcattaattgttggatcttatcaataaagctaatatccaagaaccttctacattcattcttgtaatgtactttaatactttaatactctttttttcccgagacttttttttcaaatcattctttcttttaatcaaaggattacttatatcatcagaaaagatcatcgacatccttccaacctctgtgtgatcaatccacttttacgtttagggtagaccataactctcacgttgagggtagaccattacaaatagtgtgtgtgttgtatttttgttgctttatttcaatttcttacagccgggccagatttttgatataatttgggagttagttcttatatctcgtgctcaataactctttatctctgataatgaaccgaagcatctacagaaatatataagggttttctgcaaaataaccttccaagtcgatctcgttgcaagtttaccctccaagtccgaattatataagtcaatcccaccatctctacagtcacccgcaatacaaccctccggtatatcgatgacgtggcactcgataactccgttgaaaaacataatgattttgtgcaaaaaaaacctcaatataatttttttttgcaaaataaaccttcatgtcaaataaatacaaaccacaatctgaaaaatctcctgcaacatagcccttccatgtatcgatgacgtgacagtcgataactcatttagagcatgtgcaatggatagagattttatgagtcatttatttaaggtgcaatgtgcaatgggtaaacactaaaacttaaataaatgataaccgtaattttaaataaaaaaacaaaattaaatttttgaatcaataactgtaattaggcctgggcataataaccggacccgatacccaaaccgatacccaaactgaaaaagctgggttggggcgggttagggtaaaaggatattacctcattgggtttggttttggttaacccgtgggttcgggttcgggtagggtattactcattacccattccgggtacccatacacccgattcttgtgcttatatagatatccctatatatcatatataacctatacacctatacaccactacttactttttgtcgattcagttttcttcacgaatcccttgaatatcggcttctcttgttaaattctctttgaaccatattctatcaaactggaaacccttgtcgaaacactctcggcgacctcaccgtcaccgacgatcctgttaaacccaccacagacagctcaatcgcgaaatcattctaaggtaagtacgttcatgcaatttcaattctaggtttcgattattgatctcaatctctgattagtttcaaactttcaagtttcaattctcgatttctcagttcctagtttcgattgttgtttgcttgtttcaattcaattctcgatttctcagttcctagctccgattgttgtttatgtagatggcgtcaaatgaaactctacctccaaatgattttgatgatgttgaattaagtggaaatgacgatgatgatgttgttcaacatactcctacttctggaaataagaggaagcgtaaagagaaggaaacaggagatgaaggtgatggaggtaatagttcaaagaaaaagaagacaagtagtcgatcctatgtttgggatcacttcagtagaaagaaaggtaatccaaacaagtgcaattgtcattactgtgggaaagagttggcttgtccttccaagtctggcacctctactttgaaaaaacatttagaattgtcctgcaaagcattcaaggcatggaaaagtactaatacagaccaaactcaaactgttattggtcgtgatggtggtgatggtagtcttaccatgtacaaggtctctgaattagtcattagagaagcttctattgagatgctgattttaggcgaattaccattatctttcatagagagtgtggcttggagacatttctgttctaaagctaaatcgtataagcctgtttctcggagaacaactacaagagaaattgtgatgctttatgtcaagaagaaagtggctatgaagaagattctagggaagagccaggagaggatgtcactgactacagacatttgggtttcaaacaatactggagagagttatatggtaataacagctcattttgttgatgttgattggaagttaaagaagatgataatcggattcaagcatgttactgatcataattgtggaactatttgcaaggttcttctggaatgtttggctgagtgggatataaggagaatcttttgtatcacagtggataatgctacagctaacaacactgcattgactaaattcaagaaaacgatgaagctgattggggatgatgcattggtactgaaaggggaatatatgcacatgcggtgtgatgctcacatcctgaatttagttgtaaaggaaggcttgactgaagtggatgcaagtgtgactagtattcgcaatgggattcagtttgtgaggtcttcaacaaatagactcaaatcatttgatttgcgttgtgatgctggaacgattagtagaggtagcttccctttagatgtgaagacgagatgaaactctacttatctcatgcttgaacaagctgtgaagtttaggattgcttttgagaaaatggaggctgaagataaactatataatgactattatctggaaaaggtggatggagaaaaaaagattggaccgcctatgtcaagtgattgggatgcagctgagaggttaattcaaatccttgctatattttacaagtcgacattggtgctttcaggttcaacttatgttacttctcataagatgtacaatgagataatcaacatggctagaaacctaactaccttaaacacagacactttttttgatgagcaactaaagaagaaagcgatagcaatgttaggaaagctgaagaaatattgggatccgtttggtgaaggagtagaaatgaataggttggtgatggttgctactgtttttgaccctagaaagaagatgaaatttgttgagctttgctttggaaagatgtatggtttaggtagtgtggaggttgttcttctttctgattcagtgattcaaatcttgaaggatttgtatgatgagtatagcagggcaaatttgttgagaataaatggaggcagcgattcaatgccatcttctcagtcacaaggatcatggtctcagtctcaagagcaagatagaagtggagcttatgagagaacaatcaacaaaactggtattcaattagaagatatggagaacttatttgatgagattgtgaaagaaacatgtattcataaatcatctaatgagttggatttgtatttgaatgaggctgtcgagactccacatcttctaatgggaatagaatctgatgtgttagattggtggaagctcaatagtgggaagtttctagttctgtcgctaatagctaaggatatatttgctatgcaagtatcgtcggtggcatcagaatctgcatttagcactagtggtagagtgttagatccatttagaagctgcttaacacattacatgatagaagtcttgatgtgcacagagcaatggttaaagtctgagatcagtatcaatgaaaaaggattgtcaaccattcatgaattgcttgcagatcaagtggacgaagatgagcttatgagaggtaatctattccctttaaactctctttaaattctggtttaccaattatagcttacaagtttgcttatagtccgtgtttcttaaattgttcatgtgatgtagagtttaaacctgaattccacatccatggttttgagtaggccgagttatcgtttcagccttcaggagacaaaaatgcaaaacaaagtcatcacctcatgtcctcatcaactatcgtttaaactttaaacttctacttctatgtttttcattttcggattgttgttttgcttttcaattactcttgtttgagatttgagaacgttctatttgtcatatttgtgttcttgtttgtggtttgccaattaggcttggatttggatgctagttttgttgctttttcattctgtttttttttctcctcatttgttacacatgattagaatatcggtttttcgggtttatgggtaacttttacccaataatacccgaaccgaaggaaacccgtttttttccgggtatttaccggttcttatattgattacccaaaccgacccgaacccgggtgtacccgaaccggaccaaacccaaaaatttcagtttaccctattgggtaataatttcattacccattcaacccgaacccgaacgggttctacccgaacccgaacggattacccatatgcccaggcccaactgtaactaaccaaatttttatcagattcgttctggttcgtttttttctttcaaaataactaaaattaacctaatttaaccgaaattaacaaaaaaaaatacaaagaagaaaaatattagaaagaaacttaaaattttgttttattttgtaaaagagtatttaattttgaaaaatataactaacaatatttggatattttgattatttaaagaatttgattgtttttctaaaagtaattaatattttgagtttataattatagttatgggtattaatttggatattttctaagtttctggatattttggttaaccgtttggttatcggtttggttttattttatttaaaactcaaatcaataactcaattaaatgatatgcattaaagtaatatattcgatagacttataaaatctctaaatgagttatcgactgtcacgtcatcgatacactgaagggatatgttggaggagatttttcagattgtggtttgacctgtatttatttgatatggaggtttatcttgcaaaaaaaaaaatacattgaggtcttttttgcacaaaattcttatattttcaaacggagttatcgagtgccacatcatcgatatacgggagggttgtattgcgggtgacttcaaagatggtggagttaacttgcataattgggatttgaaggataaacttgcaaacgagatcgacttggagggttattttgcagaaaacccaatatataaatatattagataaaactttagaacaatcaattatatgtctaaaatttctttaacctaaccctttttttcttgtttttttcttctgatttcgaactttgtgagcattattgtttactaggaattattttttcttctacttcagtatgaatgaccgttcagtttttagtctgaaaaattagtatcaagatttggctccacaactcaaaatttacttcttaagttttcgaaaacaaaatgtaagatatgattaattcttttctaaaatgaagttccactaatgttttgtcatatctctcggtcatgaaaattaattagctgctaaataagtacattgtaaataaataacgaaacttttctaacaaatttactaatcgaatggcattgatttccatcaaagtagacatggtccctgggaataaaaaacgtctctaatcaggatatgttgtcccaagtagagaaaaaaacaaccaaattacacacagagatcccacagtgaaaaaaaacgagtaaaaagacacattaaaagcgagaagaaaaactaaagcaccagcaaggaatctaattatattacaagaccaaaccgctaattaattttaaagcctttgacttcacgagaactccaaggaaaaaacatgggcctgtccttatcttctccttctctccggcgtccaatgcggtaaggatgggctaaaatgcgccgacacaaccctagaatctagtaactccacgataggtgtaaagttcacgcaccttggtaccttgtactggttaattgatgcacctcttgagattgcgtaatccatcagctcctcgaacgttccgtttctcaccactctaatctccaatggtccaaccgagttgtccgcgactcggctttgccggtaaaccgagtttaatgactcttccatcccaaggcagcaacgagtcagagtctcatgacttggctgcctcgccccatccctcactaacaactcccagtataagacatagtggcccgggatcgtgcttgtgtctgcgtagctagtgtactcggctacgcggctcccacactcttcatgaagaatacttgatgcattctccaccgccttttgaagctctgactcgtcggtcttgtcagagtcgatgctgaggaggacgttcttcctcctcacgaagtggaactgaggtgcggagttatggaaacctgtgactcgaaggatgtcaccaactcggtatcgacagagaccagcataggtcgtgacaacgagttcatactctttaccgatatttacatcaacgagttcaacggccttggtgccaccgagagggatgaactcgaagtaggccatgttgggcatgatggtgtaagagacttctgatggtttgctcattgggttaaggttcaaaccaaagtaacactcggaggaggcgtacatggtgcaagccatcggaagaccaccactatagtattccaacgttgggatatactgagccatggctccagttacgatgacgtcaaggtacttagtgtttggccaaattcgggtaatgattttttcccaattgtccgacttgcactcccggcggatgaactctgccaggacaggatctggtttgagaataccggacatgcattgtcttatagacgggtcagttatctcggagtcaagacatcctaactcgatgtcatgggcgaagcgagaccaatggagctggaggaagcggatggcacggaggagaccagaggcaaagacggcgcccactcggaggacagaaaggcggtcaaggaggccgcatagcatctgagtgtacatactttgaaatgaatcgggacagagaatggcttcgttgggacttgtgtagacgttgtaggggtcgtacggccgtgaccgaaagtgttcactcttgtaataactggtcaaaaccggtcgagctggtagcccacccggtgtctttgtttcggacttaacgaacaaaaagtacattccctttcctttatctagacccggcacatacctgttcgcgaaagagacaatattgtcaacgcttgaacaaataataaagactttatttaacaaactgatcatacgtcactatattgtcgtctagctacgtaatatttttatggttaaaaaagttttattcatgtgaatgacgtacaaattcattacgggcatgaggagactgtaaagaagctggcgacgatcgagctcttctttaatggtcggcataagtttcctctctccggctgatgttccagagctggaaaaatgtttttaggagttattggtttatggattttgattgatttagtaatcggtaaagtaaagatagagaacaaagtatggtgaacaaacctagtgaggaactcagagatgggatgggcagataagatgggagagcggtctccatcagcaatgcgttgaatctctggctggagatcttcgtatgtaatgactggaatcttcgttttaaaggtatcacggtcggtggcgccgcataggttgaagcggcggaggtactcggtgtcagcgttgcgagcgagaatctccgccaaaaggttttcttgaacggtgtcggcgtttcgggtcatttcctcgatgaaacgaagggcttttgcgtccttctcacacgccggaggtcccaagggcgaagagaggttggagtctaccgccatatgttttagctatttgtttttctttgttatctcttttttttggtggaaaaaaaaacaaatcaggagaattaaattgaggtagagaggagagagacagaaggagtttatgttttgtactttggtaatggaatggatgtgttttgggattgaagagcttgttggtatttatatagaggaagcttttaagttggtttttacgtgccacgtcagacggccaaacaaagattagcttcggacaataacatcaactgatctaagtttattacctcccagtcttaactacgatattgcatgcgctctttaagacactaaatatgagctagtaaaaattcaacgcagttaatacaccttcatgaacaattgatgttttatcattttgttatgattttgtagtagtacatattatcttaattcttaaatgataactttacattgcacagaagatttgaacaaaacaatagtagtcacaaataagttacaaggaaaacttgacgcgaagaaaatttgactgaagtaaatgacttgtataaaaataaaagtttaactttgctttcacattttaatcgtgattgtaataatttaagaataaagtttgaaagtgttgaaacttcaaaaagagaccacggaccgtggtaaataaaattttaattatttttttttttggtaaggaaattgcaaagaatttatgggtaatttgctgggtgaataatttatatgaaatgttagcttggacgtgaaactcaaatattacataattgtttttttgtaaaattacgaattaaagtcgggcttttgacaggaaggagactggaaagacacttgctggagaattttgttgtggggaaataaaaaactaaacaaatagtgataagaaaatggagaaacacaagaaatgaggcaagaaaggaggggatgttgaagatgaaggagacatgtaggaccaagagagaacgtcaacatggcacgataggaggaggtcgcatgtggggttaggtcatagccatgtaaagcttataccacctcaccatctttggtctacgcgtttcccatctctcccaacttcttctttatttatttatttatttgttttaatagcatcttagctgaattaccatagagagaaactaaattcggagagtggtagtagcgactattttactcttgagttaatgtggttcgtggaagagcttattatacgctttgttcttcgtgactaataagattacaaaacactttttatgatatcaaacacagaacacacacctctgcattaatccggcttacaaaatagtccgatcatctccactaattgatggtctagaaaataaaacaaaattatcaaaatagctaaaagaacattatttggagagtgtaatgaattctttcaagattaatggttagaaaatccactatctcgatgaagattttggagaagaattttatatcaaaaagatgataaaggatttaaatagtatataagggacatggatcaatctactcattgtcaattgattatgagttaggttctcatgaacttaatcaaaatcttataaaattctttagtattgtttctatgtttactccaaacaattaagggtagattctctgattagtaattggctaagcataatgctgagttaaatggtggcaaaagtttcttggttaaggttatttgatcaagaaaaccttttcgtaacaattttgaaattgcaccaaaaacatttgatgattttctgaaaaatagcaaagttttctgaaaatagcacaattttcttcactcttccacatttgtttttcaaacaactttaaatattttaagtttagtaataaatatagcatgaaaacatgtgttggatagtgtacgccaatttttgctatctgaattctacaatgtgcaatggaaaaaaattataagtctacttcgtatatttgaaattctaataattatatactattctatgactatatatagatagaattaaggttatgttttatttatttaatgatgcacgatagtcactatttatgtgagctatattctgttctagaatatatagaattgagttcttagtaattttctctatatatatatatataatttgataaaatctattcatcagtatgccctagaggttacttaatctgttcacactacgtcaattgtaaatttcacacaataatatattaatatcctatacttttagtttgctatggtttaagtaattattcttattacagggacaaaaggacattaaattaaaaagattggagaggaacgagaaacgcggggcctgacaaaagggaagtctgttgccgtgttggtggtcgaaagcaatggtctaatgggcacgtgagacaaatgcctaaattccatgtatgcatgttttttttttatatcaatgttaagtatttatatggttttcaaattttaaatttttttttatagaattatactaatagcggaaaagaccgaaaaactaaataaggaaaaaaataaaataaaaaaatagagcaaccacaattactactagcaggtaaaaacaaccgtctattgaaatggatttaacggggaatagatcttcttaaaggacatgcacgctttcttgcctcgccatttccactagtaaagatagattagttctctatttggtatagtttggaggaatatgtctcgcttcacaaaactcaatagttcctgcttccaagaagtgcttcacaacataaccaccttattttggaaaattaacaagtaaatctatatattttaaattctaagaactcataagacccatatatatgttcaagtgttatttagttgttacattatttaatgttattttccttaaaaatatataaatatttttcttttataaagtgaacaaaagatataataattggtgaaagcatttttaatcttgccgtcctgaccttgggtctcagccacagcataaatagggtaatcattcgtttggtcagtggttgcaagtcgttaatttttagacgtccgtaaaacaaatcttctgttctcaggatcacctcattttaagtttaaaattttgcattttgaacaaaaccatgtagaatgatacactttttcgttaaaattaatacatatatctactaggtagctcacaagtaaaataacggaaagatatcataaacctgtgcatatattatctaaatactgatgcgtttaataggaaacgtaacgaagttcatgatacggttgaaaggtatttcatttaatatgaatttaactttatttttaatctacatttttgatttggctatggacaattcgaaaaacccttgccgagttggacacataaatcggattccttatgttgtaaacatttaatattacaaatcttgctgtcaaaagtgacatgactctttgcatatgaatcatatgatatgactaagtatatgttagcgttagtttagtgtttttgtttgtgtatatatactataggtttttgttttacaacatatggaagccgatttgtgtgttaaactaaacgataacataatattagctagcttaataacttaagaaagttagctctccaattactagaaataacctgctagctatagctttcttttctgttttcttgccacaaatgttaattatttagttatgacttaaaatttacactacaaaaaaagtcttcatcgttagcgcaaaccatctgctatcgtatgtaatatacagcgaattcacaaatgctatatttgcggcaggtatagtaggtgtcacccctatgacagcatcgttttgtacgctatggtatattttgctacgatagcaacgatataacgccattatagagttttgatatagcactttaatttcttgttataaattactaatctttctaatttcgtatcataataccctcacctaacaggacaactaattattgctctctaatataagttttgtagctttgtgttttatgctatcatatataattttttgacaatgacatcgaagaattgctatagtaaacagaattagtgcgtttaattatgctgtaatataatctactatagttgaaaacaacaaccaatttttgctataatatccaatctcaaagaactatcttttgtgattaattctaaacttgttttgcataacataaacatacaatataacaatagttgttatattataaataagtctgattccaatccaagagacaccattcaaaagttaaacataatcatccaaaataagtttaagctaagccaaatacataacaacacaaatctgattccaaatttcataacagaagtagattagtctagtcttaacctaatcagaaaactagctaatctggaccatagattcttcactccctgcaataatcaacaatgtttcatatcagttcctacataaaaccaaagcacaagcatcacaacaatttcaaaacttaccctagattctgcaaagtcagtaggtcaccaacttatcctttggccatgcaattgatgaaccaagtgaatctctcatatactcgatttcatctgatggcctccagactgctgtatcatctacattcactacatctacccaaactctagctgcattctctcccaaacgaacatggtgtaccttttgatctgggtctattgaatgcactcgtcctgcaccaaccacccgcttctttccacttatatccattaacttgcacttctgattagccttcaaaccttcagatgttttttggcgctgacatgttacattataaaccaggattaaacgcatgtagaaattttattagtcaatatgtcaaaccaaatacaaacttaccggagatctccgtagagcggtttgtgatgctagctgagttttcttcacatgagactttggaactactgttggttgcttctcaccaagagattttgcaattgttcctgcagattctgaacccttggctgcagatacctgaatagaagaattatgacctgactttccttttgttgctccattttgttgcttctcaccaagagatttctctgttgctccattttgttgacttgctgctgctgactttccttttgaggctgatgttgttggataagttgattgagaactctgaagaggagctttctgaactgctgaatctgtggtgttttcataggaaactttgtgggcaggccatgctacaaaagactgtaaacagtcctcaaggtatgtcacatccatcgttggcctccatatgaacgtctcaggttgaagtattacatccacaaatactttcactgcagcaggtccgaaggaagcccattaactaatgcagattggtcttctgtctgccaacgtccttctgcaacaataacgtcattggaagacaaatccagtagtttgcacttgtttccataagtgggtcttggtccctgtcaaacacattaaaccaatgtcttagtatgactctgaatatattagtatgactctgaatatataacattttacctgtgcaatgtcttctggattgagcttctcctctaggctaacacacatagcaacaggccaagctatcatctgaccaacagctttctccataatttccatgttaattgcgggtctccaaaggtatgcttctggtacaatcgcagtgtcaatcaatactttaacatctgtaggacctaagcgacttccattgactatctcatccggatcagaagatataatacaaccctcaacaacggttgcatcagtaccagcccaatccatcaagatacacttaggttgtgatccttggttcacactctgtataaggaatcaataggctattatcatctaattatgtaccaaaagatcaaaagtatcaaataaaagtgacttactcttgcagctgaggtttcaccaacttcagctgattgtctctgtaccaaaaaaaaaaacaaagtcaaatatatgtactaaccgattgattagctttatgcataagtagacaagtgtttacatggttctttatcttgtcaattacttcttgtaactcattgaccttctgctggagctggtcctgtttctgttgcatttcagccatacatttgctttttacttggaaacaagctagtttggtcttgttcatatttcttcccatcgcccttaatctactaggattgtcaggccctaagagttggctaagtgaatcttgtgcttcattcgtcccatttgattgaggaccactgctaacaatctcagctgcctttttctgcaaaccatcacacacaatcacaaaccagtccacacaatcactggctaagttctggatttattgcctatcacattcatttcaaaaccatcacaaaccagtccaatttctgttccatcactaacctatccaatttaacaaaccatcactaacctaacaatcatcacaaaccaaactgtcacaacttccaaactataacatactcataattttttcagccgcatttgtattcactggtgttccatatttcttggtccgtgacttaacccaaacctttagcctcgtcacttcagttgggtctgcactaccaattttctgaaaaacacaacatgccaatattagtagcaagctaagtgttttaagaatttcaaagcaataaaaaacataacctaacagacacataagattaccatatcttctgcaagtctaaccatccctctgcgactacaagtgtgaggaatctggttgcgccttctctccttgtagctatcgcttataacctaacaatgattgttaattagtaactttctacatagtaaatatacttagtttaatcttctccctcaacataccttaaattcagggctagttttgctcttcacaaattttctccactcaaatggagaaacatttttaggtctcagattcatcctctgctggtttgtctttgcttctctaaacttagttacttgccttgatttccaggatctccacaaacatcccatttgcttaagcactgcaaccttttgatactcctcatctagttcaaactttgccttcaatcaattacagaaaaagtgattattgctgtgataaggaaagatagtcaaatattacaaaaaaataaaaagtgaagtgttacctggacagatttccagagaagtgtcctgatttcttcacctatttttgtccaccgattaattgtgatagggacgtgttcacggaccaatgcgcctgcatatgatgctaacttaactgagcctttaccaataggctctcccatcatggtgtactccactctcactctggcatttggatccttagcaatatctttcatcctagttggtccacgttgcctcttggtcttaggttgaacaacatcttcatctccagataattcaagctcgccttcaggttcttctgctgcttgcaattcagcttcgttttctgtctctccattaatgtcttcagcttcgttttctgtctctccattgatatcttcatcagcttctttttctgtctctccattgatgtcttcagcttctttttctgtctctccattgatgtcttcagcttctttttctgtctctccatcgatgtcttcaacttcctcaatgttttctactggaacaacagtttgttctacagctgttggctcaattgtacccacatactccacctcatcattgcatttcgtagcagcagcttttttaggttgtcttccacgctttttcttctattgtcccattgtaaatcacctcagaaaaaatgataaaattaaatcagcactcaaagcagacacacaattaacactaaaaacagacagacaatcaacaaattaaacacaaaagacagacaatcaacaaacacaacagacagacaatcaacactcaaagttaaaacaaagttctacatttcaaacataaatcccttcacaatcacttctctcattctctgctacttccaagtcaacatcgatgtcaactgttgttggcaatggcccaatgtcaagagtaacatcgtcattctctttctctctaaatcttctcgacggacctctcattgcaacatgccaagatgatgagtcatcttcacgcaggaaaaacacttgttttgcttgagaagccataatatacggatcccttaaaaaggagacttgactatgattcaaattaactagtgtaaacccttcttcttccttagctccattgccctttactgcccagttgcaacgaaataaaggaacatagaagacattatagtccaacagtataatgtctgttatgcagccataatactgcaccaaatccaccacttgttccttatcctttgcactagacctacaaactgatgtggcttcatagaaaacaccactattctgtgttttcctgtcaactgttcttgtgtgaaatcgttgcccattcactatgtaaccagtaaatgatcttgcgcaacaacgcggaccataagccagccatttcagtgtttcaccatgagtacttgaatcaagatgtatctatcaaagaaaaatagaaaaagtcaggctcttatatctattgctagcctgttctttaagctaaactactaagtgaaagacaaatactagcctgttctttaagccaagatgcaaaattttgagtgtgcatactccataacagagacgtatcacgtctgcatctcccattagtgtttagtagaagctgcaggtgctcactagtaaacagagaaaacaaaattcagaatcagcattcatagaagcagaaagtgaaaagcaatatagaaaagcaatagaaagagagatagattgtaacttactctacataaggttcgacgacagccatattctggatcacagccaaatgagctatttttctctccatttctgtaagactaataaaggtgcctgcagagataggacgccctccaaggatagagttgttctcatactcagtatttctatctgccttttcctgaacttttgttgtcttcttcaaaaattcactacagaattggatgcactcttcagctaagtaacattcagcaatacacccttcaggtcttgctgtgtttctcacaaaatctttgaggactttcatatatctctcaaaagggtacatccatctgaaatgaactggtccccctaacagagcttctctccctaaatgaactgtcaagtgcaccatgatgtcaaagaaactgggaggaaaaaaactttcaaacagacaaagggtttcaacaatctcagcttctatttccaaaagctgctccatatcaatcactctctgacataagtgattgaaaaatttgcataagcgtctaattcctaccctaggacatttaggtaacaaccctctcaaagctattggaagaagctactgcattaagacgtgataatcatgtgatttcaatcctgttaccttacagtcttctaaagatacacctcttgctatgtctgaacagtagccatctggtcctttaaaatcaaatagacgtttgcagaatagcttcttctctgacttggagagagaccaaagtgctgcaggaagatatgtccttttccctttggtttgcggatgcaagtccttccttataccaagcacctcgagatctttgcgagcattgacaccatcctttgacttcccacaatgcatcaatgttgatacaatagatgcaaccacatttctctccacatgcatgacttctaagttatgccttactggtaggtcctgcaaaacagacaaacaaaatgcattggacattttccctttgtttcaatttaaacaataaaacatatttcaagaaaagagaacagatctgccaaataagatagcctgaaaaagattgaccttttcttccatcttgataactcttcctcatctacttctgcctctttttcctcatcctcctccgagtcactagatagatcatcactatctgatcctgatttaacagactccggttgtttcctcttccttgtagattgtttgaaattcccaaaattattttggaaatttttcaagttatgagaaatttccaaaccacttagtattctactctttcttcgatgttcagctttaccatcaaaccaagacttcttatttctaaacctatgtgatggtggcagacccattctatgtcccatatagacatgttttctgctgaatttcaaccacatgctttctgtatgtttaccacataaaagacacgccatttttcccttcactttacaacccgcaagattcccataagcaggaaaatcactaatcgtccaaagcagcatagctttgagagtaaatgatgatttactgaaagcatcatatgtccattccccattgtcccacagatggcataaatcatctataagtggttctaagtatacatcaatactatttccaggctgttgtgaacccggaatcaacaatgtcagcatgatgttctccttcttcatgcataagtcaggaggcagattgtagtttacaagcaaaacaggccagcagctataccttgtgtttttcatgttgaatggattaaacccatttgtggaaagaccaagcctcaagttcctttcctctgatgcaaataaagggtattttgcattcatctgatcccatgttactgaatcaacagggtggcagagctttccatctgtgcttttgttgtgaaaatgccaccttaaatccctagccatttcctcagatctgaacattcttttgaggcgtgggactattgaaaagtaccgcaacactttctgtggaacacctttctttacttcaccagtatgcatgtttgtcttccatcgtgaagcattgcatttaagacaattctggagcttcttgtatttttttctgaataggcagcagtcattaacacatgcatgaattttctgatagcccatatcaaaggatttcaaaaactttttcacctcatacagtgatgtgtgtagcacattatcctctggtagcatctccggcaatgtctctagaagatcgttgaaactcttgtcagaccagccatttttggtcttcagtctaaacagagacacaatcgcggacagcttgctatggttaacacagcttggatatagaggtgtctcagcatctacaagctt
